United States Patent Application Publication US 2007/0214517 A1 - sequence listing, part 65

SEQ ID NO: 85179 - DNA, 1224 bp, Arabidopsis thaliana
  misc_feature (1)..(1224): Ceres Seq. ID no. 12679247
  misc_feature: MA Experiment ID: 108461 Result: Up-regulated in Transcription
  misc_feature: MA Experiment 108461 PARAMETER Experiment Name: At_Germinating_Seeds_cDNA_P Parameter: Age (day) Value: 1 vs. 0
  misc_feature: MA Experiment 108461 PARAMETER Experiment Name: At_Germinating_Seeds_cDNA_P Parameter: Tissue Value: Germinating Seeds
  misc_feature: MA Experiment ID: 108462 Result: Up-regulated in Transcription
  misc_feature: MA Experiment 108462 PARAMETER Experiment Name: At_Germinating_Seeds_cDNA_P Parameter: Age (day) Value: 2 vs. 0
  misc_feature: MA Experiment 108462 PARAMETER Experiment Name: At_Germinating_Seeds_cDNA_P Parameter: Tissue Value: Germinating Seeds
  misc_feature: MA Experiment ID: 108463 Result: Up-regulated in Transcription
  misc_feature: MA Experiment 108463 PARAMETER Experiment Name: At_Germinating_Seeds_cDNA_P Parameter: Age (day) Value: 3 vs. 0
  misc_feature: MA Experiment 108463 PARAMETER Experiment Name: At_Germinating_Seeds_cDNA_P Parameter: Tissue Value: Germinating Seeds
  misc_feature: MA Experiment ID: 108464 Result: Up-regulated in Transcription
  misc_feature: MA Experiment 108464 PARAMETER Experiment Name: At_Germinating_Seeds_cDNA_P Parameter: Age (day) Value: 4 vs. 0
  misc_feature: MA Experiment 108464 PARAMETER Experiment Name: At_Germinating_Seeds_cDNA_P Parameter: Tissue Value: Germinating Seeds
  misc_feature: MA Experiment ID: 20000185 Result: Up-regulated in Transcription
  misc_feature: MA Experiment 20000185 PARAMETER Experiment Name: At_Roots__P Parameter: Age (day) Value: 7 vs. 21
  misc_feature: MA Experiment 20000185 PARAMETER Experiment Name: At_Roots__P Parameter: Organism Value: A. thaliana
  misc_feature: MA Experiment 20000185 PARAMETER Experiment Name: At_Roots__P Parameter: Tissue Value: Roots vs. Whole Plant
  misc_feature: MA Experiment ID: 20000227 Result: Up-regulated in Transcription
  misc_feature: MA Experiment 20000227 PARAMETER Experiment Name: At_Root-Tips-vs-Tops_P Parameter: Tissue Value: Root Tips vs. Root Tops
  misc_feature: MA Experiment ID: 20000439 Result: Up-regulated in Transcription
  misc_feature: MA Experiment 20000439 PARAMETER Experiment Name: At_Roots__P Parameter: Age (day) Value: 14 vs. 21
  misc_feature: MA Experiment 20000439 PARAMETER Experiment Name: At_Roots__P Parameter: Organism Value: A. thaliana
  misc_feature: MA Experiment 20000439 PARAMETER Experiment Name: At_Roots__P Parameter: Tissue Value: Roots vs. Whole Plant
  misc_feature: MA Experiment ID: 20000460 Result: Down-regulated in Transcription
  misc_feature: MA Experiment 20000460 PARAMETER Experiment Name: At_10percent_PEG_P Parameter: Age (day) Value: 12
  misc_feature: MA Experiment 20000460 PARAMETER Experiment Name: At_10percent_PEG_P Parameter: Organism Value: A. thaliana
  misc_feature: MA Experiment 20000460 PARAMETER Experiment Name: At_10percent_PEG_P Parameter: Plant Line Value: WS
  misc_feature: MA Experiment 20000460 PARAMETER Experiment Name: At_10percent_PEG_P Parameter: Timepoint (day) Value: 12
  misc_feature: MA Experiment 20000460 PARAMETER Experiment Name: At_10percent_PEG_P Parameter: Tissue Value: Whole Plant
  misc_feature: MA Experiment 20000460 PARAMETER Experiment Name: At_10percent_PEG_P Parameter: Treatment Value: 10percent PEG vs. No Treatment
  misc_feature: MA Experiment ID: 20000527 Result: Down-regulated in Transcription
  misc_feature: MA Experiment 20000527 PARAMETER Experiment Name: At_10percent_PEG_P Parameter: Age (day) Value: 20
  misc_feature: MA Experiment 20000527 PARAMETER Experiment Name: At_10percent_PEG_P Parameter: Organism Value: A. thaliana
  misc_feature: MA Experiment 20000527 PARAMETER Experiment Name: At_10percent_PEG_P Parameter: Plant Line Value: WS
  misc_feature: MA Experiment 20000527 PARAMETER Experiment Name: At_10percent_PEG_P Parameter: Timepoint (day) Value: 20
  misc_feature: MA Experiment 20000527 PARAMETER Experiment Name: At_10percent_PEG_P Parameter: Tissue Value: Whole Plant
  misc_feature: MA Experiment 20000527 PARAMETER Experiment Name: At_10percent_PEG_P Parameter: Treatment Value: 10percent PEG vs. No Treatment
  misc_feature: MA Experiment ID: 20001451 Result: Up-regulated in Transcription
  misc_feature: MA Experiment 20001451 PARAMETER Experiment Name: At_Far-red-induction_P Parameter: Age (day) Value: 7
  misc_feature: MA Experiment 20001451 PARAMETER Experiment Name: At_Far-red-induction_P Parameter: Light Value: Far-red vs. White
  misc_feature: MA Experiment 20001451 PARAMETER Experiment Name: At_Far-red-induction_P Parameter: Organism Value: A. thaliana
  misc_feature: MA Experiment 20001451 PARAMETER Experiment Name: At_Far-red-induction_P Parameter: Plant Line Value: Columbia
  misc_feature: MA Experiment 20001451 PARAMETER Experiment Name: At_Far-red-induction_P Parameter: Timepoint (hr) Value: 24
  misc_feature: MA Experiment 20001451 PARAMETER Experiment Name: At_Far-red-induction_P Parameter: Tissue Value: Whole Plant
  misc_feature: MA Experiment ID: 20001774 Result: Down-regulated in Transcription
  misc_feature: MA Experiment 20001774 PARAMETER Experiment Name: At_Far-red-enriched-adult_P Parameter: Age (day) Value: 31
  misc_feature: MA Experiment 20001774 PARAMETER Experiment Name: At_Far-red-enriched-adult_P Parameter: Light Value: Far-red enriched vs. White
  misc_feature: MA Experiment 20001774 PARAMETER Experiment Name: At_Far-red-enriched-adult_P Parameter: Organism Value: A. thaliana
  misc_feature: MA Experiment 20001774 PARAMETER Experiment Name: At_Far-red-enriched-adult_P Parameter: Plant Line Value: Columbia
  misc_feature: MA Experiment 20001774 PARAMETER Experiment Name: At_Far-red-enriched-adult_P Parameter: Timepoint (hr) Value: 72
  misc_feature: MA Experiment 20001774 PARAMETER Experiment Name: At_Far-red-enriched-adult_P Parameter: Tissue Value: Aerial
acaacactcgacacaaaagcaaaaacaaaaatgggtgagaaagatattccaaggaacttgaaggaagaagaagaagaagaagaagaaaaccaaagtgaagaaaccaaaagtttgatctcttcacttccttcagacatagattgctcagggaccaagttgtacaagtaccaaggatgttggtacgacaaagatattctccaagcaatcctcaatttcaacaaaaactttcagccacaagaaacggatataattgttgcttctttccccaaatcgggtacgacttggctcaaggcactcacattcgcactcgcgcaaagatcaaaacacacttcagacaatcatcctctgctaactcataatcctcatgagctagtgccgtacctcgagctcgatctttatctcaaaagctcgaaaccggatttgaccaagttgccatcatcatctccgagattgttctcaacccacatgtcctttgatgcgcttaaagtaccgttgaaagagtctccttgcaagatcgtgtacgtgtgcaggaacgtgaaagacgtattggtatcactttggtgtttcgaaaactccatgagtggagaaaacaatttaagtctcgaggctttgttcgagtctttatgtagcggagttaacttatgcggtcccttatgggaaaatgtgttaggctattggagaggaagcttggaagatcctaagcatgtgcttttcttgaggtacgaggagttgaagacggagcctcgtgtgcaaatcaagagacttgcagagttcttagattgtccattcacaaaggaagaagaagatagtggaggtgtagacaagatcttggaactttgttctctaagaaaccttagcggtttggagatcaacaaaacaggaagcttgtcggaaggagtaagtttcaagagttttttccgtaaaggggaagttggtgattggaagagttatatgactcctgaaatggaaaacaaaatcgacatgattgttgaggagaaacttcaaggctctggtttgaaattgtagagttcatatctctatgtatatgtgtgggaacaggtttaatctcaaacctaataatgctggtttgttcttttcttgtatgcaatgtaataaaagttactttgatgtaaggttaagagtttaagattcttagtgatgtgttgttgtttttgtttcgtttgataatgaataaagctagcggcttttcttcttcgccaaggc

SEQ ID NO: 85180 - protein, 341 aa, Arabidopsis thaliana
  peptide (1)..(341): Ceres Seq. ID no. 12679248
  misc_feature (80)..(338): Pfam Name: Sulfotransferase domain Pfam Description: Sulfotransferase domain
  misc_feature (11)..(341): Homolog of NCBI NO: 15222843 NR Description: steroid sulfotransferase, putative; protein id: supported by cDNA: 150484. [Arabidopsis thaliana]
  misc_feature (11)..(341): Homolog of NCBI NO: 21553545 NR Description: steroid sulfotransferase, putative [Arabidopsis
  misc_feature (11)..(340): Homolog of NCBI NO: 15226028 NR Description: putative steroid sulfotransferase; protein id:
  misc_feature (29)..(340): Homolog of NCBI NO: 15230602 NR Description: sulfotransferase-like protein; protein id:
  misc_feature (28)..(340): Homolog of NCBI NO: 15239947 NR Description: steroid sulfotransferase-like; protein id:
  misc_feature (11)..(340): Homolog of NCBI NO: 15230603 NR Description: sulfotransferase-like protein; protein id:
  misc_feature (11)..(340): Homolog of NCBI NO: 15217849 NR Description: steroid sulfotransferase, putative; protein id: [Arabidopsis thaliana] >gi|25288810|pir||F86407 probable
  misc_feature (27)..(339): Homolog of NCBI NO: 18395604 NR Description: putative steroid sulfotransferase; protein id: supported by cDNA: 3964., supported by cDNA: gi_20260123 thaliana] >gi|20197902|gb|AAD20077.2| putative steroid putative
  misc_feature (27)..(339): Homolog of NCBI NO: 25288806 NR Description: probable steroid sulfotransferase [imported] - thaliana >gi|13272389|gb|AAK17133.1|AF325065_1 putative steroid
  misc_feature (10)..(339): Homolog of NCBI NO: 9759557 NR Description: steroid sulfotransferase-like protein
TTLDTKAKTKMGEKDIPRNLKEEEEEEEENQSEETKSLISSLPSDIDCSGTKLYKYQGCWYDKDILQAILNFNKNFQPQETDIIVASFPKSGTTWLKALTFALAQRSKHTSDNHPLLTHNPHELVPYLELDLYLKSSKPDLTKLPSSSPRLFSTHMSFDALKVPLKESPCKIVYVCRNVKDVLVSLWCFENSMSGENNLSLEALFESLCSGVNLCGPLWENVLGYWRGSLEDPKHVLFLRYEELKTEPRVQIKRLAEFLDCPFTKEEEDSGGVDKILELCSLRNLSGLEINKTGSLSEGVSFKSFFRKGEVGDWKSYMTPEMENKIDMIVEEKLQGSGLKL

SEQ ID NO: 85181 - protein, 331 aa, Arabidopsis thaliana
  peptide (1)..(331): Ceres Seq. ID no. 12679249
  misc_feature (70)..(328): Pfam Name: Sulfotransferase domain Pfam Description: Sulfotransferase domain
  misc_feature (1)..(331): Homolog of NCBI NO: 15222843 NR Description: steroid sulfotransferase, putative; protein id: supported by cDNA: 150484. [Arabidopsis thaliana]
  misc_feature (1)..(331): Homolog of NCBI NO: 21553545 NR Description: steroid sulfotransferase, putative [Arabidopsis
  misc_feature (1)..(330): Homolog of NCBI NO: 15226028 NR Description: putative steroid sulfotransferase; protein id:
  misc_feature (19)..(330): Homolog of NCBI NO: 15230602 NR Description: sulfotransferase-like protein; protein id:
  misc_feature (18)..(330): Homolog of NCBI NO: 15239947 NR Description: steroid sulfotransferase-like; protein id:
  misc_feature (1)..(330): Homolog of NCBI NO: 15230603 NR Description: sulfotransferase-like protein; protein id:
  misc_feature (1)..(330): Homolog of NCBI NO: 15217849 NR Description: steroid sulfotransferase, putative; protein id: [Arabidopsis thaliana] >gi|25288810|pir||F86407 probable
  misc_feature (17)..(329): Homolog of NCBI NO: 18395604 NR Description: putative steroid sulfotransferase; protein id: supported by cDNA: 3964., supported by cDNA: gi_20260123 thaliana] >gi|20197902|gb|AAD20077.2| putative steroid putative
  misc_feature (17)..(329): Homolog of NCBI NO: 25288806 NR Description: probable steroid sulfotransferase [imported] - thaliana >gi|13272389|gb|AAK17133.1|AF325065_1 putative steroid
  misc_feature (1)..(329): Homolog of NCBI NO: 9759557 NR Description: steroid sulfotransferase-like protein
MGEKDIPRNLKEEEEEEEENQSEETKSLISSLPSDIDCSGTKLYKYQGCWYDKDILQAILNFNKNFQPQETDIIVASFPKSGTTWLKALTFALAQRSKHTSDNHPLLTHNPHELVPYLELDLYLKSSKPDLTKLPSSSPRLFSTHMSFDALKVPLKESPCKIVYVCRNVKDVLVSLWCFENSMSGENNLSLEALFESLCSGVNLCGPLWENVLGYWRGSLEDPKHVLFLRYEELKTEPRVQIKRLAEFLDCPFTKEEEDSGGVDKILELCSLRNLSGLEINKTGSLSEGVSFKSFFRKGEVGDWKSYMTPEMENKIDMIVEEKLQGSGLKL

SEQ ID NO: 85182 - protein, 186 aa, Arabidopsis thaliana
  peptide (1)..(186): Ceres Seq. ID no. 12679250
  misc_feature (1)..(183): Pfam Name: Sulfotransferase domain Pfam Description: Sulfotransferase domain
  misc_feature (1)..(186): Homolog of NCBI NO: 15222843 NR Description: steroid sulfotransferase, putative; protein id: supported by cDNA: 150484. [Arabidopsis thaliana]
  misc_feature (1)..(186): Homolog of NCBI NO: 21553545 NR Description: steroid sulfotransferase, putative [Arabidopsis
  misc_feature (1)..(185): Homolog of NCBI NO: 15226028 NR Description: putative steroid sulfotransferase; protein id:
  misc_feature (1)..(185): Homolog of NCBI NO: 15230602 NR Description: sulfotransferase-like protein; protein id:
  misc_feature (1)..(185): Homolog of NCBI NO: 15239947 NR Description: steroid sulfotransferase-like; protein id:
  misc_feature (1)..(185): Homolog of NCBI NO: 15230603 NR Description: sulfotransferase-like protein; protein id:
  misc_feature (1)..(185): Homolog of NCBI NO: 15217849 NR Description: steroid sulfotransferase, putative; protein id: [Arabidopsis thaliana] >gi|25288810|pir||F86407 probable
  misc_feature (1)..(184): Homolog of NCBI NO: 18395604 NR Description: putative steroid sulfotransferase; protein id: supported by cDNA: 3964., supported by cDNA: gi_20260123 thaliana] >gi|20197902|gb|AAD20077.2| putative steroid putative
  misc_feature (1)..(184): Homolog of NCBI NO: 25288806 NR Description: probable steroid sulfotransferase [imported] - thaliana >gi|13272389|gb|AAK17133.1|AF325065_1 putative steroid
  misc_feature (1)..(184): Homolog of NCBI NO: 9759557 NR Description: steroid sulfotransferase-like protein
MSFDALKVPLKESPCKIVYVCRNVKDVLVSLWCFENSMSGENNLSLEALFESLCSGVNLCGPLWENVLGYWRGSLEDPKHVLFLRYEELKTEPRVQIKRLAEFLDCPFTKEEEDSGGVDKILELCSLRNLSGLEINKTGSLSEGVSFKSFFRKGEVGDWKSYMTPEMENKIDMIVEEKLQGSGLKL

SEQ ID NO: 85183 - DNA, 897 bp, Arabidopsis thaliana
  misc_feature (1)..(897): Ceres Seq. ID no. 12679287
  misc_feature: MA Experiment ID: 20000184 Result: Down-regulated in Transcription
  misc_feature: MA Experiment 20000184 PARAMETER Experiment Name: At_Shoots__P Parameter: Age (day) Value: 7
  misc_feature: MA Experiment 20000184 PARAMETER Experiment Name: At_Shoots__P Parameter: Tissue Value: Shoots vs. Whole Plant
  misc_feature: MA Experiment ID: 20000185 Result: Down-regulated in Transcription
  misc_feature: MA Experiment 20000185 PARAMETER Experiment Name: At_Roots__P Parameter: Age (day) Value: 7 vs. 21
  misc_feature: MA Experiment 20000185 PARAMETER Experiment Name: At_Roots__P Parameter: Organism Value: A. thaliana
  misc_feature: MA Experiment 20000185 PARAMETER Experiment Name: At_Roots__P Parameter: Tissue Value: Roots vs. Whole Plant
  misc_feature: MA Experiment ID: 20000234 Result: Down-regulated in Transcription
  misc_feature: MA Experiment 20000234 PARAMETER Experiment Name: At_Siliques_P Parameter: Age (day) Value: 21
  misc_feature: MA Experiment 20000234 PARAMETER Experiment Name: At_Siliques_P Parameter: Organism Value: A. thaliana
  misc_feature: MA Experiment 20000234 PARAMETER Experiment Name: At_Siliques_P Parameter: Plant Line Value: WS
  misc_feature: MA Experiment 20000234 PARAMETER Experiment Name: At_Siliques_P Parameter: Tissue Value: Less Than 5mm Siliques vs. Whole Plant
  misc_feature: MA Experiment ID: 20000264 Result: Down-regulated in Transcription
  misc_feature: MA Experiment 20000264 PARAMETER Experiment Name: At_Open_Flower_P Parameter: Age (day) Value: 21
  misc_feature: MA Experiment 20000264 PARAMETER Experiment Name: At_Open_Flower_P Parameter: Plant Line Value: WS
  misc_feature: MA Experiment 20000264 PARAMETER Experiment Name: At_Open_Flower_P Parameter: Tissue Value: Open Flower vs. Whole Plant
  misc_feature: MA Experiment ID: 20000265 Result: Down-regulated in Transcription
  misc_feature: MA Experiment 20000265 PARAMETER Experiment Name: At_Open_Flower_P Parameter: Age (day) Value: 21
  misc_feature: MA Experiment 20000265 PARAMETER Experiment Name: At_Open_Flower_P Parameter: Plant Line Value: WS
  misc_feature: MA Experiment 20000265 PARAMETER Experiment Name: At_Open_Flower_P Parameter: Tissue Value: Closed Flower vs. Whole Plant
  misc_feature: MA Experiment ID: 20000286 Result: Down-regulated in Transcription
  misc_feature: MA Experiment 20000286 PARAMETER Experiment Name: At_Open_Flower_P Parameter: Age (day) Value: 21
  misc_feature: MA Experiment 20000286 PARAMETER Experiment Name: At_Open_Flower_P Parameter: Plant Line Value: WS
  misc_feature: MA Experiment 20000286 PARAMETER Experiment Name: At_Open_Flower_P Parameter: Tissue Value: Half Open vs. Whole Plant
  misc_feature: MA Experiment ID: 20000438 Result: Down-regulated in Transcription
  misc_feature: MA Experiment 20000438 PARAMETER Experiment Name: At_Shoots__P Parameter: Age (day) Value: 14
  misc_feature: MA Experiment 20000438 PARAMETER Experiment Name: At_Shoots__P Parameter: Tissue Value: Shoots vs. Whole Plant
  misc_feature: MA Experiment ID: 20000439 Result: Down-regulated in Transcription
  misc_feature: MA Experiment 20000439 PARAMETER Experiment Name: At_Roots__P Parameter: Age (day) Value: 14 vs. 21
  misc_feature: MA Experiment 20000439 PARAMETER Experiment Name: At_Roots__P Parameter: Organism Value: A. thaliana
  misc_feature: MA Experiment 20000439 PARAMETER Experiment Name: At_Roots__P Parameter: Tissue Value: Roots vs. Whole Plant
  misc_feature: MA Experiment ID: 20000527 Result: Down-regulated in Transcription
  misc_feature: MA Experiment 20000527 PARAMETER Experiment Name: At_10percent_PEG_P Parameter: Age (day) Value: 20
  misc_feature: MA Experiment 20000527 PARAMETER Experiment Name: At_10percent_PEG_P Parameter: Organism Value: A. thaliana
  misc_feature: MA Experiment 20000527 PARAMETER Experiment Name: At_10percent_PEG_P Parameter: Plant Line Value: WS
  misc_feature: MA Experiment 20000527 PARAMETER Experiment Name: At_10percent_PEG_P Parameter: Timepoint (day) Value: 20
  misc_feature: MA Experiment 20000527 PARAMETER Experiment Name: At_10percent_PEG_P Parameter: Tissue Value: Whole Plant
  misc_feature: MA Experiment 20000527 PARAMETER Experiment Name: At_10percent_PEG_P Parameter: Treatment Value: 10percent PEG vs. No Treatment
  misc_feature: MA Experiment ID: 20000794 Result: Down-regulated in Transcription
  misc_feature: MA Experiment 20000794 PARAMETER Experiment Name: At_Petals_P Parameter: Age (day) Value: 23-25 days
  misc_feature: MA Experiment 20000794 PARAMETER Experiment Name: At_Petals_P Parameter: Plant Line Value: WS
  misc_feature: MA Experiment 20000794 PARAMETER Experiment Name: At_Petals_P Parameter: Tissue Value: Petals vs. Whole plant
  misc_feature: MA Experiment ID: 20001556 Result: Down-regulated in Transcription
  misc_feature: MA Experiment 20001556 PARAMETER Experiment Name: At_Drought_Soil_Dry_P Parameter: Age (day) Value: 26
  misc_feature: MA Experiment 20001556 PARAMETER Experiment Name: At_Drought_Soil_Dry_P Parameter: Organism Value: A. thaliana
  misc_feature: MA Experiment 20001556 PARAMETER Experiment Name: At_Drought_Soil_Dry_P Parameter: Plant Line Value: WS
  misc_feature: MA Experiment 20001556 PARAMETER Experiment Name: At_Drought_Soil_Dry_P Parameter: Post Timepoint (hr) Value: None
  misc_feature: MA Experiment 20001556 PARAMETER Experiment Name: At_Drought_Soil_Dry_P Parameter: Post-Treatment Value: None
  misc_feature: MA Experiment 20001556 PARAMETER Experiment Name: At_Drought_Soil_Dry_P Parameter: Timepoint (day) Value: 12
  misc_feature: MA Experiment 20001556 PARAMETER Experiment Name: At_Drought_Soil_Dry_P Parameter: Treatment Value: Drought vs. No Drought
  misc_feature: MA Experiment ID: 20001557 Result: Down-regulated in Transcription
  misc_feature: MA Experiment 20001557 PARAMETER Experiment Name: At_Drought_Soil_Dry_P Parameter: Age (day) Value: 27
  misc_feature: MA Experiment 20001557 PARAMETER Experiment Name: At_Drought_Soil_Dry_P Parameter: Organism Value: A. thaliana
  misc_feature: MA Experiment 20001557 PARAMETER Experiment Name: At_Drought_Soil_Dry_P Parameter: Plant Line Value: WS
  misc_feature: MA Experiment 20001557 PARAMETER Experiment Name: At_Drought_Soil_Dry_P Parameter: Post Timepoint (hr) Value: 3
  misc_feature: MA Experiment 20001557 PARAMETER Experiment Name: At_Drought_Soil_Dry_P Parameter: Post-Treatment Value: Re-Water vs. No Drought
  misc_feature: MA Experiment 20001557 PARAMETER Experiment Name: At_Drought_Soil_Dry_P Parameter: Timepoint (day) Value: 13
  misc_feature: MA Experiment 20001557 PARAMETER Experiment Name: At_Drought_Soil_Dry_P Parameter: Treatment Value: Drought vs. No Drought
  misc_feature: MA Experiment ID: 20001558 Result: Down-regulated in Transcription
  misc_feature: MA Experiment 20001558 PARAMETER Experiment Name: At_Drought_Soil_Dry_P Parameter: Age (day) Value: 27
  misc_feature: MA Experiment 20001558 PARAMETER Experiment Name: At_Drought_Soil_Dry_P Parameter: Organism Value: A. thaliana
  misc_feature: MA Experiment 20001558 PARAMETER Experiment Name: At_Drought_Soil_Dry_P Parameter: Plant Line Value: WS
  misc_feature: MA Experiment 20001558 PARAMETER Experiment Name: At_Drought_Soil_Dry_P Parameter: Post Timepoint (hr) Value: 6
  misc_feature: MA Experiment 20001558 PARAMETER Experiment Name: At_Drought_Soil_Dry_P Parameter: Post-Treatment Value: Re-Water vs. No Drought
  misc_feature: MA Experiment 20001558 PARAMETER Experiment Name: At_Drought_Soil_Dry_P Parameter: Timepoint (day) Value: 13
  misc_feature: MA Experiment 20001558 PARAMETER Experiment Name: At_Drought_Soil_Dry_P Parameter: Treatment Value: Drought vs. No Drought
  misc_feature: MA Experiment ID: 20001560 Result: Down-regulated in Transcription
  misc_feature: MA Experiment 20001560 PARAMETER Experiment Name: At_Drought_Soil_Dry_P Parameter: Age (day) Value: 28
  misc_feature: MA Experiment 20001560 PARAMETER Experiment Name: At_Drought_Soil_Dry_P Parameter: Organism Value: A. thaliana
  misc_feature: MA Experiment 20001560 PARAMETER Experiment Name: At_Drought_Soil_Dry_P Parameter: Plant Line Value: WS
  misc_feature: MA Experiment 20001560 PARAMETER Experiment Name: At_Drought_Soil_Dry_P Parameter: Post Timepoint (hr) Value: None
  misc_feature: MA Experiment 20001560 PARAMETER Experiment Name: At_Drought_Soil_Dry_P Parameter: Post-Treatment Value: None
  misc_feature: MA Experiment 20001560 PARAMETER Experiment Name: At_Drought_Soil_Dry_P Parameter: Timepoint (day) Value: 14
  misc_feature: MA Experiment 20001560 PARAMETER Experiment Name: At_Drought_Soil_Dry_P Parameter: Treatment Value: Drought vs. No Drought
  misc_feature: MA Experiment ID: 20001768 Result: Up-regulated in Transcription
  misc_feature: MA Experiment 20001768 PARAMETER Experiment Name: At_Far-red-enriched-adult_P Parameter: Age (day) Value: 28
  misc_feature: MA Experiment 20001768 PARAMETER Experiment Name: At_Far-red-enriched-adult_P Parameter: Light Value: Far-red enriched vs. White
  misc_feature: MA Experiment 20001768 PARAMETER Experiment Name: At_Far-red-enriched-adult_P Parameter: Organism Value: A. thaliana
  misc_feature: MA Experiment 20001768 PARAMETER Experiment Name: At_Far-red-enriched-adult_P Parameter: Plant Line Value: Columbia
  misc_feature: MA Experiment 20001768 PARAMETER Experiment Name: At_Far-red-enriched-adult_P Parameter: Timepoint (hr) Value: 1
  misc_feature: MA Experiment 20001768 PARAMETER Experiment Name: At_Far-red-enriched-adult_P Parameter: Tissue Value: Aerial
  misc_feature: MA Experiment ID: 20001771 Result: Up-regulated in Transcription
  misc_feature: MA Experiment 20001771 PARAMETER Experiment Name: At_Far-red-enriched-adult_P Parameter: Age (day) Value: 28
  misc_feature: MA Experiment 20001771 PARAMETER Experiment Name: At_Far-red-enriched-adult_P Parameter: Light Value: Far-red enriched vs. White
  misc_feature: MA Experiment 20001771 PARAMETER Experiment Name: At_Far-red-enriched-adult_P Parameter: Organism Value: A. thaliana
  misc_feature: MA Experiment 20001771 PARAMETER Experiment Name: At_Far-red-enriched-adult_P Parameter: Plant Line Value: Columbia
  misc_feature: MA Experiment 20001771 PARAMETER Experiment Name: At_Far-red-enriched-adult_P Parameter: Timepoint (hr) Value: 16
  misc_feature: MA Experiment 20001771 PARAMETER Experiment Name: At_Far-red-enriched-adult_P Parameter: Tissue Value: Aerial
  misc_feature: MA Experiment ID: 20001773 Result: Up-regulated in Transcription
  misc_feature: MA Experiment 20001773 PARAMETER Experiment Name: At_Far-red-enriched-adult_P Parameter: Age (day) Value: 30
  misc_feature: MA Experiment 20001773 PARAMETER Experiment Name: At_Far-red-enriched-adult_P Parameter: Light Value: Far-red enriched vs. White
  misc_feature: MA Experiment 20001773 PARAMETER Experiment Name: At_Far-red-enriched-adult_P Parameter: Organism Value: A. thaliana
  misc_feature: MA Experiment 20001773 PARAMETER Experiment Name: At_Far-red-enriched-adult_P Parameter: Plant Line Value: Columbia
  misc_feature: MA Experiment 20001773 PARAMETER Experiment Name: At_Far-red-enriched-adult_P Parameter: Timepoint (hr) Value: 48
  misc_feature: MA Experiment 20001773 PARAMETER Experiment Name: At_Far-red-enriched-adult_P Parameter: Tissue Value: Aerial
  misc_feature: MA Experiment ID: 20001774 Result: Down-regulated in Transcription
  misc_feature: MA Experiment 20001774 PARAMETER Experiment Name: At_Far-red-enriched-adult_P Parameter: Age (day) Value: 31
  misc_feature: MA Experiment 20001774 PARAMETER Experiment Name: At_Far-red-enriched-adult_P Parameter: Light Value: Far-red enriched vs. White
  misc_feature: MA Experiment 20001774 PARAMETER Experiment Name: At_Far-red-enriched-adult_P Parameter: Organism Value: A. thaliana
  misc_feature: MA Experiment 20001774 PARAMETER Experiment Name: At_Far-red-enriched-adult_P Parameter: Plant Line Value: Columbia
  misc_feature: MA Experiment 20001774 PARAMETER Experiment Name: At_Far-red-enriched-adult_P Parameter: Timepoint (hr) Value: 72
  misc_feature: MA Experiment 20001774 PARAMETER Experiment Name: At_Far-red-enriched-adult_P Parameter: Tissue Value: Aerial
  misc_feature: MA Experiment ID: 20001911 Result: Down-regulated in Transcription
  misc_feature: MA Experiment 20001911 PARAMETER Experiment Name: At_Drought_Reproduction_P Parameter: Age (day) Value: 40
  misc_feature: MA Experiment 20001911 PARAMETER Experiment Name: At_Drought_Reproduction_P Parameter: Organism Value: A. thaliana
  misc_feature: MA Experiment 20001911 PARAMETER Experiment Name: At_Drought_Reproduction_P Parameter: Plant Line Value: WS
  misc_feature: MA Experiment 20001911 PARAMETER Experiment Name: At_Drought_Reproduction_P Parameter: Timepoint (day) Value: 10
  misc_feature: MA Experiment 20001911 PARAMETER Experiment Name: At_Drought_Reproduction_P Parameter: Tissue Value: Flowers
  misc_feature: MA Experiment 20001911 PARAMETER Experiment Name: At_Drought_Reproduction_P Parameter: Treatment Value: Drought vs. No Drought
atgtataaggcaagtcctaaaagaaaagagattgtagagaaaagcaagagtgtaagagagaaggagattaaacaaaactcaaatttctttgccaaacacttaaagaggatttacccaatcacgcttcaacgaagcacttcttcttcattttcactctcttctatatctctatcactctctcagaactcgaccgattctgtttccacggattcaaattcgacgttggaacaaaagatctctctggcactcggtttaatctcatctccccacagaagagaaatatttgttccaaaaagtatcccacaacaactatgtcaggatttcaatagtagtgatgaaccaaagaggtgcaactggatcaccaagaaaagtgacgaagtctacgtaatgtttcatgaccagcaatggggagtccctgtctatgatgataacctgctttttgagttccttgccatgtcggggatgttaatggactataactggaccgagattctaaaacgcaaagaacactttagagaggcattttgtgagtttgacccaaatcgggtggccaaaatgggagagaaagagatcgcagagattgcatcaaataaagcaataatgttacaagagagtagagtggtcaatgaatttggatcattcagcagcttcgtttgggggtttatggattacaaacctatcattaacaaattcaagtattcaagaaatgtaccattgagatctcctaaggctgagataattagcaaagatatgatcaaacgagggtttcgatttgtcggtccagtgatcgtacattcgttcatgcaggctgcagggttaacaattgatcacctcgtcgattgttttagacatggtgattgtgtgagcctcgctgagaggccatggaggcatatatga

SEQ ID NO: 85184 - protein, 298 aa, Arabidopsis thaliana
  peptide (1)..(298): Ceres Seq. ID no. 12679288
  misc_feature (119)..(286): Pfam Name: Methyladenine glycosylase Pfam Description: Methyladenine glycosylase
  misc_feature (1)..(298): Homolog of NCBI NO: 25518014 NR Description: F21F23.7 protein - Arabidopsis thaliana
  misc_feature (3)..(293): Homolog of NCBI NO: 15242914 NR Description: putative protein; protein id: At5g57970.1
  misc_feature (4)..(292): Homolog of NCBI NO: 15220860 NR Description: DNA-3-methyladenine glycosidase, putative; id: At1g80850.1 [Arabidopsis thaliana] >gi|25406698|pir||B96841
  misc_feature (45)..(293): Homolog of NCBI NO: 18410766 NR Description: putative DNA-3-methyladenine glycosylase I; id: At1g75090.1, supported by cDNA: gi_14334651, supported by gi_17104586 [Arabidopsis thaliana] >gi|14334652|gb|AAK59504.1|
  misc_feature (40)..(292): Homolog of NCBI NO: 15218379 NR Description: hypothetical protein; protein id: At1g15970.1
  misc_feature (112)..(291): Homolog of NCBI NO: 15241554 NR Description: putative protein; protein id: At5g44680.1, by cDNA: 29551. [Arabidopsis thaliana]
  misc_feature (109)..(294): Homolog of NCBI NO: 18399721 NR Description: expressed protein; protein id: At3g12710.1,
  misc_feature (112)..(291): Homolog of NCBI NO: 21592537 NR Description: unknown [Arabidopsis thaliana]
  misc_feature (109)..(294): Homolog of NCBI NO: 21536975 NR Description: unknown [Arabidopsis thaliana]
  misc_feature (109)..(291): Homolog of NCBI NO: 38345034 NR Description: OSJNBa0029H02.18 [Oryza sativa (japonica
MYKASPKRKEIVEKSKSVREKEIKQNSNFFAKHLKRIYPITLQRSTSSSFSLSSISLSLSQNSTDSVSTDSNSTLEQKISLALGLISSPHRREIFVPKSIPQQLCQDFNSSDEPKRCNWITKKSDEVYVMFHDQQWGVPVYDDNLLFEFLAMSGMLMDYNWTEILKRKEHFREAFCEFDPNRVAKMGEKEIAEIASNKAIMLQESRVVNEFGSFSSFVWGFMDYKPIINKFKYSRNVPLRSPKAEIISKDMIKRGFRFVGPVIVHSFMQAAGLTIDHLVDCFRHGDCVSLAERPWRHI

SEQ ID NO: 85185 - protein, 169 aa, Arabidopsis thaliana
  peptide (1)..(169): Ceres Seq. ID no. 12679289
  misc_feature (1)..(157): Pfam Name: Methyladenine glycosylase Pfam Description: Methyladenine glycosylase
  misc_feature (1)..(169): Homolog of NCBI NO: 25518014 NR Description: F21F23.7 protein - Arabidopsis thaliana
  misc_feature (1)..(164): Homolog of NCBI NO: 15242914 NR Description: putative protein; protein id: At5g57970.1
  misc_feature (1)..(163): Homolog of NCBI NO: 15220860 NR Description: DNA-3-methyladenine glycosidase, putative; id: At1g80850.1 [Arabidopsis thaliana] >gi|25406698|pir||B96841
  misc_feature (1)..(164): Homolog of NCBI NO: 18410766 NR Description: putative DNA-3-methyladenine glycosylase I; id: At1g75090.1, supported by cDNA: gi_14334651, supported by gi_17104586 [Arabidopsis thaliana] >gi|14334652|gb|AAK59504.1|
  misc_feature (1)..(163): Homolog of NCBI NO: 15218379 NR Description: hypothetical protein; protein id: At1g15970.1
  misc_feature (1)..(162): Homolog of NCBI NO: 15241554 NR Description: putative protein; protein id: At5g44680.1, by cDNA: 29551. [Arabidopsis thaliana]
  misc_feature (1)..(165): Homolog of NCBI NO: 18399721 NR Description: expressed protein; protein id: At3g12710.1,
  misc_feature (1)..(162): Homolog of NCBI NO: 21592537 NR Description: unknown [Arabidopsis thaliana]
  misc_feature (1)..(165): Homolog of NCBI NO: 21536975 NR Description: unknown [Arabidopsis thaliana]
  misc_feature (1)..(162): Homolog of NCBI NO: 38345034 NR Description: OSJNBa0029H02.18 [Oryza sativa (japonica
MFHDQQWGVPVYDDNLLFEFLAMSGMLMDYNWTEILKRKEHFREAFCEFDPNRVAKMGEKEIAEIASNKAIMLQESRVVNEFGSFSSFVWGFMDYKPIINKFKYSRNVPLRSPKAEIISKDMIKRGFRFVGPVIVHSFMQAAGLTIDHLVDCFRHGDCVSLAERPWRHI

SEQ ID NO: 85186 - DNA, 1756 bp, Arabidopsis thaliana
  misc_feature (1)..(1756): Ceres Seq. ID no. 12679358
  misc_feature: MA Experiment ID: 20000182 Result: Up-regulated in Transcription
  misc_feature: MA Experiment 20000182 PARAMETER Experiment Name: At_2mM_SA_P Parameter: Age (day) Value: 14
  misc_feature: MA Experiment 20000182 PARAMETER Experiment Name: At_2mM_SA_P Parameter: Organism Value: A. thaliana
  misc_feature: MA Experiment 20000182 PARAMETER Experiment Name: At_2mM_SA_P Parameter: Plant Line Value: WS
  misc_feature: MA Experiment 20000182 PARAMETER Experiment Name: At_2mM_SA_P Parameter: Timepoint (hr) Value: 6
  misc_feature: MA Experiment 20000182 PARAMETER Experiment Name: At_2mM_SA_P Parameter: Tissue Value: Aerial
  misc_feature: MA Experiment 20000182 PARAMETER Experiment Name: At_2mM_SA_P Parameter: Treatment Value: 2mM SA vs. No Treatment
  misc_feature: MA Experiment ID: 20000184 Result: Down-regulated in Transcription
  misc_feature: MA Experiment 20000184 PARAMETER Experiment Name: At_Shoots__P Parameter: Age (day) Value: 7
  misc_feature: MA Experiment 20000184 PARAMETER Experiment Name: At_Shoots__P Parameter: Tissue Value: Shoots vs. Whole Plant
  misc_feature: MA Experiment ID: 20000214 Result: Down-regulated in Transcription
  misc_feature: MA Experiment 20000214 PARAMETER Experiment Name: At_4deg_Cold_P Parameter: Timepoint (hr) Value: 6
  misc_feature: MA Experiment ID: 20000234 Result: Down-regulated in Transcription
  misc_feature: MA Experiment 20000234 PARAMETER Experiment Name: At_Siliques_P Parameter: Age (day) Value: 21
  misc_feature: MA Experiment 20000234 PARAMETER Experiment Name: At_Siliques_P Parameter: Organism Value: A. thaliana
  misc_feature: MA Experiment 20000234 PARAMETER Experiment Name: At_Siliques_P Parameter: Plant Line Value: WS
  misc_feature: MA Experiment 20000234 PARAMETER Experiment Name: At_Siliques_P Parameter: Tissue Value: Less Than 5mm Siliques vs. Whole Plant
  misc_feature: MA Experiment ID: 20001450 Result: Up-regulated in Transcription
  misc_feature: MA Experiment 20001450 PARAMETER Experiment Name: At_Far-red-induction_P Parameter: Age (day) Value: 7
  misc_feature: MA Experiment 20001450 PARAMETER Experiment Name: At_Far-red-induction_P Parameter: Light Value: Far-red vs. White
  misc_feature: MA Experiment 20001450 PARAMETER Experiment Name: At_Far-red-induction_P Parameter: Organism Value: A. thaliana
  misc_feature: MA Experiment 20001450 PARAMETER Experiment Name: At_Far-red-induction_P Parameter: Plant Line Value: Columbia
  misc_feature: MA Experiment 20001450 PARAMETER Experiment Name: At_Far-red-induction_P Parameter: Timepoint (hr) Value: 8
  misc_feature: MA Experiment 20001450 PARAMETER Experiment Name: At_Far-red-induction_P Parameter: Tissue Value: Whole Plant
aaatcttagctctcaccaacgacgaaactcgtctccctccatcttgctatggatcgtcagccggagagggagaatgatgaactaccatctccggcgataatttccgaccgagttctggtaaatggtgttgtcacgccgttaacgttgaccgccgagggagagctacgatcgacggaatctggacggcggaaatcgacgttggcaaaagaaatcctgagtttcgtcgtggaaggtaacaaggttagagtaaagaccttggttgagaaaggaggaggaatttgctgtagaggaagtgctggagattatgcgaggaacgatttcgttttcgagcctctctctgatgaatctagaaagctttggtccgataagttccatcaacacctcgtctctctcggtcggccaaagaaattgcttgtgtttgtgaatccgtttggcgggaagaaaacagcgagaaagatatttcaagaggaagtaaagccattgtttgaagatgcaaatattcaacttgagattcaagaaaccaagtatcagttgcatgcaaaggaaattgttaggtccatggatgtatcaaaatacgatggtattgtttgtgttagcggtgacggtatccttgttgaggttgtaaatggactgcttgaaagagaagactggaagactgccataaaattgccgatcggaatggtccctgcaggaagtggtaatggcatgattaaatcattgttggaaccggtagggcttccttgtagtgcaacaagtgctactatttcgataatccgaggtcgtacacgttctctagatgtagcaactatctcacaagggactaccaaattcttcagtgtcttgatgcttgcttggggtttagtggctgatatagacatcgagtcagagaaattcagatggatgggtagtgctcgctttgatatctatggtcttcagaggataatatgcttaagacaataccatggacgaattctatttgtgccagctcctgggttcgaaagctatgggcaacgagccagttgcagtatagataaagagccatctggtagtgataagacactcgtataccaaggacctgatagtaaacttgaaaatctggattggagagaaatgaaaggcccatttgtttcagtatggcttcataatgttccctggggtgctgagaacactttggctgctcctgacgctaagttttctgatggcttcctggatttgattgtcatgaaagactgtcctaaactagccttgctatcacttatgacaaagttgagtgatggaacccatgtccaatcaccatatgcatcatatctgaaggtgaaggcattcgtactggagccaggtgcacgcatagacgaaccagacaaggaaggaatcatagattcagatggagaagttttggcaagaggaagaaaatcgtacaaatgtgatcaaaaggctttgatgtcttacgacaagcttcaaataagtgttgatcaaggtttagccactctcttctctcctgaataattctgactgatacatgagatgtgatgagatgagatgaagttgtcccttgtggctataatttgattgatggacattacaatacaaaaaatgagaagatgattcgagttatatagtaaatccctaaagattaccattgagtgtattgtttattgttgtattgctgttgtattgcagttttgagttttttgttagaaagttgtgtgaactaagatattgagaagaccataaatactaaatgtgagattttttt

SEQ ID NO: 85187 - protein, 485 aa, Arabidopsis thaliana
  peptide (1)..(485): Ceres Seq. ID no. 12679359
  misc_feature (120)..(252): Pfam Name: Diacylglycerol kinase catalytic domain (presumed) Pfam Description: Diacylglycerol kinase catalytic domain
  misc_feature (1)..(485): Homolog of NCBI NO: 22136030 NR Description: putative protein [Arabidopsis thaliana]
  misc_feature (1)..(381): Homolog of NCBI NO: 15234501 NR Description: putative protein; protein id: At4g21540.1
  misc_feature (233)..(484): Homolog of NCBI NO: 34898712 NR Description: putative sphingosine kinase [Oryza sativa
  misc_feature (18)..(214): Homolog of NCBI NO: 34898712 NR Description: putative sphingosine kinase [Oryza sativa
  misc_feature (8)..(293): Homolog of NCBI NO: 15234501 NR Description: putative protein; protein id: At4g21540.1
  misc_feature (72)..(476): Homolog of NCBI NO: 15234501 NR Description: putative protein; protein id: At4g21540.1
  misc_feature (189)..(403): Homolog of NCBI NO: 34910090 NR Description: B1100D10.20 [Oryza sativa (japonica
  misc_feature (37)..(191): Homolog of NCBI NO: 34910090 NR Description: B1100D10.20 [Oryza sativa (japonica
  misc_feature (216)..(485): Homolog of NCBI NO: 15234501 NR Description: putative protein; protein id: At4g21540.1
  misc_feature (104)..(313): Homolog of NCBI NO: 28828335 NR Description: similar to Homo sapiens (Human). Hypothetical
MDRQPERENDELPSPAIISDRVLVNGVVTPLTLTAEGELRSTESGRRKSTLAKEILSFVVEGNKVRVKTLVEKGGGICCRGSAGDYARNDFVFEPLSDESRKLWSDKFHQHLVSLGRPKKLLVFVNPFGGKKTARKIFQEEVKPLFEDANIQLEIQETKYQLHAKEIVRSMDVSKYDGIVCVSGDGILVEVVNGLLEREDWKTAIKLPIGMVPAGSGNGMIKSLLEPVGLPCSATSATISIIRGRTRSLDVATISQGTTKFFSVLMLAWGLVADIDIESEKFRWMGSARFDIYGLQRIICLRQYHGRILFVPAPGFESYGQRASCSIDKEPSGSDKTLVYQGPDSKLENLDWREMKGPFVSVWLHNVPWGAENTLAAPDAKFSDGFLDLIVMKDCPKLALLSLMTKLSDGTHVQSPYASYLKVKAFVLEPGARIDEPDKEGIIDSDGEVLARGRKSYKCDQKALMSYDKLQISVDQGLATLFSPE

SEQ ID NO: 85188 - protein, 315 aa, Arabidopsis thaliana
  peptide (1)..(315): Ceres Seq. ID no. 12679360
  misc_feature (1)..(82): Pfam Name: Diacylglycerol kinase catalytic domain (presumed) Pfam Description: Diacylglycerol kinase catalytic domain
  misc_feature (1)..(315): Homolog of NCBI NO: 22136030 NR Description: putative protein [Arabidopsis thaliana]
  misc_feature (1)..(211): Homolog of NCBI NO: 15234501 NR Description: putative protein; protein id: At4g21540.1
  misc_feature (63)..(314): Homolog of NCBI NO: 34898712 NR Description: putative sphingosine kinase [Oryza sativa
  misc_feature (1)..(44): Homolog of NCBI NO: 34898712 NR Description: putative sphingosine kinase [Oryza sativa
  misc_feature (1)..(123): Homolog of NCBI NO: 15234501 NR Description: putative protein; protein id: At4g21540.1
  misc_feature (1)..(306): Homolog of NCBI NO: 15234501 NR Description: putative protein; protein id: At4g21540.1
  misc_feature (19)..(233): Homolog of NCBI NO: 34910090 NR Description: B1100D10.20 [Oryza sativa (japonica
  misc_feature (1)..(21): Homolog of NCBI NO: 34910090 NR Description: B1100D10.20 [Oryza sativa (japonica
  misc_feature (46)..(315): Homolog of NCBI NO: 15234501 NR Description: putative protein; protein id: At4g21540.1
  misc_feature (1)..(143): Homolog of NCBI NO: 28828335 NR Description: similar to Homo sapiens (Human). Hypothetical
MDVSKYDGIVCVSGDGILVEVVNGLLEREDWKTAIKLPIGMVPAGSGNGMIKSLLEPVGLPCSATSATISIIRGRTRSLDVATISQGTTKFFSVLMLAWGLVADIDIESEKFRWMGSARFDIYGLQRIICLRQYHGRILFVPAPGFESYGQRASCSIDKEPSGSDKTLVYQGPDSKLENLDWREMKGPFVSVWLHNVPWGAENTLAAPDAKFSDGFLDLIVMKDCPKLALLSLMTKLSDGTHVQSPYASYLKVKAFVLEPGARIDEPDKEGIIDSDGEVLARGRKSYKCDQKALMSYDKLQISVDQGLATLFSPE

SEQ ID NO: 85189 - protein, 275 aa, Arabidopsis thaliana
  peptide (1)..(275): Ceres Seq. ID no. 12679361
  misc_feature (1)..(275): Homolog of NCBI NO: 22136030 NR Description: putative protein [Arabidopsis thaliana]
  misc_feature (1)..(171): Homolog of NCBI NO: 15234501 NR Description: putative protein; protein id: At4g21540.1
  misc_feature (23)..(274): Homolog of NCBI NO: 34898712 NR Description: putative sphingosine kinase [Oryza sativa
  misc_feature (1)..(83): Homolog of NCBI NO: 15234501 NR Description: putative protein; protein id: At4g21540.1
  misc_feature (1)..(266): Homolog of NCBI NO: 15234501 NR Description: putative protein; protein id: At4g21540.1
  misc_feature (1)..(193): Homolog of NCBI NO: 34910090 NR Description: B1100D10.20 [Oryza sativa (japonica
  misc_feature (6)..(275): Homolog of NCBI NO: 15234501 NR Description: putative protein; protein id: At4g21540.1
  misc_feature (1)..(103): Homolog of NCBI NO: 28828335 NR Description: similar to Homo sapiens (Human). Hypothetical
  misc_feature (142)..(249): Homolog of NCBI NO: 28828335 NR Description: similar to Homo sapiens (Human). Hypothetical
  misc_feature (1)..(240): Homolog of NCBI NO: 17369329 NR Description: Sphingosine kinase 1 (SK 1) (SPK 1) sphingosine kinase [Homo sapiens] >gi|10433791|dbj|BAB14028.1| protein product [Homo sapiens] >gi|10435312|dbj|BAB14558.1|
MVPAGSGNGMIKSLLEPVGLPCSATSATISIIRGRTRSLDVATISQGTTKFFSVLMLAWGLVADIDIESEKFRWMGSARFDIYGLQRIICLRQYHGRILFVPAPGFESYGQRASCSIDKEPSGSDKTLVYQGPDSKLENLDWREMKGPFVSVWLHNVPWGAENTLAAPDAKFSDGFLDLIVMKDCPKLALLSLMTKLSDGTHVQSPYASYLKVKAFVLEPGARIDEPDKEGIIDSDGEVLARGRKSYKCDQKALMSYDKLQISVDQGLATLFSPE

SEQ ID NO: 85190 - DNA, 1424 bp, Arabidopsis thaliana
  misc_feature (1)..(1424): Ceres Seq. ID no. 12679362
  misc_feature: MA Experiment ID: 108434 Result: Up-regulated in Transcription
  misc_feature: MA Experiment 108434 PARAMETER Experiment Name: At_Root_Tips_cDNA_P Parameter: Tissue Value: Root Tips
  misc_feature: MA Experiment ID: 108462 Result: Down-regulated in Transcription
  misc_feature: MA Experiment 108462 PARAMETER Experiment Name: At_Germinating_Seeds_cDNA_P Parameter: Age (day) Value: 2 vs. 0
  misc_feature: MA Experiment 108462 PARAMETER Experiment Name: At_Germinating_Seeds_cDNA_P Parameter: Tissue Value: Germinating Seeds
  misc_feature: MA Experiment ID: 108463 Result: Down-regulated in Transcription
  misc_feature: MA Experiment 108463 PARAMETER Experiment Name: At_Germinating_Seeds_cDNA_P Parameter: Age (day) Value: 3 vs. 0
  misc_feature: MA Experiment 108463 PARAMETER Experiment Name: At_Germinating_Seeds_cDNA_P Parameter: Tissue Value: Germinating Seeds
  misc_feature: MA Experiment ID: 108464 Result: Down-regulated in Transcription
  misc_feature: MA Experiment 108464 PARAMETER Experiment Name: At_Germinating_Seeds_cDNA_P Parameter: Age (day) Value: 4 vs. 0
  misc_feature: MA Experiment 108464 PARAMETER Experiment Name: At_Germinating_Seeds_cDNA_P Parameter: Tissue Value: Germinating Seeds
  misc_feature: MA Experiment ID: 108573 Result: Down-regulated in Transcription
  misc_feature: MA Experiment 108573 PARAMETER Experiment Name: At_Drought_cDNA_P Parameter: Timepoint (hr) Value: 6
  misc_feature: MA Experiment 108573 PARAMETER Experiment Name: At_Drought_cDNA_P Parameter: Tissue Value: Aerial
  misc_feature: MA Experiment 108573 PARAMETER Experiment Name: At_Drought_cDNA_P Parameter: Treatment Value: Drought vs. No Drought
  misc_feature: MA Experiment ID: 108595 Result: Down-regulated in Transcription
  misc_feature: MA Experiment 108595 PARAMETER Experiment Name: At_Ler-pi_Ovule_cDNA_P Parameter: Plant Line Value: null
  misc_feature: MA Experiment ID: 20000030 Result: Down-regulated in Transcription
  misc_feature: MA Experiment 20000030 PARAMETER Experiment Name: At_CS6630_Roots_cDNA_P Parameter: Plant Line Value: CS6630 vs. WS
  misc_feature: MA Experiment 20000030 PARAMETER Experiment Name: At_CS6630_Roots_cDNA_P Parameter: Tissue Value: Roots
  misc_feature: MA Experiment ID: 20000224 Result: Up-regulated in Transcription
  misc_feature: MA Experiment ID: 20000440 Result: Up-regulated in Transcription
  misc_feature: MA Experiment 20000440 PARAMETER Experiment Name: At_Closed-Flower__Sub_P Parameter: Tissue Value: Closed Flower vs. Whole Plant
accatgagaggagctctgttcagaaatgcatctctctgcgctcgcagaatcattctttcttctaggatctcccccaatgttccctttctcactccaatcgccgctccggctcctcccaaattcagatttttcagttccgaatccggtgagaactcgactactgccactgagtcttcgccgactgattcatccgataagaaggatctcgttgtaaaggatgtcagcaacaaagagcttaaaagccgtatagacaagtctttcaatgagggtaatgaagatgctttacctggagttattgaagcacttctacagagaagacttgtagacaaacacgcagagactgatgatgaattgatggaaaaaatcgagagtctacctttcaaagatgatgtcaaggatgaagattttgaatccgatttcgaagaagcgcattctactgacgaagaacttgaggatttgtacaactctcccgagtatgtagctgaaaagatgaggaagaaagaatttttcaacatggacgataacaagtgggatcacatgattagagaaggtatccaacatggctgtcttaccgatactaaacaatgcgaggagattctcgaggatatgctcaaatgggaccagcttcttcctgatgacttgaagaaaaaagttgaagcaaagtttaatgagctcggggatatgtgtgaaagaggtgaaattgaggccgaagcagcttatgagcttttcaaggaatttgaagatgagatggtaattcagtatggggatcagatggaagctgagggtcctccccaatttggtgaaacagatacttctgacaggaatactgacttggatgatccctccggtaaaggcccaatcctcaggtggcaatcaaggatagtttttgctcctggaggtgatgcgtggcatccaaagaacaggaaagttaaaatgtctgttacagtgaaagagcttgggctctcaaatcatcaggctaaaaggctaagggaacttgtgggaaaaagataccattcagggaaagatgagcttacaatcacctgcgagaggtttgaacaccgagaagaaaacaggaaagactgcttgagaactctttacgggttgatagaggaagctgggaaagccaacaagatcgctgaagacataagaacttcatatgtaaaacagagactccgagccagtccagcttttatgcagaaactacaagccaagatcataaggtctaaagaatcaaatgccatcaacgcttgaaaaaaacttttcccggttcgcgcctttcttcttgtctcaccaaataatctgtggatcgtcttcttaatctttgatgaatgcaatgttggtaaaaatagacaatgaatgaaactttttcatgtataaaaaatatggaaacttggggttgataatgaattgttcatgttaagact

SEQ ID NO: 85191 - protein, 416 aa, Arabidopsis thaliana
  peptide (1)..(416): Ceres Seq. ID no. 12679363
  misc_feature (2)..(416): Homolog of NCBI NO: 18415698 NR Description: putative protein; protein id: At4g21460.1,
  misc_feature (23)..(416): Homolog of NCBI NO: 7485722 NR Description: hypothetical protein F18E5.80 - Arabidopsis >gi|3080390|emb|CAA18710.1| putative protein [Arabidopsis >gi|7268943|emb|CAB81253.1| putative protein [Arabidopsis
  misc_feature (2)..(416): Homolog of NCBI NO: 18401816 NR Description: expressed protein; protein id: At3g18240.1, by cDNA: gi_11908119, supported by cDNA: gi_13194809, supported cDNA: gi_13265398 [Arabidopsis thaliana]
  misc_feature (2)..(151): Homolog of NCBI NO: 15219546 NR Description: hypothetical protein; protein id: At1g73770.1
TMRGALFRNASLCARRIILSSRISPNVPFLTPIAAPAPPKFRFFSSESGENSTTATESSPTDSSDKKDLVVKDVSNKELKSRIDKSFNEGNEDALPGVIEALLQRRLVDKHAETDDELMEKIESLPFKDDVKDEDFESDFEEAHSTDEELEDLYNSPEYVAEKMRKKEFFNMDDNKWDHMIREGIQHGCLTDTKQCEEILEDMLKWDQLLPDDLKKKVEAKFNELGDMCERGEIEAEAAYELFKEFEDEMVIQYGDQMEAEGPPQFGETDTSDRNTDLDDPSGKGPILRWQSRIVFAPGGDAWHPKNRKVKMSVTVKELGLSNHQAKRLRELVGKRYHSGKDELTITCERFEHREENRKDCLRTLYGLIEEAGKANKIAEDIRTSYVKQRLRASPAFMQKLQAKIIRSKESNAINA

SEQ ID NO: 85192 - protein, 415 aa, Arabidopsis thaliana
  peptide (1)..(415): Ceres Seq. ID no. 12679364
  misc_feature (1)..(415): Homolog of NCBI NO: 18415698 NR Description: putative protein; protein id: At4g21460.1,
  misc_feature (22)..(415): Homolog of NCBI NO: 7485722 NR Description: hypothetical protein F18E5.80 - Arabidopsis >gi|3080390|emb|CAA18710.1| putative protein [Arabidopsis >gi|7268943|emb|CAB81253.1| putative protein [Arabidopsis
  misc_feature (1)..(415): Homolog of NCBI NO: 18401816 NR Description: expressed protein; protein id: At3g18240.1, by cDNA: gi_11908119, supported by cDNA: gi_13194809, supported cDNA: gi_13265398 [Arabidopsis thaliana]
  misc_feature (1)..(150): Homolog of NCBI NO: 15219546 NR Description: hypothetical protein; protein id: At1g73770.1
MRGALFRNASLCARRIILSSRISPNVPFLTPIAAPAPPKFRFFSSESGENSTTATESSPTDSSDKKDLVVKDVSNKELKSRIDKSFNEGNEDALPGVIEALLQRRLVDKHAETDDELMEKIESLPFKDDVKDEDFESDFEEAHSTDEELEDLYNSPEYVAEKMRKKEFFNMDDNKWDHMIREGIQHGCLTDTKQCEEILEDMLKWDQLLPDDLKKKVEAKFNELGDMCERGEIEAEAAYELFKEFEDEMVIQYGDQMEAEGPPQFGETDTSDRNTDLDDPSGKGPILRWQSRIVFAPGGDAWHPKNRKVKMSVTVKELGLSNHQAKRLRELVGKRYHSGKDELTITCERFEHREENRKDCLRTLYGLIEEAGKANKIAEDIRTSYVKQRLRASPAFMQKLQAKIIRSKESNAINA

SEQ ID NO: 85193 - protein, 298 aa, Arabidopsis thaliana
  peptide (1)..(298): Ceres Seq. ID no. 12679365
  misc_feature (1)..(298): Homolog of NCBI NO: 18415698 NR Description: putative protein; protein id: At4g21460.1,
  misc_feature (1)..(298): Homolog of NCBI NO: 7485722 NR Description: hypothetical protein F18E5.80 - Arabidopsis >gi|3080390|emb|CAA18710.1| putative protein [Arabidopsis >gi|7268943|emb|CAB81253.1| putative protein [Arabidopsis
  misc_feature (1)..(298): Homolog of NCBI NO: 18401816 NR Description: expressed protein; protein id: At3g18240.1, by cDNA: gi_11908119, supported by cDNA: gi_13194809, supported cDNA: gi_13265398 [Arabidopsis thaliana]
  misc_feature (1)..(33): Homolog of NCBI NO: 15219546 NR Description: hypothetical protein; protein id: At1g73770.1
MEKIESLPFKDDVKDEDFESDFEEAHSTDEELEDLYNSPEYVAEKMRKKEFFNMDDNKWDHMIREGIQHGCLTDTKQCEEILEDMLKWDQLLPDDLKKKVEAKFNELGDMCERGEIEAEAAYELFKEFEDEMVIQYGDQMEAEGPPQFGETDTSDRNTDLDDPSGKGPILRWQSRIVFAPGGDAWHPKNRKVKMSVTVKELGLSNHQAKRLRELVGKRYHSGKDELTITCERFEHREENRKDCLRTLYGLIEEAGKANKIAEDIRTSYVKQRLRASPAFMQKLQAKIIRSKESNAINA

SEQ ID NO: 85194 - DNA, 1560 bp, Arabidopsis thaliana
  misc_feature (1)..(1560): Ceres Seq. ID no. 12679397
  misc_feature: MA Experiment ID: 20000314 Result: Down-regulated in Transcription
  misc_feature: MA Experiment 20000314 PARAMETER Experiment Name: At_14day_Shoots-Roots_Sub_P Parameter: Age (day) Value: 14
  misc_feature: MA Experiment 20000314 PARAMETER Experiment Name: At_14day_Shoots-Roots_Sub_P Parameter: Organism Value: A. thaliana
  misc_feature: MA Experiment 20000314 PARAMETER Experiment Name: At_14day_Shoots-Roots_Sub_P Parameter: Plant Line Value: WS
  misc_feature: MA Experiment 20000314 PARAMETER Experiment Name: At_14day_Shoots-Roots_Sub_P Parameter: Tissue Value: Roots vs. Whole Plant
  misc_feature: MA Experiment ID: 20000315 Result: Down-regulated in Transcription
  misc_feature: MA Experiment 20000315 PARAMETER Experiment Name: At_14day_Shoots-Roots_Sub_P Parameter: Age (day) Value: 14
  misc_feature: MA Experiment 20000315 PARAMETER Experiment Name: At_14day_Shoots-Roots_Sub_P Parameter: Organism Value: A. thaliana
  misc_feature: MA Experiment 20000315 PARAMETER Experiment Name: At_14day_Shoots-Roots_Sub_P Parameter: Plant Line Value: WS
  misc_feature: MA Experiment 20000315 PARAMETER Experiment Name: At_14day_Shoots-Roots_Sub_P Parameter: Tissue Value: Shoots vs. Whole Plant
  misc_feature: MA Experiment ID: 20000327 Result: Down-regulated in Transcription
  misc_feature: MA Experiment 20000327 PARAMETER Experiment Name: At_42deg_Heat_Sub_P Parameter: Age (day) Value: 14
  misc_feature: MA Experiment 20000327 PARAMETER Experiment Name: At_42deg_Heat_Sub_P Parameter: Organism Value: A. thaliana
  misc_feature: MA Experiment 20000327 PARAMETER Experiment Name: At_42deg_Heat_Sub_P Parameter: Plant Line Value: WS
  misc_feature: MA Experiment 20000327 PARAMETER Experiment Name: At_42deg_Heat_Sub_P Parameter: Temperature (deg C) Value: 42 vs. 22
  misc_feature: MA Experiment 20000327 PARAMETER Experiment Name: At_42deg_Heat_Sub_P Parameter: Timepoint (hr) Value: 1
  misc_feature: MA Experiment 20000327 PARAMETER Experiment Name: At_42deg_Heat_Sub_P Parameter: Tissue Value: Aerial
  misc_feature: MA Experiment ID: 20000328 Result: Down-regulated in Transcription
  misc_feature: MA Experiment 20000328 PARAMETER Experiment Name: At_42deg_Heat_Sub_P Parameter: Age (day) Value: 14
  misc_feature: MA Experiment 20000328 PARAMETER Experiment Name: At_42deg_Heat_Sub_P Parameter: Organism Value: A. thaliana
  misc_feature: MA Experiment 20000328 PARAMETER Experiment Name: At_42deg_Heat_Sub_P Parameter: Plant Line Value: WS
  misc_feature: MA Experiment 20000328 PARAMETER Experiment Name: At_42deg_Heat_Sub_P Parameter: Temperature (deg C) Value: 42 vs. 22
  misc_feature: MA Experiment 20000328 PARAMETER Experiment Name: At_42deg_Heat_Sub_P Parameter: Timepoint (hr) Value: 6
  misc_feature: MA Experiment 20000328 PARAMETER Experiment Name: At_42deg_Heat_Sub_P Parameter: Tissue Value: Aerial
  misc_feature: MA Experiment ID: 20000332 Result: Up-regulated in Transcription
  misc_feature: MA Experiment 20000332 PARAMETER Experiment Name: At_4deg_Cold_Sub_P Parameter: Age (day) Value: 14
  misc_feature: MA Experiment 20000332 PARAMETER Experiment Name: At_4deg_Cold_Sub_P Parameter: Organism Value: A. thaliana
  misc_feature: MA Experiment 20000332 PARAMETER Experiment Name: At_4deg_Cold_Sub_P Parameter: Plant Line Value: WS
  misc_feature: MA Experiment 20000332 PARAMETER Experiment Name: At_4deg_Cold_Sub_P Parameter: Temperature (deg C) Value: 4 vs. 22
  misc_feature: MA Experiment 20000332 PARAMETER Experiment Name: At_4deg_Cold_Sub_P Parameter: Timepoint (hr) Value: 2
  misc_feature: MA Experiment 20000332 PARAMETER Experiment Name: At_4deg_Cold_Sub_P Parameter: Tissue Value: Aerial
  misc_feature: MA Experiment ID: 20000347 Result: Up-regulated in Transcription
  misc_feature: MA Experiment 20000347 PARAMETER Experiment Name: At_2mM_SA_Sub_P Parameter: Age (day) Value: 14
  misc_feature: MA Experiment 20000347 PARAMETER Experiment Name: At_2mM_SA_Sub_P Parameter: Organism Value: A. thaliana
  misc_feature: MA Experiment 20000347 PARAMETER Experiment Name: At_2mM_SA_Sub_P Parameter: Plant Line Value: WS
  misc_feature: MA Experiment 20000347 PARAMETER Experiment Name: At_2mM_SA_Sub_P Parameter: Timepoint (hr) Value: 6
  misc_feature: MA Experiment 20000347 PARAMETER Experiment Name: At_2mM_SA_Sub_P Parameter: Tissue Value: Aerial
  misc_feature: MA Experiment 20000347 PARAMETER Experiment Name: At_2mM_SA_Sub_P Parameter: Treatment Value: 2mM SA vs. No Treatment
  misc_feature: MA Experiment ID: 20000348 Result: Up-regulated in Transcription
  misc_feature: MA Experiment 20000348 PARAMETER Experiment Name: At_100uM_ABA_Sub_P Parameter: Age (day) Value: 14
  misc_feature: MA Experiment 20000348 PARAMETER Experiment Name: At_100uM_ABA_Sub_P Parameter: Organism Value: A. thaliana
  misc_feature: MA Experiment 20000348 PARAMETER Experiment Name: At_100uM_ABA_Sub_P Parameter: Plant Line Value: WS
  misc_feature: MA Experiment 20000348 PARAMETER Experiment Name: At_100uM_ABA_Sub_P Parameter: Timepoint (hr) Value: 1
  misc_feature: MA Experiment 20000348 PARAMETER Experiment Name: At_100uM_ABA_Sub_P Parameter: Tissue Value: Aerial
  misc_feature: MA Experiment 20000348 PARAMETER Experiment Name: At_100uM_ABA_Sub_P Parameter: Treatment Value: 100uM ABA vs. No Treatment
  misc_feature: MA Experiment ID: 20000440 Result: Down-regulated in Transcription
  misc_feature: MA Experiment 20000440 PARAMETER Experiment Name: At_Closed-Flower__Sub_P Parameter: Tissue Value: Closed Flower vs. Whole Plant
gacaaaagagttggataaagtgtgtttagaagaagccgtcgaatttcttagtttgaagcattttattgtttggagagttcgatggatttgaatataaacaagacgacccctgttcttagtgaccctactacaccagtaagtaaaacaagacttggatcatccttcccttcagggagattcatgatgaattctagaaagaagattcctaaactcgatgatgttcgatctaacggttggttggacgcgatgatatcttcgtctccaccgcgtaaaaggcttgtcaaggatttcaatattgagattgctcctgaagatgatttttctcaacgggcctggatggtatgttaataatatctaatggtttcattcacaaatgttttgatctctcttttgttttcttagtcctactcatttcattctttaatcttgacagctcaagtatccttcagcgattacctcgtttgcgcatattgcagctcaagcaaagaacaagaagatagctgtgtttctagattatgatggaacactttctccaatagtcgatgaccctgatcgcgccatcatgtctgatgcgatgcgtgctgctgtgaaagatgtcgccaagtacttcccaacagcaataattagtggtagaagccgtgacaaggtttaccaattggtagggctaaccgaactctattacgcgggtagtcacgggatggacattatgactcctgtaaatccaaatggatcccctgaagaccctaattgtataaaaaccactgaccaacagggtgaggaggtaaacctctttcagcctgctaaagagttcatacccgtcattgaagaggtttataataacctcgttgagataactaaatgtatcaaaggtgcaaaagtagagaaccataagttttgtacttctgtacattaccgtaatgttgacgagaaggactggccacttgttgctcaacgcgttcatgaccacctgaaacgataccctcgtttgcgtataactcacggtagaaaggttttagaggtgcgtcctgtgattgagtggaacaaaggaaaagcagtagagtttctgttagagtctctcggattaagcaacaacgatgagttcctcccaatcttcatcggagatgacaagaccgatgaagatgcattcaaggtactgagggaagggaacagaggatttggaatattggtatcgtctgtaccaaaagaaagcaatgcattttactctcttagagacccttccgaggtacaaattttatattatctaagtcatcatctatgctatgttatatatgtaaatttgtaatgtatgagtttggtcggtaacaccgtaatggtgtttcaggtgaagaagtttctcaagactttggtgaaatgggggaagatggaaagttcaaaaacaagtttttgatgattgtgtaggagaatcagaagcttcattctgcactgctttttaatttcttattttttttccttttttaaagtttgtacttctatatattatcatttttccatattatccattaagcaaacgggaaaaacaagaatataacgattgtcttg

SEQ ID NO: 85195 - protein, 246 aa, Arabidopsis thaliana
  peptide (1)..(246): Ceres Seq. ID no. 12679398
  misc_feature (1)..(226): Pfam Name: Trehalose-phosphatase Pfam Description: Trehalose-phosphatase
  misc_feature (1)..(229): Homolog of NCBI NO: 15235713 NR Description: trehalose-6-phosphate phosphatase - like protein;
  misc_feature (1)..(229): Homolog of NCBI NO: 15234552 NR Description: putative trehalose-6-phosphate phosphatase protein id: At4g12430.1, supported by cDNA: gi_16648940
  misc_feature (1)..(228): Homolog of NCBI NO: 30696054 NR Description: trehalose-6-phosphate phosphatase (TPPA)
  misc_feature (1)..(228): Homolog of NCBI NO: 30696058 NR Description: trehalose-6-phosphate phosphatase (TPPA)
  misc_feature (1)..(228): Homolog of NCBI NO: 37536726 NR Description: putative trehalose-6-phosphate phosphatase [Oryza
  misc_feature (1)..(231): Homolog of NCBI NO: 38345480 NR Description: OSJNBa0010H02.18 [Oryza sativa (japonica
  misc_feature (1)..(228): Homolog of NCBI NO: 18399940 NR Description: trehalose-phosphatase, putative; protein id:
  misc_feature (1)..(228): Homolog of NCBI NO: 15218205 NR Description: trehalose-6-phosphate phosphatase (AtTPPB); id: At1g78090.1, supported by cDNA: gi_2944179 [Arabidopsis
  misc_feature (1)..(228): Homolog of NCBI NO: 25354595 NR Description: trehalose-phosphatase (EC 3.1.3.12) B [imported] -
  misc_feature (1)..(228): Homolog of NCBI NO: 21554408 NR Description: trehalose-phosphatase, putative [Arabidopsis
MSDAMRAAVKDVAKYFPTAIISGRSRDKVYQLVGLTELYYAGSHGMDIMTPVNPNGSPEDPNCIKTTDQQGEEVNLFQPAKEFIPVIEEVYNNLVEITKCIKGAKVENHKFCTSVHYRNVDEKDWPLVAQRVHDHLKRYPRLRITHGRKVLEVRPVIEWNKGKAVEFLLESLGLSNNDEFLPIFIGDDKTDEDAFKVLREGNRGFGILVSSVPKESNAFYSLRDPSEVQILYYLSHHLCYVIYVNL

SEQ ID NO: 85196 - protein, 242 aa, Arabidopsis thaliana
  peptide (1)..(242): Ceres Seq. ID no. 12679399
  misc_feature (1)..(222): Pfam Name: Trehalose-phosphatase Pfam Description: Trehalose-phosphatase
  misc_feature (1)..(225): Homolog of NCBI NO: 15235713 NR Description: trehalose-6-phosphate phosphatase - like protein;
  misc_feature (1)..(225): Homolog of NCBI NO: 15234552 NR Description: putative trehalose-6-phosphate phosphatase protein id: At4g12430.1, supported by cDNA: gi_16648940
  misc_feature (1)..(224): Homolog of NCBI NO: 30696054 NR Description: trehalose-6-phosphate phosphatase (TPPA)
  misc_feature (1)..(224): Homolog of NCBI NO: 30696058 NR Description: trehalose-6-phosphate phosphatase (TPPA)
  misc_feature (1)..(224): Homolog of NCBI NO: 37536726 NR Description: putative trehalose-6-phosphate phosphatase [Oryza
  misc_feature (1)..(227): Homolog of NCBI NO: 38345480 NR Description: OSJNBa0010H02.18 [Oryza sativa (japonica
  misc_feature (1)..(224): Homolog of NCBI NO: 18399940 NR Description: trehalose-phosphatase, putative; protein id:
  misc_feature (1)..(224): Homolog of NCBI NO: 15218205 NR Description: trehalose-6-phosphate phosphatase (AtTPPB); id: At1g78090.1, supported by cDNA: gi_2944179 [Arabidopsis
  misc_feature (1)..(224): Homolog of NCBI NO: 25354595 NR Description: trehalose-phosphatase (EC 3.1.3.12) B [imported] -
  misc_feature (1)..(224): Homolog of NCBI NO: 21554408 NR Description: trehalose-phosphatase, putative [Arabidopsis
MRAAVKDVAKYFPTAIISGRSRDKVYQLVGLTELYYAGSHGMDIMTPVNPNGSPEDPNCIKTTDQQGEEVNLFQPAKEFIPVIEEVYNNLVEITKCIKGAKVENHKFCTSVHYRNVDEKDWPLVAQRVHDHLKRYPRLRITHGRKVLEVRPVIEWNKGKAVEFLLESLGLSNNDEFLPIFIGDDKTDEDAFKVLREGNRGFGILVSSVPKESNAFYSLRDPSEVQILYYLSHHLCYVIYVNL

SEQ ID NO: 85197 - protein, 201 aa, Arabidopsis thaliana
  peptide (1)..(201): Ceres Seq. ID no. 12679400
  misc_feature (1)..(181): Pfam Name: Trehalose-phosphatase Pfam Description: Trehalose-phosphatase
  misc_feature (1)..(184): Homolog of NCBI NO: 15235713 NR Description: trehalose-6-phosphate phosphatase - like protein;
  misc_feature (1)..(184): Homolog of NCBI NO: 15234552 NR Description: putative trehalose-6-phosphate phosphatase protein id: At4g12430.1, supported by cDNA: gi_16648940
  misc_feature (1)..(183): Homolog of NCBI NO: 30696054 NR Description: trehalose-6-phosphate phosphatase (TPPA)
  misc_feature (1)..(183): Homolog of NCBI NO: 30696058 NR Description: trehalose-6-phosphate phosphatase (TPPA)
  misc_feature (1)..(183): Homolog of NCBI NO: 37536726 NR Description: putative trehalose-6-phosphate phosphatase [Oryza
  misc_feature (1)..(186): Homolog of NCBI NO: 38345480 NR Description: OSJNBa0010H02.18 [Oryza sativa (japonica
  misc_feature (1)..(183): Homolog of NCBI NO: 18399940 NR Description: trehalose-phosphatase, putative; protein id:
  misc_feature (1)..(183): Homolog of NCBI NO: 15218205 NR Description: trehalose-6-phosphate phosphatase (AtTPPB); id: At1g78090.1, supported by cDNA: gi_2944179 [Arabidopsis
  misc_feature (1)..(183): Homolog of NCBI NO: 25354595 NR Description: trehalose-phosphatase (EC 3.1.3.12) B [imported] -
  misc_feature (1)..(183): Homolog of NCBI NO: 21554408 NR Description: trehalose-phosphatase, putative [Arabidopsis
MDIMTPVNPNGSPEDPNCIKTTDQQGEEVNLFQPAKEFIPVIEEVYNNLVEITKCIKGAKVENHKFCTSVHYRNVDEKDWPLVAQRVHDHLKRYPRLRITHGRKVLEVRPVIEWNKGKAVEFLLESLGLSNNDEFLPIFIGDDKTDEDAFKVLREGNRGFGILVSSVPKESNAFYSLRDPSEVQILYYLSHHLCYVIYVNL

SEQ ID NO: 85198 - DNA, 1883 bp, Arabidopsis thaliana
  misc_feature (1)..(1883): Ceres Seq. ID no. 12679405
  misc_feature: MA Experiment ID: 20000179 Result: Up-regulated in Transcription
  misc_feature: MA Experiment 20000179 PARAMETER Experiment Name: At_Germinating_Seeds_P Parameter: Age (hr) Value: 6 vs. 0
  misc_feature: MA Experiment 20000179 PARAMETER Experiment Name: At_Germinating_Seeds_P Parameter: Tissue Value: Germinating Seeds
  misc_feature: MA Experiment ID: 20000184 Result: Down-regulated in Transcription
  misc_feature: MA Experiment 20000184 PARAMETER Experiment Name: At_Shoots__P Parameter: Age (day) Value: 7
  misc_feature: MA Experiment 20000184 PARAMETER Experiment Name: At_Shoots__P Parameter: Tissue Value: Shoots vs. Whole Plant
  misc_feature: MA Experiment ID: 20000234 Result: Up-regulated in Transcription
  misc_feature: MA Experiment 20000234 PARAMETER Experiment Name: At_Siliques_P Parameter: Age (day) Value: 21
  misc_feature: MA Experiment 20000234 PARAMETER Experiment Name: At_Siliques_P Parameter: Organism Value: A. thaliana
  misc_feature: MA Experiment 20000234 PARAMETER Experiment Name: At_Siliques_P Parameter: Plant Line Value: WS
  misc_feature: MA Experiment 20000234 PARAMETER Experiment Name: At_Siliques_P Parameter: Tissue Value: Less Than 5mm Siliques vs. Whole Plant
  misc_feature: MA Experiment ID: 20000264 Result: Up-regulated in Transcription
  misc_feature: MA Experiment 20000264 PARAMETER Experiment Name: At_Open_Flower_P Parameter: Age (day) Value: 21
  misc_feature: MA Experiment 20000264 PARAMETER Experiment Name: At_Open_Flower_P Parameter: Plant Line Value: WS
  misc_feature: MA Experiment 20000264 PARAMETER Experiment Name: At_Open_Flower_P Parameter: Tissue Value: Open Flower vs. Whole Plant
  misc_feature: MA Experiment ID: 20000794 Result: Up-regulated in Transcription
  misc_feature: MA Experiment 20000794 PARAMETER Experiment Name: At_Petals_P Parameter: Age (day) Value: 23-25 days
  misc_feature: MA Experiment 20000794 PARAMETER Experiment Name: At_Petals_P Parameter: Plant Line Value: WS
  misc_feature: MA Experiment 20000794 PARAMETER Experiment Name: At_Petals_P Parameter: Tissue Value: Petals vs. Whole plant
  misc_feature: MA Experiment ID: 20001248 Result: Up-regulated in Transcription
  misc_feature: MA Experiment 20001248 PARAMETER Experiment Name: At_Far-red-induction_P Parameter: Age (day) Value: 7
  misc_feature: MA Experiment 20001248 PARAMETER Experiment Name: At_Far-red-induction_P Parameter: Light Value: Far-red vs. White
  misc_feature: MA Experiment 20001248 PARAMETER Experiment Name: At_Far-red-induction_P Parameter: Organism Value: A. thaliana
  misc_feature: MA Experiment 20001248 PARAMETER Experiment Name: At_Far-red-induction_P Parameter: Plant Line Value: Columbia
  misc_feature: MA Experiment 20001248 PARAMETER Experiment Name: At_Far-red-induction_P Parameter: Timepoint (hr) Value: 4
  misc_feature: MA Experiment 20001248 PARAMETER Experiment Name: At_Far-red-induction_P Parameter: Tissue Value: Whole Plant
  misc_feature: MA Experiment ID: 20001557 Result: Down-regulated in Transcription
  misc_feature: MA Experiment 20001557 PARAMETER Experiment Name: At_Drought_Soil_Dry_P Parameter: Age (day) Value: 27
  misc_feature: MA Experiment 20001557 PARAMETER Experiment Name: At_Drought_Soil_Dry_P Parameter: Organism Value: A. thaliana
  misc_feature: MA Experiment 20001557 PARAMETER Experiment Name: At_Drought_Soil_Dry_P Parameter: Plant Line Value: WS
  misc_feature: MA Experiment 20001557 PARAMETER Experiment Name: At_Drought_Soil_Dry_P Parameter: Post Timepoint (hr) Value: 3
  misc_feature: MA Experiment 20001557 PARAMETER Experiment Name: At_Drought_Soil_Dry_P Parameter: Post-Treatment Value: Re-Water vs. No Drought
  misc_feature: MA Experiment 20001557 PARAMETER Experiment Name: At_Drought_Soil_Dry_P Parameter: Timepoint (day) Value: 13
  misc_feature: MA Experiment 20001557 PARAMETER Experiment Name: At_Drought_Soil_Dry_P Parameter: Treatment Value: Drought vs. No Drought
  misc_feature: MA Experiment ID: 20001558 Result: Down-regulated in Transcription
  misc_feature: MA Experiment 20001558 PARAMETER Experiment Name: At_Drought_Soil_Dry_P Parameter: Age (day) Value: 27
  misc_feature: MA Experiment 20001558 PARAMETER Experiment Name: At_Drought_Soil_Dry_P Parameter: Organism Value: A. thaliana
  misc_feature: MA Experiment 20001558 PARAMETER Experiment Name: At_Drought_Soil_Dry_P Parameter: Plant Line Value: WS
  misc_feature: MA Experiment 20001558 PARAMETER Experiment Name: At_Drought_Soil_Dry_P Parameter: Post Timepoint (hr) Value: 6
  misc_feature: MA Experiment 20001558 PARAMETER Experiment Name: At_Drought_Soil_Dry_P Parameter: Post-Treatment Value: Re-Water vs. No Drought
  misc_feature: MA Experiment 20001558 PARAMETER Experiment Name: At_Drought_Soil_Dry_P Parameter: Timepoint (day) Value: 13
  misc_feature: MA Experiment 20001558 PARAMETER Experiment Name: At_Drought_Soil_Dry_P Parameter: Treatment Value: Drought vs. No Drought
  misc_feature: MA Experiment ID: 20001560 Result: Down-regulated in Transcription
  misc_feature: MA Experiment 20001560 PARAMETER Experiment Name: At_Drought_Soil_Dry_P Parameter: Age (day) Value: 28
  misc_feature: MA Experiment 20001560 PARAMETER Experiment Name: At_Drought_Soil_Dry_P Parameter: Organism Value: A. thaliana
  misc_feature: MA Experiment 20001560 PARAMETER Experiment Name: At_Drought_Soil_Dry_P Parameter: Plant Line Value: WS
  misc_feature: MA Experiment 20001560 PARAMETER Experiment Name: At_Drought_Soil_Dry_P Parameter: Post Timepoint (hr) Value: None
  misc_feature: MA Experiment 20001560 PARAMETER Experiment Name: At_Drought_Soil_Dry_P Parameter: Post-Treatment Value: None
  misc_feature: MA Experiment 20001560 PARAMETER Experiment Name: At_Drought_Soil_Dry_P Parameter: Timepoint (day) Value: 14
  misc_feature: MA Experiment 20001560 PARAMETER Experiment Name: At_Drought_Soil_Dry_P Parameter: Treatment Value: Drought vs. No Drought
attcttctccgtctgccaaaatccccacttcacgaatcgcaaaagatcaaggtttattgatctattgcgaaattagggtttgtgaattcgaatcggagattaataatagattttgtgatggagtgttcatcacgcatagaagaatcttgatttcgatctcgatgaaattaggaatcgagggattttatttataattgagatggtgaatattaaaagccctttacggctattcatagaggagtcgattaaggaattaattaggggtttcaggagacaaaggatcaaatggagaaatgcgtttcttcttggttctataatgactaccattgttgttctgcttcatacaccaacgttttcagtcttctctgatgaagaagaaaccgagtcttcttcttcttcgcctatttacttgaatggttctctgcatttgaatatccatattgttagtagtgaagcaaaagttgaaaattttcatactcttagaacaagaactcctattgtgcaattgaatgcttctgaagcaagtgaagctgttctttcgagaaaaaggcgaaaaaggaagaaaagaaagaagacaaaagatgatctgattctcactgatcctccaccagcaccacgacatgttctatcttcctcagagagacgtgctctttccttgccaccgaagaaagctcttacttatgcaaaactggagattcagcgtgccccggaggtcataaatgatacagatctgtttgccccattgtttcgaaatctctctgttttcaaaaggagctatgagcttatggaactaatactaaaggtctacatatatcctgacggagacaaacccatcttccacgaaccgcatttaaatggtatatatgcttcagaaggttggtttatgaagctaatggagtcaaacaaacagtttgtcacaaagaaccctgagagggctcacttgttctacatgccatatagtgtgaaacagcttcagaaaagtatctttgttcctggatcacataacatcaaacctttatcgatctttcttagagactacgtcaacatgctctccatcaaataccccttctggaaccgcactcatgggtcagatcatttccttgtcgcttgccacgattggggtccttacacagtgaacgagcacccagagctaaaacgaaacgctattaaagctctctgcaatgcagacttatcagatggaatcttcgtcccggggaaagacgtttctctccctgaaacatccataagaaacgcaggtagaccactacgcaacataggaaacggaaacagagtttctcaacgtcccatcctcgctttcttcgctggaaacctccacggtcgtgtccgtccaaagcttctaaaacactggagaaacaaagacgaggacatgaaaatctacggtccgcttccacacaacgtagctaggaaaatgacttacgtacaacacatgaaatcaagcaagtactgtctttgtccaatgggttacgaagtgaacagtccacgtatcgttgaagctatatactatgaatgcgtccctgtagtgatcgctgataacttcatgttaccgttcagcgatgtgctagattggtcagcgttctcagtggttgtaccggagaaggagattccacggctgaaggagatactattggagattcctatgaggagatatttgaagatgcagagtaacgtgaagatggttcagagacatttcttgtggagccctaaacctagaaagtacgatgtgtttcatatgatacttcactccatttggtttaaccttctcaatcaaaaccaaacttcttttgatgatcatattcccgattcctgacatcatccttaattatgtctgtacattatatatattaagaaaactatttccattg

SEQ ID NO: 85199 - protein, 542 aa, Arabidopsis thaliana
  peptide (1)..(542): Ceres Seq. ID no. 12679406
  misc_feature (202)..(497): Pfam Name: Exostosin family Pfam Description: Exostosin family
  misc_feature (1)..(542): Homolog of NCBI NO: 30683790 NR Description: expressed protein [Arabidopsis thaliana] unknown protein [Arabidopsis thaliana]
  misc_feature (24)..(542): Homolog of NCBI NO: 7488129 NR Description: probable limonene cyclase - Arabidopsis thaliana limonene cyclase like protein [Arabidopsis thaliana]
  misc_feature (135)..(530): Homolog of NCBI NO: 34911614 NR Description: limonene cyclase-like protein [Oryza sativa
  misc_feature (40)..(307): Homolog of NCBI NO: 21592312 NR Description: unknown [Arabidopsis thaliana]
  misc_feature (53)..(530): Homolog of NCBI NO: 15241150 NR Description: putative protein; protein id: At5g19670.1
  misc_feature (159)..(530): Homolog of NCBI NO: 15233924 NR Description: putative protein; protein id: At4g32790.1
  misc_feature (155)..(530): Homolog of NCBI NO: 15239502 NR Description: putative protein; protein id: At5g25820.1
  misc_feature (34)..(530): Homolog of NCBI NO: 26450497 NR Description: unknown protein [Arabidopsis thaliana]
  misc_feature (34)..(530): Homolog of NCBI NO: 15239118 NR Description: putative protein; protein id: At5g11610.1
  misc_feature (128)..(537): Homolog of NCBI NO: 34394611 NR Description: putative pectin-glucuronyltransferase [Oryza
MVNIKSPLRLFIEESIKELIRGFRRQRIKWRNAFLLGSIMTTIVVLLHTPTFSVFSDEEETESSSSSPIYLNGSLHLNIHIVSSEAKVENFHTLRTRTPIVQLNASEASEAVLSRKRRKRKKRKKTKDDLILTDPPPAPRHVLSSSERRALSLPPKKALTYAKLEIQRAPEVINDTDLFAPLFRNLSVFKRSYELMELILKVYIYPDGDKPIFHEPHLNGIYASEGWFMKLMESNKQFVTKNPERAHLFYMPYSVKQLQKSIFVPGSHNIKPLSIFLRDYVNMLSIKYPFWNRTHGSDHFLVACHDWGPYTVNEHPELKRNAIKALCNADLSDGIFVPGKDVSLPETSIRNAGRPLRNIGNGNRVSQRPILAFFAGNLHGRVRPKLLKHWRNKDEDMKIYGPLPHNVARKMTYVQHMKSSKYCLCPMGYEVNSPRIVEAIYYECVPVVIADNFMLPFSDVLDWSAFSVVVPEKEIPRLKEILLEIPMRRYLKMQSNVKMVQRHFLWSPKPRKYDVFHMILHSIWFNLLNQNQTSFDDHIPDS

SEQ ID NO: 85200 - protein, 503 aa, Arabidopsis thaliana
  peptide (1)..(503): Ceres Seq. ID no. 12679407
  misc_feature (163)..(458): Pfam Name: Exostosin family Pfam Description: Exostosin family
  misc_feature (1)..(503): Homolog of NCBI NO: 30683790 NR Description: expressed protein [Arabidopsis thaliana] unknown protein [Arabidopsis thaliana]
  misc_feature (1)..(503): Homolog of NCBI NO: 7488129 NR Description: probable limonene cyclase - Arabidopsis thaliana limonene cyclase like protein [Arabidopsis thaliana]
  misc_feature (96)..(491): Homolog of NCBI NO: 34911614 NR Description: limonene cyclase-like protein [Oryza sativa
  misc_feature (1)..(268): Homolog of NCBI NO: 21592312 NR Description: unknown [Arabidopsis thaliana]
  misc_feature (14)..(491): Homolog of NCBI NO: 15241150 NR Description: putative protein; protein id: At5g19670.1
  misc_feature (120)..(491): Homolog of NCBI NO: 15233924 NR Description: putative protein; protein id: At4g32790.1
  misc_feature (116)..(491): Homolog of NCBI NO: 15239502 NR Description: putative protein; protein id: At5g25820.1
  misc_feature (1)..(491): Homolog of NCBI NO: 26450497 NR Description: unknown protein [Arabidopsis thaliana]
  misc_feature (1)..(491): Homolog of NCBI NO: 15239118 NR Description: putative protein; protein id: At5g11610.1
  misc_feature (89)..(498): Homolog of NCBI NO: 34394611 NR Description: putative pectin-glucuronyltransferase [Oryza
MTTIVVLLHTPTFSVFSDEEETESSSSSPIYLNGSLHLNIHIVSSEAKVENFHTLRTRTPIVQLNASEASEAVLSRKRRKRKKRKKTKDDLILTDPPPAPRHVLSSSERRALSLPPKKALTYAKLEIQRAPEVINDTDLFAPLFRNLSVFKRSYELMELILKVYIYPDGDKPIFHEPHLNGIYASEGWFMKLMESNKQFVTKNPERAHLFYMPYSVKQLQKSIFVPGSHNIKPLSIFLRDYVNMLSIKYPFWNRTHGSDHFLVACHDWGPYTVNEHPELKRNAIKALCNADLSDGIFVPGKDVSLPETSIRNAGRPLRNIGNGNRVSQRPILAFFAGNLHGRVRPKLLKHWRNKDEDMKIYGPLPHNVARKMTYVQHMKSSKYCLCPMGYEVNSPRIVEAIYYECVPVVIADNFMLPFSDVLDWSAFSVVVPEKEIPRLKEILLEIPMRRYLKMQSNVKMVQRHFLWSPKPRKYDVFHMILHSIWFNLLNQNQTSFDDHIPDS

SEQ ID NO: 85201 - protein, 347 aa, Arabidopsis thaliana
  peptide (1)..(347): Ceres Seq. ID no. 12679408
  misc_feature (7)..(302): Pfam Name: Exostosin family Pfam Description: Exostosin family
  misc_feature (1)..(347): Homolog of NCBI NO: 30683790 NR Description: expressed protein [Arabidopsis thaliana] unknown protein [Arabidopsis thaliana]
  misc_feature (1)..(347): Homolog of NCBI NO: 7488129 NR Description: probable limonene cyclase - Arabidopsis thaliana limonene cyclase like protein [Arabidopsis thaliana]
  misc_feature (1)..(335): Homolog of NCBI NO: 34911614 NR Description: limonene cyclase-like protein [Oryza sativa
  misc_feature (1)..(112): Homolog of NCBI NO: 21592312 NR Description: unknown [Arabidopsis thaliana]
  misc_feature (1)..(335): Homolog of NCBI NO: 15241150 NR Description: putative protein; protein id: At5g19670.1
  misc_feature (1)..(335): Homolog of NCBI NO: 15233924 NR Description: putative protein; protein id: At4g32790.1
  misc_feature (1)..(335): Homolog of NCBI NO: 15239502 NR Description: putative protein; protein id: At5g25820.1
  misc_feature (1)..(335): Homolog of NCBI NO: 26450497 NR Description: unknown protein [Arabidopsis thaliana]
  misc_feature (1)..(335): Homolog of NCBI NO: 15239118 NR Description: putative protein; protein id: At5g11610.1
  misc_feature (1)..(342): Homolog of NCBI NO: 34394611 NR Description: putative pectin-glucuronyltransferase [Oryza
MELILKVYIYPDGDKPIFHEPHLNGIYASEGWFMKLMESNKQFVTKNPERAHLFYMPYSVKQLQKSIFVPGSHNIKPLSIFLRDYVNMLSIKYPFWNRTHGSDHFLVACHDWGPYTVNEHPELKRNAIKALCNADLSDGIFVPGKDVSLPETSIRNAGRPLRNIGNGNRVSQRPILAFFAGNLHGRVRPKLLKHWRNKDEDMKIYGPLPHNVARKMTYVQHMKSSKYCLCPMGYEVNSPRIVEAIYYECVPVVIADNFMLPFSDVLDWSAFSVVVPEKEIPRLKEILLEIPMRRYLKMQSNVKMVQRHFLWSPKPRKYDVFHMILHSIWFNLLNQNQTSFDDHIPDS

SEQ ID NO: 85202 - DNA, 2617 bp, Arabidopsis thaliana
  misc_feature (1)..(2617): Ceres Seq. ID no. 12679420
  misc_feature: MA Experiment ID: 20000171 Result: Down-regulated in Transcription
  misc_feature: MA Experiment 20000171 PARAMETER Experiment Name: At_42deg_Heat_P Parameter: Age (day) Value: 14
  misc_feature: MA Experiment 20000171 PARAMETER Experiment Name: At_42deg_Heat_P Parameter: Organism Value: A. thaliana
  misc_feature: MA Experiment 20000171 PARAMETER Experiment Name: At_42deg_Heat_P Parameter: Plant Line Value: WS
  misc_feature: MA Experiment 20000171 PARAMETER Experiment Name: At_42deg_Heat_P Parameter: Temperature (deg C) Value: 42 vs. 22
  misc_feature: MA Experiment 20000171 PARAMETER Experiment Name: At_42deg_Heat_P Parameter: Timepoint (hr) Value: 1
  misc_feature: MA Experiment 20000171 PARAMETER Experiment Name: At_42deg_Heat_P Parameter: Tissue Value: Aerial
  misc_feature: MA Experiment ID: 20000173 Result: Down-regulated in Transcription
  misc_feature: MA Experiment 20000173 PARAMETER Experiment Name: At_42deg_Heat_P Parameter: Age (day) Value: 14
  misc_feature: MA Experiment 20000173 PARAMETER Experiment Name: At_42deg_Heat_P Parameter: Organism Value: A. thaliana
  misc_feature: MA Experiment 20000173 PARAMETER Experiment Name: At_42deg_Heat_P Parameter: Plant Line Value: WS
  misc_feature: MA Experiment 20000173 PARAMETER Experiment Name: At_42deg_Heat_P Parameter: Temperature (deg C) Value: 42 vs. 22
  misc_feature: MA Experiment 20000173 PARAMETER Experiment Name: At_42deg_Heat_P Parameter: Timepoint (hr) Value: 6
  misc_feature: MA Experiment 20000173 PARAMETER Experiment Name: At_42deg_Heat_P Parameter: Tissue Value: Aerial
  misc_feature: MA Experiment ID: 20000184 Result: Down-regulated in Transcription
  misc_feature: MA Experiment 20000184 PARAMETER Experiment Name: At_Shoots__P Parameter: Age (day) Value: 7
  misc_feature: MA Experiment 20000184 PARAMETER Experiment Name: At_Shoots__P Parameter: Tissue Value: Shoots vs. Whole Plant
  misc_feature: MA Experiment ID: 20000185 Result: Down-regulated in Transcription
  misc_feature: MA Experiment 20000185 PARAMETER Experiment Name: At_Roots__P Parameter: Age (day) Value: 7 vs. 21
  misc_feature: MA Experiment 20000185 PARAMETER Experiment Name: At_Roots__P Parameter: Organism Value: A. thaliana
  misc_feature: MA Experiment 20000185 PARAMETER Experiment Name: At_Roots__P Parameter: Tissue Value: Roots vs. Whole Plant
  misc_feature: MA Experiment ID: 20000264 Result: Down-regulated in Transcription
  misc_feature: MA Experiment 20000264 PARAMETER Experiment Name: At_Open_Flower_P Parameter: Age (day) Value: 21
  misc_feature: MA Experiment 20000264 PARAMETER Experiment Name: At_Open_Flower_P Parameter: Plant Line Value: WS
  misc_feature: MA Experiment 20000264 PARAMETER Experiment Name: At_Open_Flower_P Parameter: Tissue Value: Open Flower vs. Whole Plant
  misc_feature: MA Experiment ID: 20000268 Result: Down-regulated in Transcription
  misc_feature: MA Experiment 20000268 PARAMETER Experiment Name: At_100mM_NaCl__P Parameter: Age (day) Value: 14
  misc_feature: MA Experiment 20000268 PARAMETER Experiment Name: At_100mM_NaCl__P Parameter: Organism Value: A. thaliana
  misc_feature: MA Experiment 20000268 PARAMETER Experiment Name: At_100mM_NaCl__P Parameter: Plant Line Value: WS
  misc_feature: MA Experiment 20000268 PARAMETER Experiment Name: At_100mM_NaCl__P Parameter: Timepoint (hr) Value: 6
  misc_feature: MA Experiment 20000268 PARAMETER Experiment Name: At_100mM_NaCl__P Parameter: Tissue Value: Whole Plant
  misc_feature: MA Experiment 20000268 PARAMETER Experiment Name: At_100mM_NaCl__P Parameter: Treatment Value: 100mM NaCl vs. No Treatment
  misc_feature: MA Experiment ID: 20000286 Result: Down-regulated in Transcription
  misc_feature: MA Experiment 20000286 PARAMETER Experiment Name: At_Open_Flower_P Parameter: Age (day) Value: 21
  misc_feature: MA Experiment 20000286 PARAMETER Experiment Name: At_Open_Flower_P Parameter: Plant Line Value: WS
  misc_feature: MA Experiment 20000286 PARAMETER Experiment Name: At_Open_Flower_P Parameter: Tissue Value: Half Open vs. Whole Plant
  misc_feature: MA Experiment ID: 20000436 Result: Down-regulated in Transcription
  misc_feature: MA Experiment 20000436 PARAMETER Experiment Name: At_Drought_P Parameter: Age (day) Value: 7
  misc_feature: MA Experiment 20000436 PARAMETER Experiment Name: At_Drought_P Parameter: Organism Value: A. thaliana
  misc_feature: MA Experiment 20000436 PARAMETER Experiment Name: At_Drought_P Parameter: Plant Line Value: WS
  misc_feature: MA Experiment 20000436 PARAMETER Experiment Name: At_Drought_P Parameter: Timepoint (hr) Value: 12
  misc_feature: MA Experiment 20000436 PARAMETER Experiment Name: At_Drought_P Parameter: Tissue Value: Whole Plant
  misc_feature: MA Experiment 20000436 PARAMETER Experiment Name: At_Drought_P Parameter: Treatment Value: Drought vs. No Drought
  misc_feature: MA Experiment ID: 20000437 Result: Down-regulated in Transcription
  misc_feature: MA Experiment 20000437 PARAMETER Experiment Name: At_Drought_P Parameter: Age (day) Value: 8
  misc_feature: MA Experiment 20000437 PARAMETER Experiment Name: At_Drought_P Parameter: Organism Value: A. thaliana
  misc_feature: MA Experiment 20000437 PARAMETER Experiment Name: At_Drought_P Parameter: Plant Line Value: WS
  misc_feature: MA Experiment 20000437 PARAMETER Experiment Name: At_Drought_P Parameter: Timepoint (hr) Value: 24
  misc_feature: MA Experiment 20000437 PARAMETER Experiment Name: At_Drought_P Parameter: Tissue Value: Whole Plant
  misc_feature: MA Experiment 20000437 PARAMETER Experiment Name: At_Drought_P Parameter: Treatment Value: Drought vs. No Drought
  misc_feature: MA Experiment ID: 20000439 Result: Down-regulated in Transcription
  misc_feature: MA Experiment 20000439 PARAMETER Experiment Name: At_Roots__P Parameter: Age (day) Value: 14 vs. 21
  misc_feature: MA Experiment 20000439 PARAMETER Experiment Name: At_Roots__P Parameter: Organism Value: A. thaliana
  misc_feature: MA Experiment 20000439 PARAMETER Experiment Name: At_Roots__P Parameter: Tissue Value: Roots vs. Whole Plant
  misc_feature: MA Experiment ID: 20000441 Result: Up-regulated in Transcription
  misc_feature: MA Experiment 20000441 PARAMETER Experiment Name: At_1uM_BR-BRZ__P Parameter: Tissue Value: Shoot Apices
  misc_feature: MA Experiment 20000441 PARAMETER Experiment Name: At_1uM_BR-BRZ__P Parameter: Treatment Value: 1uM BR vs. No Treatment
  misc_feature: MA Experiment ID: 20000573 Result: Down-regulated in Transcription
  misc_feature: MA Experiment 20000573 PARAMETER Experiment Name: At_100uM_ABA_Mutants__P Parameter: Organism Value: A. thaliana
  misc_feature: MA Experiment 20000573 PARAMETER Experiment Name: At_100uM_ABA_Mutants__P Parameter: Plant Line Value: CS22 vs. Ler wt
  misc_feature: MA Experiment 20000573 PARAMETER Experiment Name: At_100uM_ABA_Mutants__P Parameter: Timepoint (hr) Value: N/A
  misc_feature: MA Experiment 20000573 PARAMETER Experiment Name: At_100uM_ABA_Mutants__P Parameter: Tissue Value: Whole Plant
  misc_feature: MA Experiment 20000573 PARAMETER Experiment Name: At_100uM_ABA_Mutants__P Parameter: Treatment Value: None
  misc_feature: MA Experiment ID: 20000574 Result: Down-regulated in Transcription
  misc_feature: MA Experiment 20000574 PARAMETER Experiment Name: At_100uM_ABA_Mutants__P Parameter: Organism Value: A. thaliana
  misc_feature: MA Experiment 20000574 PARAMETER Experiment Name: At_100uM_ABA_Mutants__P Parameter: Plant Line Value: CS23 vs. Ler wt
  misc_feature: MA Experiment 20000574 PARAMETER Experiment Name: At_100uM_ABA_Mutants__P Parameter: Timepoint (hr) Value: N/A
  misc_feature: MA Experiment 20000574 PARAMETER Experiment Name: At_100uM_ABA_Mutants__P Parameter: Tissue Value: Whole Plant
  misc_feature: MA Experiment 20000574 PARAMETER Experiment Name: At_100uM_ABA_Mutants__P Parameter: Treatment Value: None
  misc_feature: MA Experiment ID: 20001247 Result: Up-regulated in Transcription
  misc_feature: MA Experiment 20001247 PARAMETER Experiment Name: At_Far-red-induction_P Parameter: Age (day) Value: 7
  misc_feature: MA Experiment 20001247 PARAMETER Experiment Name: At_Far-red-induction_P Parameter: Light Value: Far-red vs. White
  misc_feature: MA Experiment 20001247 PARAMETER Experiment Name: At_Far-red-induction_P Parameter: Organism Value: A. thaliana
  misc_feature: MA Experiment 20001247 PARAMETER Experiment Name: At_Far-red-induction_P Parameter: Plant Line Value: Columbia
  misc_feature: MA Experiment 20001247 PARAMETER Experiment Name: At_Far-red-induction_P Parameter: Timepoint (hr) Value: 1
  misc_feature: MA Experiment 20001247 PARAMETER Experiment Name: At_Far-red-induction_P Parameter: Tissue Value: Whole Plant
  misc_feature: MA Experiment ID: 20001450 Result: Up-regulated in Transcription
  misc_feature: MA Experiment 20001450 PARAMETER Experiment Name: At_Far-red-induction_P Parameter: Age (day) Value: 7
  misc_feature: MA Experiment 20001450 PARAMETER Experiment Name: At_Far-red-induction_P Parameter: Light Value: Far-red vs. White
  misc_feature: MA Experiment 20001450 PARAMETER Experiment Name: At_Far-red-induction_P Parameter: Organism Value: A. thaliana
  misc_feature: MA Experiment 20001450 PARAMETER Experiment Name: At_Far-red-induction_P Parameter: Plant Line Value: Columbia
  misc_feature: MA Experiment 20001450 PARAMETER Experiment Name: At_Far-red-induction_P Parameter: Timepoint (hr) Value: 8
  misc_feature: MA Experiment 20001450 PARAMETER Experiment Name: At_Far-red-induction_P Parameter: Tissue Value: Whole Plant
  misc_feature: MA Experiment ID: 20001555 Result: Down-regulated in Transcription
  misc_feature: MA Experiment 20001555 PARAMETER Experiment Name: At_Drought_Soil_Dry_P Parameter: Age (day) Value: 24
  misc_feature: MA Experiment 20001555 PARAMETER Experiment Name: At_Drought_Soil_Dry_P Parameter: Organism Value: A. thaliana
  misc_feature: MA Experiment 20001555 PARAMETER Experiment Name: At_Drought_Soil_Dry_P Parameter: Plant Line Value: WS
  misc_feature: MA Experiment 20001555 PARAMETER Experiment Name: At_Drought_Soil_Dry_P Parameter: Post Timepoint (hr) Value: None
  misc_feature: MA Experiment 20001555 PARAMETER Experiment Name: At_Drought_Soil_Dry_P Parameter: Post-Treatment Value: None
  misc_feature: MA Experiment 20001555 PARAMETER Experiment Name: At_Drought_Soil_Dry_P Parameter: Timepoint (day) Value: 10
  misc_feature: MA Experiment 20001555 PARAMETER Experiment Name: At_Drought_Soil_Dry_P Parameter: Treatment Value: Drought vs. No Drought
  misc_feature: MA Experiment ID: 20001556 Result: Down-regulated in Transcription
  misc_feature: MA Experiment 20001556 PARAMETER Experiment Name: At_Drought_Soil_Dry_P Parameter: Age (day) Value: 26
  misc_feature: MA Experiment 20001556 PARAMETER Experiment Name: At_Drought_Soil_Dry_P Parameter: Organism Value: A. thaliana
  misc_feature: MA Experiment 20001556 PARAMETER Experiment Name: At_Drought_Soil_Dry_P Parameter: Plant Line Value: WS
  misc_feature: MA Experiment 20001556 PARAMETER Experiment Name: At_Drought_Soil_Dry_P Parameter: Post Timepoint (hr) Value: None
  misc_feature: MA Experiment 20001556 PARAMETER Experiment Name: At_Drought_Soil_Dry_P Parameter: Post-Treatment Value: None
  misc_feature: MA Experiment 20001556 PARAMETER Experiment Name: At_Drought_Soil_Dry_P Parameter: Timepoint (day) Value: 12
  misc_feature: MA Experiment 20001556 PARAMETER Experiment Name: At_Drought_Soil_Dry_P Parameter: Treatment Value: Drought vs. No Drought
  misc_feature: MA Experiment ID: 20001904 Result: Down-regulated in Transcription
  misc_feature: MA Experiment 20001904 PARAMETER Experiment Name: At_Drought_Reproduction_P Parameter: Age (day) Value: 37
  misc_feature: MA Experiment 20001904 PARAMETER Experiment Name: At_Drought_Reproduction_P Parameter: Organism Value: A. thaliana
  misc_feature: MA Experiment 20001904 PARAMETER Experiment Name: At_Drought_Reproduction_P Parameter: Plant Line Value: WS
  misc_feature: MA Experiment 20001904 PARAMETER Experiment Name: At_Drought_Reproduction_P Parameter: Timepoint (day) Value: 7
  misc_feature: MA Experiment 20001904 PARAMETER Experiment Name: At_Drought_Reproduction_P Parameter: Tissue Value: Rosettes
  misc_feature: MA Experiment 20001904 PARAMETER Experiment Name: At_Drought_Reproduction_P Parameter: Treatment Value: Drought vs. No Drought
  misc_feature: MA Experiment ID: 20001905 Result: Down-regulated in Transcription
  misc_feature: MA Experiment 20001905 PARAMETER Experiment Name: At_Drought_Reproduction_P Parameter: Age (day) Value: 40
  misc_feature: MA Experiment 20001905 PARAMETER Experiment Name: At_Drought_Reproduction_P Parameter: Organism Value: A. thaliana
  misc_feature: MA Experiment 20001905 PARAMETER Experiment Name: At_Drought_Reproduction_P Parameter: Plant Line Value: WS
  misc_feature: MA Experiment 20001905 PARAMETER Experiment Name: At_Drought_Reproduction_P Parameter: Timepoint (day) Value: 10
  misc_feature: MA Experiment 20001905 PARAMETER Experiment Name: At_Drought_Reproduction_P Parameter: Tissue Value: Rosettes
  misc_feature: MA Experiment 20001905 PARAMETER Experiment Name: At_Drought_Reproduction_P Parameter: Treatment Value: Drought vs. No Drought
  misc_feature: MA Experiment ID: 20001906 Result: Down-regulated in Transcription
  misc_feature: MA Experiment 20001906 PARAMETER Experiment Name: At_Drought_Reproduction_P Parameter: Age (day) Value: 35
  misc_feature: MA Experiment 20001906 PARAMETER Experiment Name: At_Drought_Reproduction_P Parameter: Organism Value: A. thaliana
  misc_feature: MA Experiment 20001906 PARAMETER Experiment Name: At_Drought_Reproduction_P Parameter: Plant Line Value: WS
  misc_feature: MA Experiment 20001906 PARAMETER Experiment Name: At_Drought_Reproduction_P Parameter: Timepoint (day) Value: 5
  misc_feature: MA Experiment 20001906 PARAMETER Experiment Name: At_Drought_Reproduction_P Parameter: Tissue Value: Siliques
  misc_feature: MA Experiment 20001906 PARAMETER Experiment Name: At_Drought_Reproduction_P Parameter: Treatment Value: Drought vs. No Drought
  misc_feature: MA Experiment ID: 20001907 Result: Down-regulated in Transcription
  misc_feature: MA Experiment 20001907 PARAMETER Experiment Name: At_Drought_Reproduction_P Parameter: Age (day) Value: 37
  misc_feature: MA Experiment 20001907 PARAMETER Experiment Name: At_Drought_Reproduction_P Parameter: Organism Value: A. thaliana
  misc_feature: MA Experiment 20001907 PARAMETER Experiment Name: At_Drought_Reproduction_P Parameter: Plant Line Value: WS
  misc_feature: MA Experiment 20001907 PARAMETER Experiment Name: At_Drought_Reproduction_P Parameter: Timepoint (day) Value: 7
  misc_feature: MA Experiment 20001907 PARAMETER Experiment Name: At_Drought_Reproduction_P Parameter: Tissue Value: Siliques
  misc_feature: MA Experiment 20001907 PARAMETER Experiment Name: At_Drought_Reproduction_P Parameter: Treatment Value: Drought vs. No Drought
  misc_feature: MA Experiment ID: 20001908 Result: Down-regulated in Transcription
  misc_feature: MA Experiment 20001908 PARAMETER Experiment Name: At_Drought_Reproduction_P Parameter: Age (day) Value: 40
  misc_feature: MA Experiment 20001908 PARAMETER Experiment Name: At_Drought_Reproduction_P Parameter: Organism Value: A. thaliana
  misc_feature: MA Experiment 20001908 PARAMETER Experiment Name: At_Drought_Reproduction_P Parameter: Plant Line Value: WS
  misc_feature: MA Experiment 20001908 PARAMETER Experiment Name: At_Drought_Reproduction_P Parameter: Timepoint (day) Value: 10
  misc_feature: MA Experiment 20001908 PARAMETER Experiment Name: At_Drought_Reproduction_P Parameter: Tissue Value: Siliques
  misc_feature: MA Experiment 20001908 PARAMETER Experiment Name: At_Drought_Reproduction_P Parameter: Treatment Value: Drought vs. No Drought
  misc_feature: MA Experiment ID: 20001910 Result: Down-regulated in Transcription
  misc_feature: MA Experiment 20001910 PARAMETER Experiment Name: At_Drought_Reproduction_P Parameter: Age (day) Value: 37
  misc_feature: MA Experiment 20001910 PARAMETER Experiment Name: At_Drought_Reproduction_P Parameter: Organism Value: A. thaliana
  misc_feature: MA Experiment 20001910 PARAMETER Experiment Name: At_Drought_Reproduction_P Parameter: Plant Line Value: WS
  misc_feature: MA Experiment 20001910 PARAMETER Experiment Name: At_Drought_Reproduction_P Parameter: Timepoint (day) Value: 7
  misc_feature: MA Experiment 20001910 PARAMETER Experiment Name: At_Drought_Reproduction_P Parameter: Tissue Value: Flowers
  misc_feature: MA Experiment 20001910 PARAMETER Experiment Name: At_Drought_Reproduction_P Parameter: Treatment Value: Drought vs. No Drought
  misc_feature: MA Experiment ID: 20001911 Result: Down-regulated in Transcription
  misc_feature: MA Experiment 20001911 PARAMETER Experiment Name: At_Drought_Reproduction_P Parameter: Age (day) Value: 40
  misc_feature: MA Experiment 20001911 PARAMETER Experiment Name: At_Drought_Reproduction_P Parameter: Organism Value: A. thaliana
  misc_feature: MA Experiment 20001911 PARAMETER Experiment Name: At_Drought_Reproduction_P Parameter: Plant Line Value: WS
  misc_feature: MA Experiment 20001911 PARAMETER Experiment Name: At_Drought_Reproduction_P Parameter: Timepoint (day) Value: 10
  misc_feature: MA Experiment 20001911 PARAMETER Experiment Name: At_Drought_Reproduction_P Parameter: Tissue Value: Flowers
  misc_feature: MA Experiment 20001911 PARAMETER Experiment Name: At_Drought_Reproduction_P Parameter: Treatment Value: Drought vs. No Drought
agtttccatgaagtcttcttcttctcagagctacgatgttttccccaacttcagaggggaagatgtccgccactcattagtcagccaccttcgtaaggaacttgatcgcaaattcatcaatacattcaacgacaacaggatcgaaagaagccgcaaaataaccccagagctgttattggctatagaaaactcaaggatctcacttgtcgtcttctctaaaaactatgcttcttccacgtggtgcttagatgaattggtgaagatccaagagtgctatgagaaattggatcaaatggtgattcctattttctacaaagtagatccttctcatgttagaaaacagaccggagagtttggcatggtctttggggagacctgcaagggcagaacagagaatgagaagcgaaaatggatgcgagctctagcagaggtagcacatctagccggagaagatcttcggaactggcgtagcgaagcagaaatgcttgaaaatatcgccaaggatgtttcaaacaaactcttccccccatcaaataatttcagtgacttcgtcgggattgaagctcatatagaggcattgatatcaatgttgcgcttcgactccaagaaagcgcgaatgatagggatttgtgggccttctgaaactggtaagactactataggaagagctttatacagcagactcaaaagcgacttccaccatcgggctttcgtagcatataagagaaaaatacggagcgactatgaccagaagctgtattgggaagaacaatttctatcagaaattctttgtcagaaggatataaagatagaggaatgtggtgcggtggaacaacgactaaagcacacgaaagttcttattgttcttgatgatgttgatgatatagagctactaaaaacgttggtaggacgtatcagatggtttggatctgagagcaaaattgttgtgattactcaaaaaagggaacttctcaaggctcacaacattgcacatgtttatgaagtgggattcccatcagaagaactggctcatcaaatgttttgtcgatatgcttttgggaaaaactctccacctcatggtttcaacgagcttgcagatgaagctgcaaagattgccggtaatcgtcctaaagctctcaagtacgttggttcgtcttttagaagactagacaaggaacaatgggtgaagatgctatcggagttccgtagtaatgggaataaactaaaaatcagctatgatgagttagatggtaaaggtcaagattacgttgcgtgtttaaccaatggttcaaattcccaggtgaaggcagagtggatccacttggcactaggcgtgtctatattacttaacatccgcagtgacggaacgacaattctcaaacatttgagctacaatcgaagcatggcgcaacaagcaaaaatatggtggtatgaaaatttggaaagagtgtgcaagaagtacaatatatgtggcatagatagctcaactgatggtggtggttcaacgtatggacaatgttcaaattcccaatttcaaagaaacatggacgcaagccccgggggaaacaaaaccagtaatcaatccacaaaagattcaccgagagcttctcaagtagagaaggaaaagatcgagtactgtgagccacatgtatatataacacctgccatcttcagtgacggaaccagagctcccaaatacgtggagtctagtagccgaagagtaacccaagtgcaccacgccaaaacatggtggccggagaattgtgaaaaagtgtacgagaaccacaacaacatatatggcatagatagatcaattgacggtggtgataagtttgagggaaaaagtaaagttagtgacggtgggttagacggcaaagatcaaggttcaatgtatggacaaagttcaaattccgagcttcaaataaacatggacgcagacaataggagatgtgaacctgtgagtgagatgcttttcaaaaattacaatgtgtgttcgcctaatggtttaaccgatgtaaactgttcaaatccccagtctcaaagaaaattggacgcaagcctaaagaaagacaaaattgtgcatgagtggattcgaaccggtagtggcttcttttttgattttcagggcccaaaatctatagtgagtgctgctcaagtggacgagaaaaatttcgagtactgtgaacaaggtgtgtatataacacttggcatcctcagtggcggaattatagttctcaaacatttggagttcagccgaagaatggcgcaacaagcaaaagtttggtggtcggaaaattggataaaagtgtaccaggagcacaacatatgtggcatagataaatcatttgatggtaggtttgatgatagacgtgtcattcgtcaattaagaccaaactgaagcacggcctggcccttgtaaaagtcaggacttgagctagatacttaagccaagcagatctgtttggctaagtctggtcgggttagcgcgaaattgtcgaaatctgtttaataattgcattcagtgcaagtctttaatttgtacttcatggctttaatacactaattaaacattggatcatttttagttttttcttcttttcaaaatacatatttttct

SEQ ID NO: 85203 - protein, 798 aa, Arabidopsis thaliana
  peptide (1)..(798): Ceres Seq. ID no. 12679421
  misc_feature (164)..(453): Pfam Name: NB-ARC domain Pfam Description: NB-ARC domain
  misc_feature (1)..(430): Homolog of NCBI NO: 7488174 NR Description: probable resistance protein - Arabidopsis thaliana
  misc_feature (452)..(569): Homolog of NCBI NO: 7488174 NR Description: probable resistance protein - Arabidopsis thaliana
  misc_feature (570)..(628): Homolog of NCBI NO: 7488174 NR Description: probable resistance protein - Arabidopsis thaliana
  misc_feature (709)..(750): Homolog of NCBI NO: 7488174 NR Description: probable resistance protein - Arabidopsis thaliana
  misc_feature (3)..(569): Homolog of NCBI NO: 26451875 NR Description: putative disease resistance RPP5 protein thaliana] >gi|29028968|gb|AAO64863.1| At4g16990 [Arabidopsis
  misc_feature (3)..(500): Homolog of NCBI NO: 30683889 NR Description: disease resistance protein (TIR-NBS class),
  misc_feature (3)..(500): Homolog of NCBI NO: 27311837 NR Description: Unknown protein [Arabidopsis thaliana]
  misc_feature (3)..(434): Homolog of NCBI NO: 25407556 NR Description: disease resistance RPP5 like protein (partial) - Arabidopsis thaliana >gi|5302809|emb|CAB46050.1| disease RPP5 like protein (fragment) [Arabidopsis thaliana] (fragment)
  misc_feature (659)..(760): Homolog of NCBI NO: 7488174 NR Description: probable resistance protein - Arabidopsis thaliana
  misc_feature (491)..(568): Homolog of NCBI NO: 7488174 NR Description: probable resistance protein - Arabidopsis thaliana
VSMKSSSSQSYDVFPNFRGEDVRHSLVSHLRKELDRKFINTFNDNRIERSRKITPELLLAIENSRISLVVFSKNYASSTWCLDELVKIQECYEKLDQMVIPIFYKVDPSHVRKQTGEFGMVFGETCKGRTENEKRKWMRALAEVAHLAGEDLRNWRSEAEMLENIAKDVSNKLFPPSNNFSDFVGIEAHIEALISMLRFDSKKARMIGICGPSETGKTTIGRALYSRLKSDFHHRAFVAYKRKIRSDYDQKLYWEEQFLSEILCQKDIKIEECGAVEQRLKHTKVLIVLDDVDDIELLKTLVGRIRWFGSESKIVVITQKRELLKAHNIAHVYEVGFPSEELAHQMFCRYAFGKNSPPHGFNELADEAAKIAGNRPKALKYVGSSFRRLDKEQWVKMLSEFRSNGNKLKISYDELDGKGQDYVACLTNGSNSQVKAEWIHLALGVSILLNIRSDGTTILKHLSYNRSMAQQAKIWWYENLERVCKKYNICGIDSSTDGGGSTYGQCSNSQFQRNMDASPGGNKTSNQSTKDSPRASQVEKEKIEYCEPHVYITPAIFSDGTRAPKYVESSSRRVTQVHHAKTWWPENCEKVYENHNNIYGIDRSIDGGDKFEGKSKVSDGGLDGKDQGSMYGQSSNSELQINMDADNRRCEPVSEMLFKNYNVCSPNGLTDVNCSNPQSQRKLDASLKKDKIVHEWIRTGSGFFFDFQGPKSIVSAAQVDEKNFEYCEQGVYITLGILSGGIIVLKHLEFSRRMAQQAKVWWSENWIKVYQEHNICGIDKSFDGRFDDRRVIRQLRPN

SEQ ID NO: 85204 - protein, 796 aa, Arabidopsis thaliana
  peptide (1)..(796): Ceres Seq. ID no. 12679422
  misc_feature (162)..(451): Pfam Name: NB-ARC domain Pfam Description: NB-ARC domain
  misc_feature (1)..(428): Homolog of NCBI NO: 7488174 NR Description: probable resistance protein - Arabidopsis thaliana
  misc_feature (450)..(567): Homolog of NCBI NO: 7488174 NR Description: probable resistance protein - Arabidopsis thaliana
  misc_feature (568)..(626): Homolog of NCBI NO: 7488174 NR Description: probable resistance protein - Arabidopsis thaliana
  misc_feature (707)..(748): Homolog of NCBI NO: 7488174 NR Description: probable resistance protein - Arabidopsis thaliana
  misc_feature (1)..(567): Homolog of NCBI NO: 26451875 NR Description: putative disease resistance RPP5 protein thaliana] >gi|29028968|gb|AAO64863.1| At4g16990 [Arabidopsis
  misc_feature (1)..(498): Homolog of NCBI NO: 30683889 NR Description: disease resistance protein (TIR-NBS class),
  misc_feature (1)..(498): Homolog of NCBI NO: 27311837 NR Description: Unknown protein [Arabidopsis thaliana]
  misc_feature (1)..(432): Homolog of NCBI NO: 25407556 NR Description: disease resistance RPP5 like protein (partial) - Arabidopsis thaliana >gi|5302809|emb|CAB46050.1| disease RPP5 like protein (fragment) [Arabidopsis thaliana] (fragment)
  misc_feature (657)..(758): Homolog of NCBI NO: 7488174 NR Description: probable resistance protein - Arabidopsis thaliana
  misc_feature (489)..(566): Homolog of NCBI NO: 7488174 NR Description: probable resistance protein - Arabidopsis thaliana
MKSSSSQSYDVFPNFRGEDVRHSLVSHLRKELDRKFINTFNDNRIERSRKITPELLLAIENSRISLVVFSKNYASSTWCLDELVKIQECYEKLDQMVIPIFYKVDPSHVRKQTGEFGMVFGETCKGRTENEKRKWMRALAEVAHLAGEDLRNWRSEAEMLENIAKDVSNKLFPPSNNFSDFVGIEAHIEALISMLRFDSKKARMIGICGPSETGKTTIGRALYSRLKSDFHHRAFVAYKRKIRSDYDQKLYWEEQFLSEILCQKDIKIEECGAVEQRLKHTKVLIVLDDVDDIELLKTLVGRIRWFGSESKIVVITQKRELLKAHNIAHVYEVGFPSEELAHQMFCRYAFGKNSPPHGFNELADEAAKIAGNRPKALKYVGSSFRRLDKEQWVKMLSEFRSNGNKLKISYDELDGKGQDYVACLTNGSNSQVKAEWIHLALGVSILLNIRSDGTTILKHLSYNRSMAQQAKIWWYENLERVCKKYNICGIDSSTDGGGSTYGQCSNSQFQRNMDASPGGNKTSNQSTKDSPRASQVEKEKIEYCEPHVYITPAIFSDGTRAPKYVESSSRRVTQVHHAKTWWPENCEKVYENHNNIYGIDRSIDGGDKFEGKSKVSDGGLDGKDQGSMYGQSSNSELQINMDADNRRCEPVSEMLFKNYNVCSPNGLTDVNCSNPQSQRKLDASLKKDKIVHEWIRTGSGFFFDFQGPKSIVSAAQVDEKNFEYCEQGVYITLGILSGGIIVLKHLEFSRRMAQQAKVWWSENWIKVYQEHNICGIDKSFDGRFDDRRVIRQLRPN

SEQ ID NO: 85205 - protein, 701 aa, Arabidopsis thaliana
  peptide (1)..(701): Ceres Seq. ID no. 12679423
  misc_feature (67)..(356): Pfam Name: NB-ARC domain Pfam Description: NB-ARC domain
  misc_feature (1)..(333): Homolog of NCBI NO: 7488174 NR Description: probable resistance protein - Arabidopsis thaliana
  misc_feature (355)..(472): Homolog of NCBI NO: 7488174 NR Description: probable resistance protein - Arabidopsis thaliana
  misc_feature (473)..(531): Homolog of NCBI NO: 7488174 NR Description: probable resistance protein - Arabidopsis thaliana
  misc_feature (612)..(653): Homolog of NCBI NO: 7488174 NR Description: probable resistance protein - Arabidopsis thaliana
  misc_feature (1)..(472): Homolog of NCBI NO: 26451875 NR Description: putative disease resistance RPP5 protein thaliana] >gi|29028968|gb|AAO64863.1| At4g16990 [Arabidopsis
  misc_feature (1)..(403): Homolog of NCBI NO: 30683889 NR Description: disease resistance protein (TIR-NBS class),
  misc_feature (1)..(403): Homolog of NCBI NO: 27311837 NR Description: Unknown protein [Arabidopsis thaliana]
  misc_feature (1)..(337): Homolog of NCBI NO: 25407556 NR Description: disease resistance RPP5 like protein (partial) - Arabidopsis thaliana >gi|5302809|emb|CAB46050.1| disease RPP5 like protein (fragment) [Arabidopsis thaliana] (fragment)
  misc_feature (562)..(663): Homolog of NCBI NO: 7488174 NR Description: probable resistance protein - Arabidopsis thaliana
  misc_feature (394)..(471): Homolog of NCBI NO: 7488174 NR Description: probable resistance protein - Arabidopsis thaliana
MVIPIFYKVDPSHVRKQTGEFGMVFGETCKGRTENEKRKWMRALAEVAHLAGEDLRNWRSEAEMLENIAKDVSNKLFPPSNNFSDFVGIEAHIEALISMLRFDSKKARMIGICGPSETGKTTIGRALYSRLKSDFHHRAFVAYKRKIRSDYDQKLYWEEQFLSEILCQKDIKIEECGAVEQRLKHTKVLIVLDDVDDIELLKTLVGRIRWFGSESKIVVITQKRELLKAHNIAHVYEVGFPSEELAHQMFCRYAFGKNSPPHGFNELADEAAKIAGNRPKALKYVGSSFRRLDKEQWVKMLSEFRSNGNKLKISYDELDGKGQDYVACLTNGSNSQVKAEWIHLALGVSILLNIRSDGTTILKHLSYNRSMAQQAKIWWYENLERVCKKYNICGIDSSTDGGGSTYGQCSNSQFQRNMDASPGGNKTSNQSTKDSPRASQVEKEKIEYCEPHVYITPAIFSDGTRAPKYVESSSRRVTQVHHAKTWWPENCEKVYENHNNIYGIDRSIDGGDKFEGKSKVSDGGLDGKDQGSMYGQSSNSELQINMDADNRRCEPVSEMLFKNYNVCSPNGLTDVNCSNPQSQRKLDASLKKDKIVHEWIRTGSGFFFDFQGPKSIVSAAQVDEKNFEYCEQGVYITLGILSGGIIVLKHLEFSRRMAQQAKVWWSENWIKVYQEHNICGIDKSFDGRFDDRRVIRQLRPN

SEQ ID NO: 85206 - DNA, 1412 bp, Arabidopsis thaliana
  misc_feature (1)..(1412): Ceres Seq. ID no. 12679432
  misc_feature: MA Experiment ID: 108433 Result: Up-regulated in Transcription
  misc_feature: MA Experiment 108433 PARAMETER Experiment Name: At_rhl_Mutant2_cDNA_P Parameter: Age (day) Value: 7
  misc_feature: MA Experiment 108433 PARAMETER Experiment Name: At_rhl_Mutant2_cDNA_P Parameter: Organism Value: A. thaliana
  misc_feature: MA Experiment 108433 PARAMETER Experiment Name: At_rhl_Mutant2_cDNA_P Parameter: Plant Line Value: rhl Mutant vs. wt landsburg
  misc_feature: MA Experiment 108433 PARAMETER Experiment Name: At_rhl_Mutant2_cDNA_P Parameter: Tissue Value: Roots
cctttctacccatttcgtctccttcattttgacgttttctttagatctgttaataatcccatccatggcttggtctagtcactagtggtgttatctctctgtgtggaataaaaagcaaggttttttaatcacttggattgttttaagatatggcaactttgaacccttttgatttgttggatgatgatgctgaggatccaagccagctcgctgttgccatcgagaagattgataagtccaagaaatctggacaggtttcgagcttgcctgctaagtcagctcctaagcttccatcgaagccacttcctcctgctcaagccgtgagagaggcaaggagtgatgctccacgtggtggtggaggccgtggaggatttaaccgtggtcgtggtggttacaaccgtgatgatggtaacaatggatattcagggggatacactaaaccctcaggtgaaggagatgtttcaaagtcttcttacgagaggcgtggcggtggtgatggggaacgtcctcgaagggcctttgagcgtcgtagtggaactggcagagggagtgacttcaagcgtgacggatctggtcgtgggaattggggaactccaggggaagagatagctgctgagactgaagcagtagctggtgttgagactgagaaggatgttggagagaagccagctgttgatgatgtagctgctgatgctaacaaggaggatactgttgttgaggagaaagagcctgaggataaggaaatgactcttgatgagtatgagaaaatactcgaggagaagaaaaaggcacttcaatcattaactacctctgagaggaaagttgatacgaaagtgtttgaatcaatgcaacaactgtcaaacaagaagtctaatgatgaaatcttcatcaagctgggttctgataaggacaaacgcaaagatgacaaagaagagaaggctaagaaggctgtgagcatcaatgagtttctgaagccagcagagggtgggaactactaccgaggaggtcgtggtggccgtggacgtggtggtcgtggccgtggaggtgtttctagtggcgaatctggtggttaccgtaatgaagctgcaccggcaattggagatgctgctcagttcccatctcttgggggcaagtaagatccatccatgataacgtccacactcgtgcatcctcctttaggattttgtgcgaggatttactgtttactggtctctcgttgtcagatgtaaataattaggtgtcgtcgtcagtttttagattttatgcaaaactttacacttgttggtgttctttacttttgaaacagtacactcttcttaattttaccattttactcgttttgtgtttgttgttttcttatttatgaaacatgttttgagacggacatatctaatgttatcgggtttgagtct

SEQ ID NO: 85207 - protein, 328 aa, Arabidopsis thaliana
  peptide (1)..(328): Ceres Seq. ID no. 12679433
  misc_feature (114)..(271): Pfam Name: Hyaluronan / mRNA binding family Pfam Description: Hyaluronan / mRNA binding family
  misc_feature (67)..(328): Homolog of NCBI NO: 15235894 NR Description: nuclear antigen homolog; protein id: At4g16830.1, by cDNA: 118826., supported by cDNA: gi_17380879, supported by gi_20465928 [Arabidopsis thaliana] >gi|7488137|pir||F71435
  misc_feature (68)..(328): Homolog of NCBI NO: 21537052 NR Description: nuclear antigen homolog [Arabidopsis thaliana]
  misc_feature (14)..(328): Homolog of NCBI NO: 6492266 NR Description: nuclear RNA binding protein A [Spinacia oleracea]
  misc_feature (90)..(328): Homolog of NCBI NO: 7488863 NR Description: probable transcription factor - fava bean
  misc_feature (76)..(326): Homolog of NCBI NO: 39725278 NR Description: salt tolerance protein 2 [Beta vulgaris]
  misc_feature (1)..(260): Homolog of NCBI NO: 15235894 NR Description: nuclear antigen homolog; protein id: At4g16830.1, by cDNA: 118826., supported by cDNA: gi_17380879, supported by gi_20465928 [Arabidopsis thaliana] >gi|7488137|pir||F71435
  misc_feature (5)..(328): Homolog of NCBI NO: 39725276 NR Description: salt tolerance protein 1 [Beta vulgaris]
  misc_feature (70)..(328): Homolog of NCBI NO: 6492262 NR Description: nuclear RNA binding protein [Nicotiana tabacum]
  misc_feature (29)..(326): Homolog of NCBI NO: 21593013 NR Description: nuclear RNA binding protein A-like protein
  misc_feature (1)..(306): Homolog of NCBI NO: 21537052 NR Description: nuclear antigen homolog [Arabidopsis thaliana]
MATLNPFDLLDDDAEDPSQLAVAIEKIDKSKKSGQVSSLPAKSAPKLPSKPLPPAQAVREARSDAPRGGGGRGGFNRGRGGYNRDDGNNGYSGGYTKPSGEGDVSKSSYERRGGGDGERPRRAFERRSGTGRGSDFKRDGSGRGNWGTPGEEIAAETEAVAGVETEKDVGEKPAVDDVAADANKEDTVVEEKEPEDKEMTLDEYEKILEEKKKALQSLTTSERKVDTKVFESMQQLSNKKSNDEIFIKLGSDKDKRKDDKEEKAKKAVSINEFLKPAEGGNYYRGGRGGRGRGGRGRGGVSSGESGGYRNEAAPAIGDAAQFPSLGGK

SEQ ID NO: 85208 - DNA, 1400 bp, Arabidopsis thaliana
  misc_feature (1)..(1400): Ceres Seq. ID no. 12679452
  misc_feature: MA Experiment ID: 108461 Result: Up-regulated in Transcription
  misc_feature: MA Experiment 108461 PARAMETER Experiment Name: At_Germinating_Seeds_cDNA_P Parameter: Age (day) Value: 1 vs. 0
  misc_feature: MA Experiment 108461 PARAMETER Experiment Name: At_Germinating_Seeds_cDNA_P Parameter: Tissue Value: Germinating Seeds
  misc_feature: MA Experiment ID: 108462 Result: Up-regulated in Transcription
  misc_feature: MA Experiment 108462 PARAMETER Experiment Name: At_Germinating_Seeds_cDNA_P Parameter: Age (day) Value: 2 vs. 0
  misc_feature: MA Experiment 108462 PARAMETER Experiment Name: At_Germinating_Seeds_cDNA_P Parameter: Tissue Value: Germinating Seeds
  misc_feature: MA Experiment ID: 108463 Result: Up-regulated in Transcription
  misc_feature: MA Experiment 108463 PARAMETER Experiment Name: At_Germinating_Seeds_cDNA_P Parameter: Age (day) Value: 3 vs. 0
  misc_feature: MA Experiment 108463 PARAMETER Experiment Name: At_Germinating_Seeds_cDNA_P Parameter: Tissue Value: Germinating Seeds
  misc_feature: MA Experiment ID: 108464 Result: Up-regulated in Transcription
  misc_feature: MA Experiment 108464 PARAMETER Experiment Name: At_Germinating_Seeds_cDNA_P Parameter: Age (day) Value: 4 vs. 0
  misc_feature: MA Experiment 108464 PARAMETER Experiment Name: At_Germinating_Seeds_cDNA_P Parameter: Tissue Value: Germinating Seeds
  misc_feature: MA Experiment ID: 108489 Result: Down-regulated in Transcription
  misc_feature: MA Experiment ID: 20000111 Result: Down-regulated in Transcription
  misc_feature: MA Experiment 20000111 PARAMETER Experiment Name: At_42deg_Heat_cDNA_P Parameter: Temperature (deg C) Value: 42 vs. 22
  misc_feature: MA Experiment 20000111 PARAMETER Experiment Name: At_42deg_Heat_cDNA_P Parameter: Timepoint (hr) Value: 6
  misc_feature: MA Experiment 20000111 PARAMETER Experiment Name: At_42deg_Heat_cDNA_P Parameter: Tissue Value: Aerial
  misc_feature: MA Experiment ID: 20000180 Result: Up-regulated in Transcription
  misc_feature: MA Experiment 20000180 PARAMETER Experiment Name: At_Germinating_Seeds_P Parameter: Age (hr) Value: 24 vs. 0
  misc_feature: MA Experiment 20000180 PARAMETER Experiment Name: At_Germinating_Seeds_P Parameter: Tissue Value: Germinating Seeds
  misc_feature: MA Experiment ID: 20001248 Result: Down-regulated in Transcription
  misc_feature: MA Experiment 20001248 PARAMETER Experiment Name: At_Far-red-induction_P Parameter: Age (day) Value: 7
  misc_feature: MA Experiment 20001248 PARAMETER Experiment Name: At_Far-red-induction_P Parameter: Light Value: Far-red vs. White
  misc_feature: MA Experiment 20001248 PARAMETER Experiment Name: At_Far-red-induction_P Parameter: Organism Value: A. thaliana
  misc_feature: MA Experiment 20001248 PARAMETER Experiment Name: At_Far-red-induction_P Parameter: Plant Line Value: Columbia
  misc_feature: MA Experiment 20001248 PARAMETER Experiment Name: At_Far-red-induction_P Parameter: Timepoint (hr) Value: 4
  misc_feature: MA Experiment 20001248 PARAMETER Experiment Name: At_Far-red-induction_P Parameter: Tissue Value: Whole Plant
  misc_feature: MA Experiment ID: 20001557 Result: Down-regulated in Transcription
  misc_feature: MA Experiment 20001557 PARAMETER Experiment Name: At_Drought_Soil_Dry_P Parameter: Age (day) Value: 27
  misc_feature: MA Experiment 20001557 PARAMETER Experiment Name: At_Drought_Soil_Dry_P Parameter: Organism Value: A. thaliana
  misc_feature: MA Experiment 20001557 PARAMETER Experiment Name: At_Drought_Soil_Dry_P Parameter: Plant Line Value: WS
  misc_feature: MA Experiment 20001557 PARAMETER Experiment Name: At_Drought_Soil_Dry_P Parameter: Post Timepoint (hr) Value: 3
  misc_feature: MA Experiment 20001557 PARAMETER Experiment Name: At_Drought_Soil_Dry_P Parameter: Post-Treatment Value: Re-Water vs. No Drought
  misc_feature: MA Experiment 20001557 PARAMETER Experiment Name: At_Drought_Soil_Dry_P Parameter: Timepoint (day) Value: 13
  misc_feature: MA Experiment 20001557 PARAMETER Experiment Name: At_Drought_Soil_Dry_P Parameter: Treatment Value: Drought vs. No Drought
  misc_feature: MA Experiment ID: 20001558 Result: Down-regulated in Transcription
  misc_feature: MA Experiment 20001558 PARAMETER Experiment Name: At_Drought_Soil_Dry_P Parameter: Age (day) Value: 27
  misc_feature: MA Experiment 20001558 PARAMETER Experiment Name: At_Drought_Soil_Dry_P Parameter: Organism Value: A. thaliana
  misc_feature: MA Experiment 20001558 PARAMETER Experiment Name: At_Drought_Soil_Dry_P Parameter: Plant Line Value: WS
  misc_feature: MA Experiment 20001558 PARAMETER Experiment Name: At_Drought_Soil_Dry_P Parameter: Post Timepoint (hr) Value: 6
  misc_feature: MA Experiment 20001558 PARAMETER Experiment Name: At_Drought_Soil_Dry_P Parameter: Post-Treatment Value: Re-Water vs. No Drought
  misc_feature: MA Experiment 20001558 PARAMETER Experiment Name: At_Drought_Soil_Dry_P Parameter: Timepoint (day) Value: 13
  misc_feature: MA Experiment 20001558 PARAMETER Experiment Name: At_Drought_Soil_Dry_P Parameter: Treatment Value: Drought vs. No Drought
  misc_feature: MA Experiment ID: 20001905 Result: Down-regulated in Transcription
  misc_feature: MA Experiment 20001905 PARAMETER Experiment Name: At_Drought_Reproduction_P Parameter: Age (day) Value: 40
  misc_feature: MA Experiment 20001905 PARAMETER Experiment Name: At_Drought_Reproduction_P Parameter: Organism Value: A. thaliana
  misc_feature: MA Experiment 20001905 PARAMETER Experiment Name: At_Drought_Reproduction_P Parameter: Plant Line Value: WS
  misc_feature: MA Experiment 20001905 PARAMETER Experiment Name: At_Drought_Reproduction_P Parameter: Timepoint (day) Value: 10
  misc_feature: MA Experiment 20001905 PARAMETER Experiment Name: At_Drought_Reproduction_P Parameter: Tissue Value: Rosettes
  misc_feature: MA Experiment 20001905 PARAMETER Experiment Name: At_Drought_Reproduction_P Parameter: Treatment Value: Drought vs. No Drought
  misc_feature: MA Experiment ID: 20001911 Result: Down-regulated in Transcription
  misc_feature: MA Experiment 20001911 PARAMETER Experiment Name: At_Drought_Reproduction_P Parameter: Age (day) Value: 40
  misc_feature: MA Experiment 20001911 PARAMETER Experiment Name: At_Drought_Reproduction_P Parameter: Organism Value: A. thaliana
  misc_feature: MA Experiment 20001911 PARAMETER Experiment Name: At_Drought_Reproduction_P Parameter: Plant Line Value: WS
  misc_feature: MA Experiment 20001911 PARAMETER Experiment Name: At_Drought_Reproduction_P Parameter: Timepoint (day) Value: 10
  misc_feature: MA Experiment 20001911 PARAMETER Experiment Name: At_Drought_Reproduction_P Parameter: Tissue Value: Flowers
  misc_feature: MA Experiment 20001911 PARAMETER Experiment Name: At_Drought_Reproduction_P Parameter: Treatment Value: Drought vs. No Drought
atctgtcgtgttctgtttgttctcacttctcacttctcagatttttataaacatgaatgaaacctgaattgttccactaactctcagcaaaaatgcgatcactttacttaatcgtcttcatcgttattagtcttgttaaagcttcgaaaagcgatgatgggttttgttcagcgccttcgattgttgaatcggatgagaagacgaaccccatttattggaaagccacgaatccaacactctctccttcacacctccaagacttgcctggtttcacacgaagtgtatacaaacgagatcatgcgttaataacaccggaaagtcatgtatacagccctttacctgactggacaaacacattaggggcgtatttgatcacaccggcaacgggttcccattttgtcatgtacttggcgaaaatgaaagaaatgtcaagttcaggtttgcctccacaagacatagagcggtattattacttatatgagctctatctttaacatatgcttgcacttatgatctataatctgctttttaactcctttcaatattctgaatctttttcaagtcttatattcgtggtcgagggtgctgtgacactcactaacacatccagttcttcaaaaaaattgacggtatgatttgtacaaaggaaaatttaccacagtattcttctggttacatcacgttctgcccagatttgatggtgaaatggttgcaagatttctccattagttttatcattttctgctgataatccatttttcctgtaggttgattcatatgcgtacctacctccaaactttcaccattccttggactgtgttgagtctgcaacacttgttgtcttcgagcggaggtatgaatatctaggaagtcacaccacagagcttattgttggctccacagacaagcaaccactactcgagactcctggtgaggtttttgaactgcggaaacttcttccgatgtccgttgcttatgacttcaacatccatactatggattttcagcctggagagtttctgaatgttaaggaagttcattataaccagcatggtttgttgcttctggaggggcaaggcatttatcgcttgggtgataactggtatccagttcaggctggtgatgtcatatggatggctccttttgtccctcaatggtatgctgcactcggaaagactaggtctcggtatttgttgtacaaagatgtgaatcgaaatccattgtgatcaaagattgatatgactttgcagtaaaagtcagaatcttgttgttcagcttcttgtcttataaacgccatgtccactctaagcactagctacgtgagacttagttgtatgaatcttataacaattgtgaaaagaaacacattgataaatgatgaaatgactctctctctctcc

SEQ ID NO: 85209 - protein, 133 aa, Arabidopsis thaliana
  peptide (1)..(133): Ceres Seq. ID no. 12679453
  misc_feature (61)..(130): Pfam Name: Protein of unknown function (DUF923) Pfam Description: Protein of unknown function (DUF923)
  misc_feature (1)..(130): Homolog of NCBI NO: 22328740 NR Description: hypothetical protein; protein id: At4g17050.1 thaliana] >gi|26451095|dbj|BAC42652.1| unknown protein
  misc_feature (2)..(130): Homolog of NCBI NO: 34393580 NR Description: putative glyoxylate induced protein [Oryza sativa
  misc_feature (2)..(109): Homolog of NCBI NO: 34901774 NR Description: OJ1058_B11.16 [Oryza sativa (japonica
  misc_feature (59)..(128): Homolog of NCBI NO: 27375364 NR Description: blr0253 [Bradyrhizobium japonicum]
MRSLYLIVFIVISLVKASKSDDGFCSAPSIVESDEKTNPIYWKATNPTLSPSHLQDLPGFTRSVYKRDHALITPESHVYSPLPDWTNTLGAYLITPATGSHFVMYLAKMKEMSSSGLPPQDIERYYYLYELYL

SEQ ID NO: 85210 - protein, 87 aa, Arabidopsis thaliana
  peptide (1)..(87): Ceres Seq. ID no. 12679454
  misc_feature (1)..(87): Pfam Name: Protein of unknown function (DUF923) Pfam Description: Protein of unknown function (DUF923)
  misc_feature (1)..(87): Homolog of NCBI NO: 22328740 NR Description: hypothetical protein; protein id: At4g17050.1 thaliana] >gi|26451095|dbj|BAC42652.1| unknown protein
  misc_feature (1)..(87): Homolog of NCBI NO: 34393580 NR Description: putative glyoxylate induced protein [Oryza sativa
  misc_feature (1)..(23): Homolog of NCBI NO: 34901774 NR Description: OJ1058_B11.16 [Oryza sativa (japonica
  misc_feature (1)..(81): Homolog of NCBI NO: 7485211 NR Description: hypothetical protein - Arabidopsis thaliana hypothetical protein [Arabidopsis thaliana]
  misc_feature (1)..(87): Homolog of NCBI NO: 15806172 NR Description: conserved hypothetical protein [Deinococcus
  misc_feature (1)..(85): Homolog of NCBI NO: 27375364 NR Description: blr0253 [Bradyrhizobium japonicum]
  misc_feature (1)..(85): Homolog of NCBI NO: 23113628 NR Description: hypothetical protein [Desulfitobacterium
  misc_feature (1)..(86): Homolog of NCBI NO: 29377458 NR Description: conserved hypothetical protein [Enterococcus V583] >gi|29344925|gb|AAO82682.1| conserved hypothetical protein
  misc_feature (1)..(85): Homolog of NCBI NO: 23501251 NR Description: conserved hypothetical protein [Brucella suis >gi|23347135|gb|AAN29293.1|AE014346_4 conserved hypothetical
  misc_feature (1)..(85): Homolog of NCBI NO: 16265139 NR Description: conserved hypothetical protein [Sinorhizobium
MSVAYDFNIHTMDFQPGEFLNVKEVHYNQHGLLLLEGQGIYRLGDNWYPVQAGDVIWMAPFVPQWYAALGKTRSRYLLYKDVNRNPL

SEQ ID NO: 85211 - protein, 76 aa, Arabidopsis thaliana; identical to SEQ ID NO: 40476
  peptide (1)..(76): Ceres Seq. ID no. 12679455
  misc_feature (1)..(76): Pfam Name: Protein of unknown function (DUF923) Pfam Description: Protein of unknown function (DUF923)
  misc_feature (1)..(76): Homolog of NCBI NO: 22328740 NR Description: hypothetical protein; protein id: At4g17050.1 thaliana] >gi|26451095|dbj|BAC42652.1| unknown protein
  misc_feature (1)..(76): Homolog of NCBI NO: 34393580 NR Description: putative glyoxylate induced protein [Oryza sativa
  misc_feature (1)..(12): Homolog of NCBI NO: 34901774 NR Description: OJ1058_B11.16 [Oryza sativa (japonica
  misc_feature (1)..(70): Homolog of NCBI NO: 7485211 NR Description: hypothetical protein - Arabidopsis thaliana hypothetical protein [Arabidopsis thaliana]
  misc_feature (1)..(76): Homolog of NCBI NO: 15806172 NR Description: conserved hypothetical protein [Deinococcus
  misc_feature (1)..(74): Homolog of NCBI NO: 27375364 NR Description: blr0253 [Bradyrhizobium japonicum]
  misc_feature (1)..(74): Homolog of NCBI NO: 23113628 NR Description: hypothetical protein [Desulfitobacterium
  misc_feature (1)..(75): Homolog of NCBI NO: 29377458 NR Description: conserved hypothetical protein [Enterococcus V583] >gi|29344925|gb|AAO82682.1| conserved hypothetical protein
  misc_feature (1)..(74): Homolog of NCBI NO: 23501251 NR Description: conserved hypothetical protein [Brucella suis >gi|23347135|gb|AAN29293.1|AE014346_4 conserved hypothetical
  misc_feature (1)..(74): Homolog of NCBI NO: 16265139 NR Description: conserved hypothetical protein [Sinorhizobium

SEQ ID NO: 85212 - DNA, 967 bp, Arabidopsis thaliana
  misc_feature (1)..(967): Ceres Seq. ID no. 12679464
  misc_feature: MA Experiment ID: 108434 Result: Down-regulated in Transcription
  misc_feature: MA Experiment 108434 PARAMETER Experiment Name: At_Root_Tips_cDNA_P Parameter: Tissue Value: Root Tips
  misc_feature: MA Experiment ID: 108463 Result: Up-regulated in Transcription
  misc_feature: MA Experiment 108463 PARAMETER Experiment Name: At_Germinating_Seeds_cDNA_P Parameter: Age (day) Value: 3 vs. 0
  misc_feature: MA Experiment 108463 PARAMETER Experiment Name: At_Germinating_Seeds_cDNA_P Parameter: Tissue Value: Germinating Seeds
  misc_feature: MA Experiment ID: 108464 Result: Up-regulated in Transcription
  misc_feature: MA Experiment 108464 PARAMETER Experiment Name: At_Germinating_Seeds_cDNA_P Parameter: Age (day) Value: 4 vs. 0
  misc_feature: MA Experiment 108464 PARAMETER Experiment Name: At_Germinating_Seeds_cDNA_P Parameter: Tissue Value: Germinating Seeds
  misc_feature: MA Experiment ID: 108469 Result: Up-regulated in Transcription
  misc_feature: MA Experiment ID: 108488 Result: Down-regulated in Transcription
  misc_feature: MA Experiment ID: 108501 Result: Down-regulated in Transcription
  misc_feature: MA Experiment 108501 PARAMETER Experiment Name: At_ap2_floral_buds_cDNA_P Parameter: Plant Line Value: ap2 (Ler.)
  misc_feature: MA Experiment 108501 PARAMETER Experiment Name: At_ap2_floral_buds_cDNA_P Parameter: Tissue Value: Closed Flower
  misc_feature: MA Experiment ID: 108577 Result: Down-regulated in Transcription
  misc_feature: MA Experiment 108577 PARAMETER Experiment Name: At_42deg_Heat_cDNA_P Parameter: Temperature (deg C) Value: 42 vs. 22
  misc_feature: MA Experiment 108577 PARAMETER Experiment Name: At_42deg_Heat_cDNA_P Parameter: Timepoint (hr) Value: 6
  misc_feature: MA Experiment 108577 PARAMETER Experiment Name: At_42deg_Heat_cDNA_P Parameter: Tissue Value: Aerial
  misc_feature: MA Experiment ID: 108585 Result: Up-regulated in Transcription
  misc_feature: MA Experiment 108585 PARAMETER Experiment Name: At_5mM_NaNP_cDNA_P Parameter: Timepoint (hr) Value: 6
  misc_feature: MA Experiment 108585 PARAMETER Experiment Name: At_5mM_NaNP_cDNA_P Parameter: Tissue Value: Aerial
  misc_feature: MA Experiment 108585 PARAMETER Experiment Name: At_5mM_NaNP_cDNA_P Parameter: Treatment Value: null
  misc_feature: MA Experiment ID: 108594 Result: Up-regulated in Transcription
  misc_feature: MA Experiment 108594 PARAMETER Experiment Name: At_Ler-rhl_Root_cDNA_P Parameter: Plant Line Value: null
  misc_feature: MA Experiment ID: 108595 Result: Up-regulated in Transcription
  misc_feature: MA Experiment 108595 PARAMETER Experiment Name: At_Ler-pi_Ovule_cDNA_P Parameter: Plant Line Value: null
  misc_feature: MA Experiment ID: 108667 Result: Up-regulated in Transcription
  misc_feature: MA Experiment 108667 PARAMETER Experiment Name: At_2mM_SA_cDNA_P Parameter: Plant Line Value: WS
  misc_feature: MA Experiment 108667 PARAMETER Experiment Name: At_2mM_SA_cDNA_P Parameter: Timepoint (hr) Value: 1
  misc_feature: MA Experiment 108667 PARAMETER Experiment Name: At_2mM_SA_cDNA_P Parameter: Treatment Value: 2mM SA vs. No Treatment
  misc_feature: MA Experiment ID: 108668 Result: Up-regulated in Transcription
  misc_feature: MA Experiment 108668 PARAMETER Experiment Name: At_2mM_SA_cDNA_P Parameter: Plant Line Value: WS
  misc_feature: MA Experiment 108668 PARAMETER Experiment Name: At_2mM_SA_cDNA_P Parameter: Timepoint (hr) Value: 6
  misc_feature: MA Experiment 108668 PARAMETER Experiment Name: At_2mM_SA_cDNA_P Parameter: Treatment Value: 2mM SA vs. No Treatment
  misc_feature: MA Experiment ID: 20000070 Result: Up-regulated in Transcription
  misc_feature: MA Experiment 20000070 PARAMETER Experiment Name: At_100uM_ABA_Mutants_cDNA_P Parameter: Plant Line Value: CS24
  misc_feature: MA Experiment 20000070 PARAMETER Experiment Name: At_100uM_ABA_Mutants_cDNA_P Parameter: Timepoint (hr) Value: 6
  misc_feature: MA Experiment 20000070 PARAMETER Experiment Name: At_100uM_ABA_Mutants_cDNA_P Parameter: Tissue Value: Aerial
  misc_feature: MA Experiment 20000070 PARAMETER Experiment Name: At_100uM_ABA_Mutants_cDNA_P Parameter: Treatment Value: 100uM ABA vs. No Treatment
  misc_feature: MA Experiment ID: 20000072 Result: Up-regulated in Transcription
  misc_feature: MA Experiment 20000072 PARAMETER Experiment Name: At_100uM_ABA_Mutants_cDNA_P Parameter: Plant Line Value: CS8105
  misc_feature: MA Experiment 20000072 PARAMETER Experiment Name: At_100uM_ABA_Mutants_cDNA_P Parameter: Timepoint (hr) Value: 6
  misc_feature: MA Experiment 20000072 PARAMETER Experiment Name: At_100uM_ABA_Mutants_cDNA_P Parameter: Tissue Value: Aerial
  misc_feature: MA Experiment 20000072 PARAMETER Experiment Name: At_100uM_ABA_Mutants_cDNA_P Parameter: Treatment Value: 100uM ABA vs. No Treatment
  misc_feature: MA Experiment ID: 20000086 Result: Up-regulated in Transcription
  misc_feature: MA Experiment 20000086 PARAMETER Experiment Name: At_100uM_ABA_Mutants_cDNA_P Parameter: Plant Line Value: CS22
  misc_feature: MA Experiment 20000086 PARAMETER Experiment Name: At_100uM_ABA_Mutants_cDNA_P Parameter: Timepoint (hr) Value: 6
  misc_feature: MA Experiment 20000086 PARAMETER Experiment Name: At_100uM_ABA_Mutants_cDNA_P Parameter: Tissue Value: Aerial
  misc_feature: MA Experiment 20000086 PARAMETER Experiment Name: At_100uM_ABA_Mutants_cDNA_P Parameter: Treatment Value: 100uM ABA vs. No Treatment
  misc_feature: MA Experiment ID: 20000088 Result: Up-regulated in Transcription
  misc_feature: MA Experiment 20000088 PARAMETER Experiment Name: At_100uM_ABA_Mutants_cDNA_P Parameter: Plant Line Value: Landsberg
  misc_feature: MA Experiment 20000088 PARAMETER Experiment Name: At_100uM_ABA_Mutants_cDNA_P Parameter: Timepoint (hr) Value: 6
  misc_feature: MA Experiment 20000088 PARAMETER Experiment Name: At_100uM_ABA_Mutants_cDNA_P Parameter: Tissue Value: Aerial
  misc_feature: MA Experiment 20000088 PARAMETER Experiment Name: At_100uM_ABA_Mutants_cDNA_P Parameter: Treatment Value: 100uM ABA vs. No Treatment
  misc_feature: MA Experiment ID: 20000111 Result: Down-regulated in Transcription
  misc_feature: MA Experiment 20000111 PARAMETER Experiment Name: At_42deg_Heat_cDNA_P Parameter: Temperature (deg C) Value: 42 vs. 22
  misc_feature: MA Experiment 20000111 PARAMETER Experiment Name: At_42deg_Heat_cDNA_P Parameter: Timepoint (hr) Value: 6
  misc_feature: MA Experiment 20000111 PARAMETER Experiment Name: At_42deg_Heat_cDNA_P Parameter: Tissue Value: Aerial
  misc_feature: MA Experiment ID: 20000117 Result: Up-regulated in Transcription
  misc_feature: MA Experiment 20000117 PARAMETER Experiment Name: At_100uM_ABA_Mutants_cDNA_P Parameter: Plant Line Value: Columbia
  misc_feature: MA Experiment 20000117 PARAMETER Experiment Name: At_100uM_ABA_Mutants_cDNA_P Parameter: Timepoint (hr) Value: 6
  misc_feature: MA Experiment 20000117 PARAMETER Experiment Name: At_100uM_ABA_Mutants_cDNA_P Parameter: Tissue Value: Aerial
  misc_feature: MA Experiment 20000117 PARAMETER Experiment Name: At_100uM_ABA_Mutants_cDNA_P Parameter: Treatment Value: 100uM ABA vs. No Treatment
  misc_feature: MA Experiment ID: 20000144 Result: Down-regulated in Transcription
  misc_feature: MA Experiment 20000144 PARAMETER Experiment Name: At_42deg_Heat_cDNA_P Parameter: Temperature (deg C) Value: 42 vs. 22
  misc_feature: MA Experiment 20000144 PARAMETER Experiment Name: At_42deg_Heat_cDNA_P Parameter: Timepoint (hr) Value: 1
  misc_feature: MA Experiment 20000144 PARAMETER Experiment Name: At_42deg_Heat_cDNA_P Parameter: Tissue Value: Aerial
  misc_feature: MA Experiment ID: 20000171 Result: Down-regulated in Transcription
  misc_feature: MA Experiment 20000171 PARAMETER Experiment Name: At_42deg_Heat_P Parameter: Age (day) Value: 14
  misc_feature: MA Experiment 20000171 PARAMETER Experiment Name: At_42deg_Heat_P Parameter: Organism Value: A. thaliana
  misc_feature: MA Experiment 20000171 PARAMETER Experiment Name: At_42deg_Heat_P Parameter: Plant Line Value: WS
  misc_feature: MA Experiment 20000171 PARAMETER Experiment Name: At_42deg_Heat_P Parameter: Temperature (deg C) Value: 42 vs. 22
  misc_feature: MA Experiment 20000171 PARAMETER Experiment Name: At_42deg_Heat_P Parameter: Timepoint (hr) Value: 1
  misc_feature: MA Experiment 20000171 PARAMETER Experiment Name: At_42deg_Heat_P Parameter: Tissue Value: Aerial
  misc_feature: MA Experiment ID: 20000179 Result: Down-regulated in Transcription
  misc_feature: MA Experiment 20000179 PARAMETER Experiment Name: At_Germinating_Seeds_P Parameter: Age (hr) Value: 6 vs. 0
  misc_feature: MA Experiment 20000179 PARAMETER Experiment Name: At_Germinating_Seeds_P Parameter: Tissue Value: Germinating Seeds
  misc_feature: MA Experiment ID: 20000182 Result: Up-regulated in Transcription
  misc_feature: MA Experiment 20000182 PARAMETER Experiment Name: At_2mM_SA_P Parameter: Age (day) Value: 14
  misc_feature: MA Experiment 20000182 PARAMETER Experiment Name: At_2mM_SA_P Parameter: Organism Value: A. thaliana
  misc_feature: MA Experiment 20000182 PARAMETER Experiment Name: At_2mM_SA_P Parameter: Plant Line Value: WS
  misc_feature: MA Experiment 20000182 PARAMETER Experiment Name: At_2mM_SA_P Parameter: Timepoint (hr) Value: 6
  misc_feature: MA Experiment 20000182 PARAMETER Experiment Name: At_2mM_SA_P Parameter: Tissue Value: Aerial
  misc_feature: MA Experiment 20000182 PARAMETER Experiment Name: At_2mM_SA_P Parameter: Treatment Value: 2mM SA vs. No Treatment
  misc_feature: MA Experiment ID: 20000185 Result: Down-regulated in Transcription
  misc_feature: MA Experiment 20000185 PARAMETER Experiment Name: At_Roots__P Parameter: Age (day) Value: 7 vs. 21
  misc_feature: MA Experiment 20000185 PARAMETER Experiment Name: At_Roots__P Parameter: Organism Value: A. thaliana
  misc_feature: MA Experiment 20000185 PARAMETER Experiment Name: At_Roots__P Parameter: Tissue Value: Roots vs. Whole Plant
  misc_feature: MA Experiment ID: 20000227 Result: Down-regulated in Transcription
  misc_feature: MA Experiment 20000227 PARAMETER Experiment Name: At_Root-Tips-vs-Tops_P Parameter: Tissue Value: Root Tips vs. Root Tops
  misc_feature: MA Experiment ID: 20000234 Result: Down-regulated in Transcription
  misc_feature: MA Experiment 20000234 PARAMETER Experiment Name: At_Siliques_P Parameter: Age (day) Value: 21
  misc_feature: MA Experiment 20000234 PARAMETER Experiment Name: At_Siliques_P Parameter: Organism Value: A. thaliana
  misc_feature: MA Experiment 20000234 PARAMETER Experiment Name: At_Siliques_P Parameter: Plant Line Value: WS
  misc_feature: MA Experiment 20000234 PARAMETER Experiment Name: At_Siliques_P Parameter: Tissue Value: Less Than 5mm Siliques vs. Whole Plant
  misc_feature: MA Experiment ID: 20000235 Result: Down-regulated in Transcription
  misc_feature: MA Experiment 20000235 PARAMETER Experiment Name: At_Siliques_P Parameter: Age (day) Value: 21
  misc_feature: MA Experiment 20000235 PARAMETER Experiment Name: At_Siliques_P Parameter: Organism Value: A. thaliana
  misc_feature: MA Experiment 20000235 PARAMETER Experiment Name: At_Siliques_P Parameter: Plant Line Value: WS
  misc_feature: MA Experiment 20000235 PARAMETER Experiment Name: At_Siliques_P Parameter: Tissue Value: 5-10mm Siliques vs. Whole Plant
  misc_feature: MA Experiment ID: 20000264 Result: Down-regulated in Transcription
  misc_feature: MA Experiment 20000264 PARAMETER Experiment Name: At_Open_Flower_P Parameter: Age (day) Value: 21
  misc_feature: MA Experiment 20000264 PARAMETER Experiment Name: At_Open_Flower_P Parameter: Plant Line Value: WS
  misc_feature: MA Experiment 20000264 PARAMETER Experiment Name: At_Open_Flower_P Parameter: Tissue Value: Open Flower vs. Whole Plant
  misc_feature: MA Experiment ID: 20000265 Result: Down-regulated in Transcription
  misc_feature: MA Experiment 20000265 PARAMETER Experiment Name: At_Open_Flower_P Parameter: Age (day) Value: 21
  misc_feature: MA Experiment 20000265 PARAMETER Experiment Name: At_Open_Flower_P Parameter: Plant Line Value: WS
  misc_feature: MA Experiment 20000265 PARAMETER Experiment Name: At_Open_Flower_P Parameter: Tissue Value: Closed Flower vs. Whole Plant
  misc_feature: MA Experiment ID: 20000286 Result: Down-regulated in Transcription
  misc_feature: MA Experiment 20000286 PARAMETER Experiment Name: At_Open_Flower_P Parameter: Age (day) Value: 21
  misc_feature: MA Experiment 20000286 PARAMETER Experiment Name: At_Open_Flower_P Parameter: Plant Line Value: WS
  misc_feature: MA Experiment 20000286 PARAMETER Experiment Name: At_Open_Flower_P Parameter: Tissue Value: Half Open vs. Whole Plant
  misc_feature: MA Experiment ID: 20000436 Result: Down-regulated in Transcription
  misc_feature: MA Experiment 20000436 PARAMETER Experiment Name: At_Drought_P Parameter: Age (day) Value: 7
  misc_feature: MA Experiment 20000436 PARAMETER Experiment Name: At_Drought_P Parameter: Organism Value: A. thaliana
  misc_feature: MA Experiment 20000436 PARAMETER Experiment Name: At_Drought_P Parameter: Plant Line Value: WS
  misc_feature: MA Experiment 20000436 PARAMETER Experiment Name: At_Drought_P Parameter: Timepoint (hr) Value: 12
  misc_feature: MA Experiment 20000436 PARAMETER Experiment Name: At_Drought_P Parameter: Tissue Value: Whole Plant
  misc_feature: MA Experiment 20000436 PARAMETER Experiment Name: At_Drought_P Parameter: Treatment Value: Drought vs. No Drought
  misc_feature: MA Experiment ID: 20000437 Result: Down-regulated in Transcription
  misc_feature: MA Experiment 20000437 PARAMETER Experiment Name: At_Drought_P Parameter: Age (day) Value: 8
  misc_feature: MA Experiment 20000437 PARAMETER Experiment Name: At_Drought_P Parameter: Organism Value: A. thaliana
  misc_feature: MA Experiment 20000437 PARAMETER Experiment Name: At_Drought_P Parameter: Plant Line Value: WS
  misc_feature: MA Experiment 20000437 PARAMETER Experiment Name: At_Drought_P Parameter: Timepoint (hr) Value: 24
  misc_feature: MA Experiment 20000437 PARAMETER Experiment Name: At_Drought_P Parameter: Tissue Value: Whole Plant
  misc_feature: MA Experiment 20000437 PARAMETER Experiment Name: At_Drought_P Parameter: Treatment Value: Drought vs. No Drought
  misc_feature: MA Experiment ID: 20000438 Result: Down-regulated in Transcription
  misc_feature: MA Experiment 20000438 PARAMETER Experiment Name: At_Shoots__P Parameter: Age (day) Value: 14
  misc_feature: MA Experiment 20000438 PARAMETER Experiment Name: At_Shoots__P Parameter: Tissue Value: Shoots vs. Whole Plant
  misc_feature: MA Experiment ID: 20000439 Result: Down-regulated in Transcription
  misc_feature: MA Experiment 20000439 PARAMETER Experiment Name: At_Roots__P Parameter: Age (day) Value: 14 vs. 21
  misc_feature: MA Experiment 20000439 PARAMETER Experiment Name: At_Roots__P Parameter: Organism Value: A. thaliana
  misc_feature: MA Experiment 20000439 PARAMETER Experiment Name: At_Roots__P Parameter: Tissue Value: Roots vs. Whole Plant
  misc_feature: MA Experiment ID: 20000441 Result: Up-regulated in Transcription
  misc_feature: MA Experiment 20000441 PARAMETER Experiment Name: At_1uM_BR-BRZ__P Parameter: Tissue Value: Shoot Apices
  misc_feature: MA Experiment 20000441 PARAMETER Experiment Name: At_1uM_BR-BRZ__P Parameter: Treatment Value: 1uM BR vs. No Treatment
  misc_feature: MA Experiment ID: 20000443 Result: Up-regulated in Transcription
  misc_feature: MA Experiment 20000443 PARAMETER Experiment Name: At_1uM_BR-BRZ__P Parameter: Tissue Value: Shoot Apices
  misc_feature: MA Experiment 20000443 PARAMETER Experiment Name: At_1uM_BR-BRZ__P Parameter: Treatment Value: 1uM BRZ vs. No Treatment
  misc_feature: MA Experiment ID: 20000460 Result: Up-regulated in Transcription
  misc_feature: MA Experiment 20000460 PARAMETER Experiment Name: At_10percent_PEG_P Parameter: Age (day) Value: 12
  misc_feature: MA Experiment 20000460 PARAMETER Experiment Name: At_10percent_PEG_P Parameter: Organism Value: A. thaliana
  misc_feature: MA Experiment 20000460 PARAMETER Experiment Name: At_10percent_PEG_P Parameter: Plant Line Value: WS
  misc_feature: MA Experiment 20000460 PARAMETER Experiment Name: At_10percent_PEG_P Parameter: Timepoint (day) Value: 12
  misc_feature: MA Experiment 20000460 PARAMETER Experiment Name: At_10percent_PEG_P Parameter: Tissue Value: Whole Plant
  misc_feature: MA Experiment 20000460 PARAMETER Experiment Name: At_10percent_PEG_P Parameter: Treatment Value: 10percent PEG vs. No Treatment
  misc_feature: MA Experiment ID: 20000573 Result: Down-regulated in Transcription
  misc_feature: MA Experiment 20000573 PARAMETER Experiment Name: At_100uM_ABA_Mutants__P Parameter: Organism Value: A. thaliana
  misc_feature: MA Experiment 20000573 PARAMETER Experiment Name: At_100uM_ABA_Mutants__P Parameter: Plant Line Value: CS22 vs. Ler wt
  misc_feature: MA Experiment 20000573 PARAMETER Experiment Name: At_100uM_ABA_Mutants__P Parameter: Timepoint (hr) Value: N/A
  misc_feature: MA Experiment 20000573 PARAMETER Experiment Name: At_100uM_ABA_Mutants__P Parameter: Tissue Value: Whole Plant
  misc_feature: MA Experiment 20000573 PARAMETER Experiment Name: At_100uM_ABA_Mutants__P Parameter: Treatment Value: None
  misc_feature: MA Experiment ID: 20000574 Result: Down-regulated in Transcription
  misc_feature: MA Experiment 20000574 PARAMETER Experiment Name: At_100uM_ABA_Mutants__P Parameter: Organism Value: A. thaliana
  misc_feature: MA Experiment 20000574 PARAMETER Experiment Name: At_100uM_ABA_Mutants__P Parameter: Plant Line Value: CS23 vs. Ler wt
  misc_feature: MA Experiment 20000574 PARAMETER Experiment Name: At_100uM_ABA_Mutants__P Parameter: Timepoint (hr) Value: N/A
  misc_feature: MA Experiment 20000574 PARAMETER Experiment Name: At_100uM_ABA_Mutants__P Parameter: Tissue Value: Whole Plant
  misc_feature: MA Experiment 20000574 PARAMETER Experiment Name: At_100uM_ABA_Mutants__P Parameter: Treatment Value: None
  misc_feature: MA Experiment ID: 20000576 Result: Down-regulated in Transcription
  misc_feature: MA Experiment 20000576 PARAMETER Experiment Name: At_100uM_ABA_Mutants__P Parameter: Organism Value: A. thaliana
  misc_feature: MA Experiment 20000576 PARAMETER Experiment Name: At_100uM_ABA_Mutants__P Parameter: Plant Line Value: CS23
  misc_feature: MA Experiment 20000576 PARAMETER Experiment Name: At_100uM_ABA_Mutants__P Parameter: Timepoint (hr) Value: 6
  misc_feature: MA Experiment 20000576 PARAMETER Experiment Name: At_100uM_ABA_Mutants__P Parameter: Tissue Value: Whole Plant
  misc_feature: MA Experiment 20000576 PARAMETER Experiment Name: At_100uM_ABA_Mutants__P Parameter: Treatment Value: 1uM ABA vs. No Treatment
  misc_feature: MA Experiment ID: 20000709 Result: Up-regulated in Transcription
  misc_feature: MA Experiment 20000709 PARAMETER Experiment Name: At_15mM_NH4NO3_L-to-H_P Parameter: Age (hr) Value: 14
  misc_feature: MA Experiment 20000709 PARAMETER Experiment Name: At_15mM_NH4NO3_L-to-H_P Parameter: Organism Value: A. thaliana
  misc_feature: MA Experiment 20000709 PARAMETER Experiment Name: At_15mM_NH4NO3_L-to-H_P Parameter: Plant Line Value: WS
  misc_feature: MA Experiment 20000709 PARAMETER Experiment Name: At_15mM_NH4NO3_L-to-H_P Parameter: Timepoint (hr) Value: 4
  misc_feature: MA Experiment 20000709 PARAMETER Experiment Name: At_15mM_NH4NO3_L-to-H_P Parameter: Tissue Value: Aerial
  misc_feature: MA Experiment 20000709 PARAMETER Experiment Name: At_15mM_NH4NO3_L-to-H_P Parameter: Treatment Value: 15mM NH4NO3 vs. 30mM Mannitol
  misc_feature: MA Experiment ID: 20000794 Result: Down-regulated in Transcription
  misc_feature: MA Experiment 20000794 PARAMETER Experiment Name: At_Petals_P Parameter: Age (day) Value: 23-25 days
  misc_feature: MA Experiment 20000794 PARAMETER Experiment Name: At_Petals_P Parameter: Plant Line Value: WS
  misc_feature: MA Experiment 20000794 PARAMETER Experiment Name: At_Petals_P Parameter: Tissue Value: Petals vs. Whole plant
  misc_feature: MA Experiment ID: 20001556 Result: Down-regulated in Transcription
  misc_feature: MA Experiment 20001556 PARAMETER Experiment Name: At_Drought_Soil_Dry_P Parameter: Age (day) Value: 26
  misc_feature: MA Experiment 20001556 PARAMETER Experiment Name: At_Drought_Soil_Dry_P Parameter: Organism Value: A. thaliana
  misc_feature: MA Experiment 20001556 PARAMETER Experiment Name: At_Drought_Soil_Dry_P Parameter: Plant Line Value: WS
  misc_feature: MA Experiment 20001556 PARAMETER Experiment Name: At_Drought_Soil_Dry_P Parameter: Post Timepoint (hr) Value: None
  misc_feature: MA Experiment 20001556 PARAMETER Experiment Name: At_Drought_Soil_Dry_P Parameter: Post-Treatment Value: None
  misc_feature: MA Experiment 20001556 PARAMETER Experiment Name: At_Drought_Soil_Dry_P Parameter: Timepoint (day) Value: 12
  misc_feature: MA Experiment 20001556 PARAMETER Experiment Name: At_Drought_Soil_Dry_P Parameter: Treatment Value: Drought vs. No Drought
  misc_feature: MA Experiment ID: 20001904 Result: Down-regulated in Transcription
  misc_feature: MA Experiment 20001904 PARAMETER Experiment Name: At_Drought_Reproduction_P Parameter: Age (day) Value: 37
  misc_feature: MA Experiment 20001904 PARAMETER Experiment Name: At_Drought_Reproduction_P Parameter: Organism Value: A. thaliana
  misc_feature: MA Experiment 20001904 PARAMETER Experiment Name: At_Drought_Reproduction_P Parameter: Plant Line Value: WS
  misc_feature: MA Experiment 20001904 PARAMETER Experiment Name: At_Drought_Reproduction_P Parameter: Timepoint (day) Value: 7
  misc_feature: MA Experiment 20001904 PARAMETER Experiment Name: At_Drought_Reproduction_P Parameter: Tissue Value: Rosettes
  misc_feature: MA Experiment 20001904 PARAMETER Experiment Name: At_Drought_Reproduction_P Parameter: Treatment Value: Drought vs. No Drought
attcacaccggacattttgaaatctcaacaagaaccaaaccaaacaacaaaaaaacattcttaataattatctttctgttatgtcgatgacggcggattctcaatctgattatgcttttcttgagtccatacgacgacacttactaggaggaatcggagccgatactcagtgagtcgacagcgagttcggttactcaatcttgtgtaaccggtcagagcattaaaccggtgtacggacgaaaccctagctttagcaaactgtatccttgcttcaccgagagctggggagatttgccgttgaaagaaaacgattctgaggatatgttagtttacggtatcctcaacgacgcctttcacggcggttgggagccgtcttcttcgtcttccgacgaagatcgtagctctttcccgagtgttaagatcgagactccggagagtttcgcggcggtggattctgttccggtcaagaaggagaagacgagtcctgtttcggcggcggtgacggcggcgaagggaaagcattatagaggagtgagacaaaggccgtgggggaaatttgcggcggagattagagacccggcgaagaacggagctagggtttggttaggaacgtttgagacggcggaggacgcggcgttggcttacgacagagctgctttcaggatgcgtggttcccgcgctttgttgaattttccgttgagagttaattcaggagaacccgacccggttcgaatcaagtccaagagatcttctttttcttcttctaacgagaacggagctccgaagaagaggagaacggtggccgccggtggtggaatggataagggattgacggtgaagtgcgaggttgttgaagtggcacgtggcgatcgtttattggttttataattttgatttttctttgttggatgattatatgattcttcaaaaaagaagaacgttaataaaaaaattcgtttattattat

SEQ ID NO: 85213 - protein, 188 aa, Arabidopsis thaliana; identical to SEQ ID NO: 27258
  peptide (1)..(188): Ceres Seq. ID no. 12679465
  misc_feature (65)..(130): Pfam Name: AP2 domain Pfam Description: AP2 domain
  misc_feature (1)..(188): Homolog of NCBI NO: 21264420 NR Description: Ethylene responsive element binding factor 1
  misc_feature (1)..(188): Homolog of NCBI NO: 25350258 NR Description: ethylene responsive element binding factor 1 - Arabidopsis thaliana >gi|3434967|dbj|BAA32418.1| ethylene
  misc_feature (1)..(188): Homolog of NCBI NO: 25350257 NR Description: EREBP-2 protein [imported] - Arabidopsis thaliana
  misc_feature (1)..(188): Homolog of NCBI NO: 18414897 NR Description: ethylene responsive element binding factor 1 !); protein id: At4g17500.1, supported by cDNA: gi_16648794, by cDNA: gi_17064913, supported by cDNA: gi_3434966 [Arabidopsis
  misc_feature (1)..(158): Homolog of NCBI NO: 7528276 NR Description: AP2-related transcription factor
  misc_feature (1)..(187): Homolog of NCBI NO: 15238041 NR Description: ethylene responsive element binding factor 2 protein id: At5g47220.1, supported by cDNA: 3012., supported by gi_3434968 [Arabidopsis thaliana]
  misc_feature (1)..(187): Homolog of NCBI NO: 21592595 NR Description: ethylene responsive element binding factor 2
  misc_feature (1)..(162): Homolog of NCBI NO: 28274828 NR Description: ethylene response factor 1 [Lycopersicon
  misc_feature (1)..(187): Homolog of NCBI NO: 8809571 NR Description: ethylene-responsive element binding factor
  misc_feature (1)..(188): Homolog of NCBI NO: 7489077 NR Description: transcription factor Pti4 - tomato (fragment)

SEQ ID NO: 85214 - DNA, 1208 bp, Arabidopsis thaliana
  misc_feature (1)..(1208): Ceres Seq. ID no. 12679490
  misc_feature: MA Experiment ID: 108434 Result: Down-regulated in Transcription
  misc_feature: MA Experiment 108434 PARAMETER Experiment Name: At_Root_Tips_cDNA_P Parameter: Tissue Value: Root Tips
  misc_feature: MA Experiment ID: 108462 Result: Up-regulated in Transcription
  misc_feature: MA Experiment 108462 PARAMETER Experiment Name: At_Germinating_Seeds_cDNA_P Parameter: Age (day) Value: 2 vs. 0
  misc_feature: MA Experiment 108462 PARAMETER Experiment Name: At_Germinating_Seeds_cDNA_P Parameter: Tissue Value: Germinating Seeds
  misc_feature: MA Experiment ID: 108463 Result: Up-regulated in Transcription
  misc_feature: MA Experiment 108463 PARAMETER Experiment Name: At_Germinating_Seeds_cDNA_P Parameter: Age (day) Value: 3 vs. 0
  misc_feature: MA Experiment 108463 PARAMETER Experiment Name: At_Germinating_Seeds_cDNA_P Parameter: Tissue Value: Germinating Seeds
  misc_feature: MA Experiment ID: 108464 Result: Up-regulated in Transcription
  misc_feature: MA Experiment 108464 PARAMETER Experiment Name: At_Germinating_Seeds_cDNA_P Parameter: Age (day) Value: 4 vs. 0
  misc_feature: MA Experiment 108464 PARAMETER Experiment Name: At_Germinating_Seeds_cDNA_P Parameter: Tissue Value: Germinating Seeds
  misc_feature: MA Experiment ID: 108488 Result: Down-regulated in Transcription
  misc_feature: MA Experiment ID: 108561 Result: Up-regulated in Transcription
  misc_feature: MA Experiment 108561 PARAMETER Experiment Name: At_100uM_ABA_cDNA_P Parameter: Timepoint (hr) Value: 6
  misc_feature: MA Experiment 108561 PARAMETER Experiment Name: At_100uM_ABA_cDNA_P Parameter: Tissue Value: Aerial
  misc_feature: MA Experiment 108561 PARAMETER Experiment Name: At_100uM_ABA_cDNA_P Parameter: Treatment Value: 100uM ABA vs. No Treatment
  misc_feature: MA Experiment ID: 108572 Result: Up-regulated in Transcription
  misc_feature: MA Experiment 108572 PARAMETER Experiment Name: At_Drought_cDNA_P Parameter: Timepoint (hr) Value: 1
  misc_feature: MA Experiment 108572 PARAMETER Experiment Name: At_Drought_cDNA_P Parameter: Tissue Value: Aerial
  misc_feature: MA Experiment 108572 PARAMETER Experiment Name: At_Drought_cDNA_P Parameter: Treatment Value: Drought vs. No Drought
  misc_feature: MA Experiment ID: 108573 Result: Up-regulated in Transcription
  misc_feature: MA Experiment 108573 PARAMETER Experiment Name: At_Drought_cDNA_P Parameter: Timepoint (hr) Value: 6
  misc_feature: MA Experiment 108573 PARAMETER Experiment Name: At_Drought_cDNA_P Parameter: Tissue Value: Aerial
  misc_feature: MA Experiment 108573 PARAMETER Experiment Name: At_Drought_cDNA_P Parameter: Treatment Value: Drought vs. No Drought
  misc_feature: MA Experiment ID: 108585 Result: Up-regulated in Transcription
  misc_feature: MA Experiment 108585 PARAMETER Experiment Name: At_5mM_NaNP_cDNA_P Parameter: Timepoint (hr) Value: 6
  misc_feature: MA Experiment 108585 PARAMETER Experiment Name: At_5mM_NaNP_cDNA_P Parameter: Tissue Value: Aerial
  misc_feature: MA Experiment 108585 PARAMETER Experiment Name: At_5mM_NaNP_cDNA_P Parameter: Treatment Value: null
  misc_feature: MA Experiment ID: 108594 Result: Down-regulated in Transcription
  misc_feature: MA Experiment 108594 PARAMETER Experiment Name: At_Ler-rhl_Root_cDNA_P Parameter: Plant Line Value: null
  misc_feature: MA Experiment ID: 108605 Result: Up-regulated in Transcription
  misc_feature: MA Experiment 108605 PARAMETER Experiment Name: At_100uM_ABA_cDNA_P Parameter: Timepoint (hr) Value: 6
  misc_feature: MA Experiment 108605 PARAMETER Experiment Name: At_100uM_ABA_cDNA_P Parameter: Tissue Value: Aerial
  misc_feature: MA Experiment 108605 PARAMETER Experiment Name: At_100uM_ABA_cDNA_P Parameter: Treatment Value: 100uM ABA vs. No Treatment
  misc_feature: MA Experiment ID: 108607 Result: Up-regulated in Transcription
  misc_feature: MA Experiment 108607 PARAMETER Experiment Name: At_100uM_ABA_cDNA_P Parameter: Timepoint (hr) Value: 4
  misc_feature: MA Experiment 108607 PARAMETER Experiment Name: At_100uM_ABA_cDNA_P Parameter: Tissue Value: Aerial
  misc_feature: MA Experiment 108607 PARAMETER Experiment Name: At_100uM_ABA_cDNA_P Parameter: Treatment Value: 100uM ABA vs. No Treatment
  misc_feature: MA Experiment ID: 108609 Result: Up-regulated in Transcription
  misc_feature: MA Experiment 108609 PARAMETER Experiment Name: At_100uM_ABA_cDNA_P Parameter: Timepoint (hr) Value: 24
  misc_feature: MA Experiment 108609 PARAMETER Experiment Name: At_100uM_ABA_cDNA_P Parameter: Tissue Value: Aerial
  misc_feature: MA Experiment 108609 PARAMETER Experiment Name: At_100uM_ABA_cDNA_P Parameter: Treatment Value: 100uM ABA vs. No Treatment
  misc_feature: MA Experiment ID: 108668 Result: Up-regulated in Transcription
  misc_feature: MA Experiment 108668 PARAMETER Experiment Name: At_2mM_SA_cDNA_P Parameter: Plant Line Value: WS
  misc_feature: MA Experiment 108668 PARAMETER Experiment Name: At_2mM_SA_cDNA_P Parameter: Timepoint (hr) Value: 6
  misc_feature: MA Experiment 108668 PARAMETER Experiment Name: At_2mM_SA_cDNA_P Parameter: Treatment Value: 2mM SA vs. No Treatment
  misc_feature: MA Experiment ID: 20000069 Result: Up-regulated in Transcription
  misc_feature: MA Experiment 20000069 PARAMETER Experiment Name: At_100uM_ABA_Mutants_cDNA_P Parameter: Plant Line Value: CS23
  misc_feature: MA Experiment 20000069 PARAMETER Experiment Name: At_100uM_ABA_Mutants_cDNA_P Parameter: Timepoint (hr) Value: 6
  misc_feature: MA Experiment 20000069 PARAMETER Experiment Name: At_100uM_ABA_Mutants_cDNA_P Parameter: Tissue Value: Aerial
  misc_feature: MA Experiment 20000069 PARAMETER Experiment Name: At_100uM_ABA_Mutants_cDNA_P Parameter: Treatment Value: 100uM ABA vs. No Treatment
  misc_feature: MA Experiment ID: 20000070 Result: Up-regulated in Transcription
  misc_feature: MA Experiment 20000070 PARAMETER Experiment Name: At_100uM_ABA_Mutants_cDNA_P Parameter: Plant Line Value: CS24
  misc_feature: MA Experiment 20000070 PARAMETER Experiment Name: At_100uM_ABA_Mutants_cDNA_P Parameter: Timepoint (hr) Value: 6
  misc_feature: MA Experiment 20000070 PARAMETER Experiment Name: At_100uM_ABA_Mutants_cDNA_P Parameter: Tissue Value: Aerial
  misc_feature: MA Experiment 20000070 PARAMETER Experiment Name: At_100uM_ABA_Mutants_cDNA_P Parameter: Treatment Value: 100uM ABA vs. No Treatment
  misc_feature: MA Experiment ID: 20000071 Result: Up-regulated in Transcription
  misc_feature: MA Experiment 20000071 PARAMETER Experiment Name: At_100uM_ABA_Mutants_cDNA_P Parameter: Plant Line Value: CS8104
  misc_feature: MA Experiment 20000071 PARAMETER Experiment Name: At_100uM_ABA_Mutants_cDNA_P Parameter: Timepoint (hr) Value: 6
  misc_feature: MA Experiment 20000071 PARAMETER Experiment Name: At_100uM_ABA_Mutants_cDNA_P Parameter: Tissue Value: Aerial
  misc_feature: MA Experiment 20000071 PARAMETER Experiment Name: At_100uM_ABA_Mutants_cDNA_P Parameter: Treatment Value: 100uM ABA vs. No Treatment
  misc_feature: MA Experiment ID: 20000072 Result: Up-regulated in Transcription
  misc_feature: MA Experiment 20000072 PARAMETER Experiment Name: At_100uM_ABA_Mutants_cDNA_P Parameter: Plant Line Value: CS8105
  misc_feature: MA Experiment 20000072 PARAMETER Experiment Name: At_100uM_ABA_Mutants_cDNA_P Parameter: Timepoint (hr) Value: 6
  misc_feature: MA Experiment 20000072 PARAMETER Experiment Name: At_100uM_ABA_Mutants_cDNA_P Parameter: Tissue Value: Aerial
  misc_feature: MA Experiment 20000072 PARAMETER Experiment Name: At_100uM_ABA_Mutants_cDNA_P Parameter: Treatment Value: 100uM ABA vs. No Treatment
  misc_feature: MA Experiment ID: 20000086 Result: Up-regulated in Transcription
  misc_feature: MA Experiment 20000086 PARAMETER Experiment Name: At_100uM_ABA_Mutants_cDNA_P Parameter: Plant Line Value: CS22
  misc_feature: MA Experiment 20000086 PARAMETER Experiment Name: At_100uM_ABA_Mutants_cDNA_P Parameter: Timepoint (hr) Value: 6
  misc_feature: MA Experiment 20000086 PARAMETER Experiment Name: At_100uM_ABA_Mutants_cDNA_P Parameter: Tissue Value: Aerial
  misc_feature: MA Experiment 20000086 PARAMETER Experiment Name: At_100uM_ABA_Mutants_cDNA_P Parameter: Treatment Value: 100uM ABA vs. No Treatment
  misc_feature: MA Experiment ID: 20000087 Result: Up-regulated in Transcription
  misc_feature: MA Experiment 20000087 PARAMETER Experiment Name: At_100uM_ABA_Mutants_cDNA_P Parameter: Plant Line Value: WS
  misc_feature: MA Experiment 20000087 PARAMETER Experiment Name: At_100uM_ABA_Mutants_cDNA_P Parameter: Timepoint (hr) Value: 6
  misc_feature: MA Experiment 20000087 PARAMETER Experiment Name: At_100uM_ABA_Mutants_cDNA_P Parameter: Tissue Value: Aerial
  misc_feature: MA Experiment 20000087 PARAMETER Experiment Name: At_100uM_ABA_Mutants_cDNA_P Parameter: Treatment Value: 100uM ABA vs. No Treatment
  misc_feature: MA Experiment ID: 20000088 Result: Up-regulated in Transcription
  misc_feature: MA Experiment 20000088 PARAMETER Experiment Name: At_100uM_ABA_Mutants_cDNA_P Parameter: Plant Line Value: Landsberg
  misc_feature: MA Experiment 20000088 PARAMETER Experiment Name: At_100uM_ABA_Mutants_cDNA_P Parameter: Timepoint (hr) Value: 6
  misc_feature: MA Experiment 20000088 PARAMETER Experiment Name: At_100uM_ABA_Mutants_cDNA_P Parameter: Tissue Value: Aerial
  misc_feature: MA Experiment 20000088 PARAMETER Experiment Name: At_100uM_ABA_Mutants_cDNA_P Parameter: Treatment Value: 100uM ABA vs. No Treatment
  misc_feature: MA Experiment ID: 20000117 Result: Up-regulated in Transcription
  misc_feature: MA Experiment 20000117 PARAMETER Experiment Name: At_100uM_ABA_Mutants_cDNA_P Parameter: Plant Line Value: Columbia
  misc_feature: MA Experiment 20000117 PARAMETER Experiment Name: At_100uM_ABA_Mutants_cDNA_P Parameter: Timepoint (hr) Value: 6
  misc_feature: MA Experiment 20000117 PARAMETER Experiment Name: At_100uM_ABA_Mutants_cDNA_P Parameter: Tissue Value: Aerial
  misc_feature: MA Experiment 20000117 PARAMETER Experiment Name: At_100uM_ABA_Mutants_cDNA_P Parameter: Treatment Value: 100uM ABA vs. No Treatment
  misc_feature: MA Experiment ID: 20000169 Result: Up-regulated in Transcription
  misc_feature: MA Experiment 20000169 PARAMETER Experiment Name: At_100uM_ABA_P Parameter: Age (day) Value: 14
  misc_feature: MA Experiment 20000169 PARAMETER Experiment Name: At_100uM_ABA_P Parameter: Organism Value: A. thaliana
  misc_feature: MA Experiment 20000169 PARAMETER Experiment Name: At_100uM_ABA_P Parameter: Plant Line Value: WS
  misc_feature: MA Experiment 20000169 PARAMETER Experiment Name: At_100uM_ABA_P Parameter: Timepoint (hr) Value: 6
  misc_feature: MA Experiment 20000169 PARAMETER Experiment Name: At_100uM_ABA_P Parameter: Tissue Value: Aerial
  misc_feature: MA Experiment 20000169 PARAMETER Experiment Name: At_100uM_ABA_P Parameter: Treatment Value: 100uM ABA vs. No Treatment
  misc_feature: MA Experiment ID: 20000436 Result: Up-regulated in Transcription
  misc_feature: MA Experiment 20000436 PARAMETER Experiment Name: At_Drought_P Parameter: Age (day) Value: 7
  misc_feature: MA Experiment 20000436 PARAMETER Experiment Name: At_Drought_P Parameter: Organism Value: A. thaliana
  misc_feature: MA Experiment 20000436 PARAMETER Experiment Name: At_Drought_P Parameter: Plant Line Value: WS
  misc_feature: MA Experiment 20000436 PARAMETER Experiment Name: At_Drought_P Parameter: Timepoint (hr) Value: 12
  misc_feature: MA Experiment 20000436 PARAMETER Experiment Name: At_Drought_P Parameter: Tissue Value: Whole Plant
  misc_feature: MA Experiment 20000436 PARAMETER Experiment Name: At_Drought_P Parameter: Treatment Value: Drought vs. No Drought
  misc_feature: MA Experiment ID: 20000437 Result: Up-regulated in Transcription
  misc_feature: MA Experiment 20000437 PARAMETER Experiment Name: At_Drought_P Parameter: Age (day) Value: 8
  misc_feature: MA Experiment 20000437 PARAMETER Experiment Name: At_Drought_P Parameter: Organism Value: A. thaliana
  misc_feature: MA Experiment 20000437 PARAMETER Experiment Name: At_Drought_P Parameter: Plant Line Value: WS
  misc_feature: MA Experiment 20000437 PARAMETER Experiment Name: At_Drought_P Parameter: Timepoint (hr) Value: 24
  misc_feature: MA Experiment 20000437 PARAMETER Experiment Name: At_Drought_P Parameter: Tissue Value: Whole Plant
  misc_feature: MA Experiment 20000437 PARAMETER Experiment Name: At_Drought_P Parameter: Treatment Value: Drought vs. No Drought
  misc_feature: MA Experiment ID: 20000439 Result: Up-regulated in Transcription
  misc_feature: MA Experiment 20000439 PARAMETER Experiment Name: At_Roots__P Parameter: Age (day) Value: 14 vs. 21
  misc_feature: MA Experiment 20000439 PARAMETER Experiment Name: At_Roots__P Parameter: Organism Value: A. thaliana
  misc_feature: MA Experiment 20000439 PARAMETER Experiment Name: At_Roots__P Parameter: Tissue Value: Roots vs. Whole Plant
  misc_feature: MA Experiment ID: 20000453 Result: Up-regulated in Transcription
  misc_feature: MA Experiment 20000453 PARAMETER Experiment Name: At_100uM_ABA_P Parameter: Age (day) Value: 15
  misc_feature: MA Experiment 20000453 PARAMETER Experiment Name: At_100uM_ABA_P Parameter: Organism Value: A. thaliana
  misc_feature: MA Experiment 20000453 PARAMETER Experiment Name: At_100uM_ABA_P Parameter: Plant Line Value: WS
  misc_feature: MA Experiment 20000453 PARAMETER Experiment Name: At_100uM_ABA_P Parameter: Timepoint (hr) Value: 24
  misc_feature: MA Experiment 20000453 PARAMETER Experiment Name: At_100uM_ABA_P Parameter: Tissue Value: Aerial
  misc_feature: MA Experiment 20000453 PARAMETER Experiment Name: At_100uM_ABA_P Parameter: Treatment Value: 100uM ABA vs. No Treatment
  misc_feature: MA Experiment ID: 20000794 Result: Up-regulated in Transcription
  misc_feature: MA Experiment 20000794 PARAMETER Experiment Name: At_Petals_P Parameter: Age (day) Value: 23-25 days
  misc_feature: MA Experiment 20000794 PARAMETER Experiment Name: At_Petals_P Parameter: Plant Line Value: WS
  misc_feature: MA Experiment 20000794 PARAMETER Experiment Name: At_Petals_P Parameter: Tissue Value: Petals vs. Whole plant
  misc_feature: MA Experiment ID: 20001248 Result: Down-regulated in Transcription
  misc_feature: MA Experiment 20001248 PARAMETER Experiment Name: At_Far-red-induction_P Parameter: Age (day) Value: 7
  misc_feature: MA Experiment 20001248 PARAMETER Experiment Name: At_Far-red-induction_P Parameter: Light Value: Far-red vs. White
  misc_feature: MA Experiment 20001248 PARAMETER Experiment Name: At_Far-red-induction_P Parameter: Organism Value: A. thaliana
  misc_feature: MA Experiment 20001248 PARAMETER Experiment Name: At_Far-red-induction_P Parameter: Plant Line Value: Columbia
  misc_feature: MA Experiment 20001248 PARAMETER Experiment Name: At_Far-red-induction_P Parameter: Timepoint (hr) Value: 4
  misc_feature: MA Experiment 20001248 PARAMETER Experiment Name: At_Far-red-induction_P Parameter: Tissue Value: Whole Plant
  misc_feature: MA Experiment ID: 20001554 Result: Up-regulated in Transcription
  misc_feature: MA Experiment 20001554 PARAMETER Experiment Name: At_Drought_Soil_Dry_P Parameter: Age (day) Value: 21
  misc_feature: MA Experiment 20001554 PARAMETER Experiment Name: At_Drought_Soil_Dry_P Parameter: Organism Value: A. thaliana
  misc_feature: MA Experiment 20001554 PARAMETER Experiment Name: At_Drought_Soil_Dry_P Parameter: Plant Line Value: WS
  misc_feature: MA Experiment 20001554 PARAMETER Experiment Name: At_Drought_Soil_Dry_P Parameter: Post Timepoint (hr) Value: None
  misc_feature: MA Experiment 20001554 PARAMETER Experiment Name: At_Drought_Soil_Dry_P Parameter: Post-Treatment Value: None
  misc_feature: MA Experiment 20001554 PARAMETER Experiment Name: At_Drought_Soil_Dry_P Parameter: Timepoint (day) Value: 7
  misc_feature: MA Experiment 20001554 PARAMETER Experiment Name: At_Drought_Soil_Dry_P Parameter: Treatment Value: Drought vs. No Drought
  misc_feature: MA Experiment ID: 20001559 Result: Up-regulated in Transcription
  misc_feature: MA Experiment 20001559 PARAMETER Experiment Name: At_Drought_Soil_Dry_P Parameter: Age (day) Value: 28
  misc_feature: MA Experiment 20001559 PARAMETER Experiment Name: At_Drought_Soil_Dry_P Parameter: Organism Value: A. thaliana
  misc_feature: MA Experiment 20001559 PARAMETER Experiment Name: At_Drought_Soil_Dry_P Parameter: Plant Line Value: WS
  misc_feature: MA Experiment 20001559 PARAMETER Experiment Name: At_Drought_Soil_Dry_P Parameter: Post Timepoint (hr) Value: 29
  misc_feature: MA Experiment 20001559 PARAMETER Experiment Name: At_Drought_Soil_Dry_P Parameter: Post-Treatment Value: Re-Water vs. No Drought
  misc_feature: MA Experiment 20001559 PARAMETER Experiment Name: At_Drought_Soil_Dry_P Parameter: Timepoint (day) Value: 14
  misc_feature: MA Experiment 20001559 PARAMETER Experiment Name: At_Drought_Soil_Dry_P Parameter: Treatment Value: Drought vs. No Drought
  misc_feature: MA Experiment ID: 20001757 Result: Down-regulated in Transcription
  misc_feature: MA Experiment 20001757 PARAMETER Experiment Name: At_50mM_NH4NO3_L-to-H_P Parameter: Timepoint (hr) Value: 6
  misc_feature: MA Experiment 20001757 PARAMETER Experiment Name: At_50mM_NH4NO3_L-to-H_P Parameter: Tissue Value: Leaf
  misc_feature: MA Experiment 20001757 PARAMETER Experiment Name: At_50mM_NH4NO3_L-to-H_P Parameter: Treatment Value: 50mM NH4NO3 vs 100mM Mannitol
  misc_feature: MA Experiment ID: 20001904 Result: Up-regulated in Transcription
  misc_feature: MA Experiment 20001904 PARAMETER Experiment Name: At_Drought_Reproduction_P Parameter: Age (day) Value: 37
  misc_feature: MA Experiment 20001904 PARAMETER Experiment Name: At_Drought_Reproduction_P Parameter: Organism Value: A. thaliana
  misc_feature: MA Experiment 20001904 PARAMETER Experiment Name: At_Drought_Reproduction_P Parameter: Plant Line Value: WS
  misc_feature: MA Experiment 20001904 PARAMETER Experiment Name: At_Drought_Reproduction_P Parameter: Timepoint (day) Value: 7
  misc_feature: MA Experiment 20001904 PARAMETER Experiment Name: At_Drought_Reproduction_P Parameter: Tissue Value: Rosettes
  misc_feature: MA Experiment 20001904 PARAMETER Experiment Name: At_Drought_Reproduction_P Parameter: Treatment Value: Drought vs. No Drought
atcatcgacaaaacataaatactaatggagcaccaccaccagcatcaccgtcaccaccaacgcgacgacggagaagacgatcgtcaatcctttggagtaccaccgccacacgtcgatgctccgccacaacctcatggtctttaccagtcacagcctcattttgatccttacgcgcctactcctcaagctccggcgccttaccgatcagaaactcaattcgaaccccacgcgcctccgccttaccgatcagagccttactttgaaactccggcaccaccgccttcatttggtcatgtgagtcatgttggtcaccaatcacccaacgaatcttacccaccggaacaccaccgttacggaggttatcaacagccgtctaattccttactggaaagtcatggagatcacagtggagtcacgcacgtggctcaccatagctcaaatcagccccaatcgtcttctggtgtctaccacaagcctgatgagaatcgtctacctgataatcttgctggactcgccggaagagcaacggtgaaggtgtattccaaggcggagcctaactataatttgacgatcagagatggtaaggttattctcgccccagcggatccatctgatgaagcacagcattggtacaaagacgagaagtatagtactaaagtgaaggacgcagacggtcatccttgttttgctcttgtaaacaaagctactggtgaagcaatgaagcattctgtgggagctactcatcccgtgcatctgattcgatatgtgcctgataagcttgacgagtcagtactatggacagagagcaaggattttggcgatggatatcgcacaataagaatggtaaacaatacgaggctaaacgtggatgcatatcatggtgacagcaaatctggtggtgtacgtgatggcacgactatcgtcctctgggactggaacaaaggcgacaaccagctctggaagatctttcctttctgaaaattggcgtctggagtggtaaaaagttcctttgtgtgtgctgtatgaataagaaagaaacaaaactcagatttattcattgtttgtgtcttgtaaagacttgagtttgtgctgttggcatctgtaatctatcttacttgtattccaagtatgtttttacagatacattacatacactgtctatatgtgtatacttttttcctaatctattttgagatctttctttttcc

SEQ ID NO: 85215 - protein, 317 aa, Arabidopsis thaliana; identical to SEQ ID NO: 24994
  peptide (1)..(317): Ceres Seq. ID no. 12679491
  misc_feature (269)..(317): Pfam Name: QXW lectin repeat Pfam Description: QXW lectin repeat
  misc_feature (1)..(317): Homolog of NCBI NO: 25408635 NR Description: hypothetical protein At2g39050 [imported] -
  misc_feature (1)..(317): Homolog of NCBI NO: 18404934 NR Description: expressed protein; protein id: At2g39050.1, by cDNA: 39558., supported by cDNA: gi_15724196, supported by gi_20147402 [Arabidopsis thaliana]
  misc_feature (82)..(317): Homolog of NCBI NO: 34894060 NR Description: putative r40c1 protein [Oryza sativa (japonica group)] >gi|10697200|dbj|BAB16331.1| putative r40c1 protein
  misc_feature (163)..(317): Homolog of NCBI NO: 7489573 NR Description: r40g3 protein - rice >gi|1658315|emb|CAA70175.1|
  misc_feature (170)..(317): Homolog of NCBI NO: 7489572 NR Description: r40g2 protein - rice (fragment)
  misc_feature (170)..(317): Homolog of NCBI NO: 34394517 NR Description: r40g2 protein [Oryza sativa (japonica
  misc_feature (129)..(317): Homolog of NCBI NO: 7489571 NR Description: r40c1 protein - rice >gi|1296955|emb|CAA64683.1|
  misc_feature (129)..(317): Homolog of NCBI NO: 34902150 NR Description: Putative r40c1 protein - rice [Oryza sativa
  misc_feature (168)..(317): Homolog of NCBI NO: 34902150 NR Description: Putative r40c1 protein - rice [Oryza sativa
  misc_feature (168)..(317): Homolog of NCBI NO: 34394517 NR Description: r40g2 protein [Oryza sativa (japonica

SEQ ID NO: 85216 - DNA, 1533 bp, Arabidopsis thaliana
  misc_feature (1)..(1533): Ceres Seq. ID no. 12679518
  misc_feature: MA Experiment ID: 20000180 Result: Up-regulated in Transcription
  misc_feature: MA Experiment 20000180 PARAMETER Experiment Name: At_Germinating_Seeds_P Parameter: Age (hr) Value: 24 vs. 0
  misc_feature: MA Experiment 20000180 PARAMETER Experiment Name: At_Germinating_Seeds_P Parameter: Tissue Value: Germinating Seeds
  misc_feature: MA Experiment ID: 20000794 Result: Up-regulated in Transcription
  misc_feature: MA Experiment 20000794 PARAMETER Experiment Name: At_Petals_P Parameter: Age (day) Value: 23-25 days
  misc_feature: MA Experiment 20000794 PARAMETER Experiment Name: At_Petals_P Parameter: Plant Line Value: WS
  misc_feature: MA Experiment 20000794 PARAMETER Experiment Name: At_Petals_P Parameter: Tissue Value: Petals vs. Whole plant
atccacattttcttgcttaactgcagaacaacaccaaattcgaccctatcaagttttgattcgtgtctacatagaaagagtctcaattgttctgtccctggacttttttttgtttcgtttttcttgttaagatcgaaaactctgttttggtagatttttgtgttcttgattttgattcaagatggggaggctgtttgtggtgaatcttgaagggaagatctatagctgcaaacactgtaagactcatcttgctacttatgaagacatcatctccaaggttttgtcccttttccaatttcttgacttttctggagattattctaatgggtttgtgattaatctgtttttgttgtttttctgcatgctcctaaaatttgaaatatataatgatagatggttctctagaagatgttgtatgttgataagatgtggttgtatgacttatagaaatacttcaactttcttaacattctttttgttgtgtatttctcttctgcttggaatagggtcatgttatgtagacgagactgttaataaaacccctagatcactttcgaaattttcattttgagttactacattgttgaagtcatggatcagtacttgtattttgcccacttgccattaagcagataatgattacaaccacatagttttgaacattgagctcccctttagctgatcagaccacatagttttgtctttttgattctctctgtggtctaagatggattatctttatgcttcttgagaataacagagagttgagctattgagctttccctgattctgcatttgttgtttcttgagctaagactgtagtgtgttgtgtttttatgtttccttgttcagtcttttcactgcaagcatgggaaagcttatctcttcaataaggtgtaagtgtttcttatttctaaggaatacttgctaaattgggctggcttatctgatgatgattgatctggtttagtgccaatgtttccattggagagactgaagaaagactgatgatgactggtaaacatactgtggctgatattttctgtgtctcgtgtggatcaatcgttggctggaaatacgtaagcaaggcagacatcaaatgttcttaaagaacctatccgtgttcgattctttgggtgttaagttgtatgttctgttttatcaggagactgctcatgagaagaaccagaagtacaaagaaggaaaatcagtgcttgaaaggttttatttccaacatttcaggacttagttatgaattctactagcgtttgatcttgagattgttgtgacagatttaagatatcgggtcctgatgggagcaactattgggtgagtagccatggaaggcatataggtggaagtgatgcagatgatgcttgaatcatctctctctctctctattctctgatttgaccatttcatgtaaatgtaaattattcaacctccattccaatttcttgtaataagactaaccaatactctttcttctcttgacttattatgtctcagtaaataaaaaatctgattctgtct

SEQ ID NO: 85217 - protein, 129 aa, Arabidopsis thaliana
  peptide (1)..(129): Ceres Seq. ID no. 12679519
  misc_feature (1)..(32): Homolog of NCBI NO: 15225631 NR Description: unknown protein; protein id: At2g40110.1, by cDNA: 16208. [Arabidopsis thaliana] >gi|25367152|pir||D84825
  misc_feature (1)..(32): Homolog of NCBI NO: 27923880 NR Description: Yippee-like protein >gi|24745964|dbj|BAC23053.1|
  misc_feature (1)..(32): Homolog of NCBI NO: 28273361 NR Description: putative zinc binding protein [Oryza sativa
  misc_feature (1)..(32): Homolog of NCBI NO: 15232001 NR Description: Yippee-like protein; protein id: At3g08990.1
  misc_feature (1)..(32): Homolog of NCBI NO: 15228759 NR Description: Yippee-like protein; protein id: At3g55890.1, by cDNA: gi_15293034, supported by cDNA: gi_20259292 [Arabidopsis
  misc_feature (1)..(32): Homolog of NCBI NO: 15238881 NR Description: zinc-binding protein-like; protein id:
  misc_feature (1)..(32): Homolog of NCBI NO: 18399156 NR Description: expressed protein; protein id: At3g11230.1,
  misc_feature (1)..(32): Homolog of NCBI NO: 21617953 NR Description: yippee-like protein [Arabidopsis thaliana]
  misc_feature (1)..(53): Homolog of NCBI NO: 32402994 NR Description: hypothetical protein [Neurospora crassa]
  misc_feature (12)..(32): Homolog of NCBI NO: 31201993 NR Description: ENSANGP00000019801 [Anopheles gambiae]
MGRLFVVNLEGKIYSCKHCKTHLATYEDIISKVLSLFQFLDFSGDYSNGFVINLFLLFFCMLLKFEIYNDRWFSRRCCMLIRCGCMTYRNTSTFLTFFLLCISLLLGIGSCYVDETVNKTPRSLSKFSF

SEQ ID NO: 85218 - protein, 69 aa, Arabidopsis thaliana
  peptide (1)..(69): Ceres Seq. ID no. 12679520
MLLKFEIYNDRWFSRRCCMLIRCGCMTYRNTSTFLTFFLLCISLLLGIGSCYVDETVNKTPRSLSKFSF

SEQ ID NO: 85219 - DNA, 1211 bp, Arabidopsis thaliana
  misc_feature (1)..(1211): Ceres Seq. ID no. 12679521
  misc_feature: MA Experiment ID: 20000184 Result: Up-regulated in Transcription
  misc_feature: MA Experiment 20000184 PARAMETER Experiment Name: At_Shoots__P Parameter: Age (day) Value: 7
  misc_feature: MA Experiment 20000184 PARAMETER Experiment Name: At_Shoots__P Parameter: Tissue Value: Shoots vs. Whole Plant
ggactcggactctctctctagtctctatatatatttatgcaattcccggaaaatctgttttttttttctttctctattgtcatcaacacactaaccaaaccatgaaccgtaatcaacacaaaccaatgtttgttacattcctcatcaatattcttctcctccaacttctaaaccttaccaatgcatcaccatccccaccaataacagccctatacgccttcggcgactccacagtggactccggtaacaacaattacattcccactcttttccagagcaaccatcctccctatggtaaatcctttccgtccaaactctccaccggaaggttctccgacggaaaactcgccaccgacttcatagtctcctctctaggactcaaacccactctaccagcttacctcaacccttcggtcaaacctgtagatcttttgaccggcgttagtttcgcctcggccggaggtggtttagatgatcggacggcaaagtcatcattgactattaccatggacaagcaatggagttacttcgaagaggcgctgggtaaaatgaagagtttggttggagactcggagactaatcgggtgattaagaatgctgtgttcgtcattagtgcggggactaatgatatgatctttaatgtttacgatcatgttcttgggagtttgatctccgtttcggattatcaagattctctactaaccaaagtcgaagtttttgtccagagactatacgaggcaggagcacgaaggattacaatagctggactaccaccaatcggatgccttccggtgcaagtaacacttactagcatcaatactcctcgcatcttccatcatcggatctgtacggaacatcagaacgatgattctcgggtttacaatcaaaagctacagaagctaatcttcggtctcagtcagaggtttcgaggttccaaagttctttaccttgatatctactctccgttaatagacatgatcaaacatcctcgtaaatacggactagaggaaacattgagaggatgttgtgggacagggctacttgaggcaggacctctatgccaaccattgtctcggacttgtgacgatgtttccaagtatttattctttgattctgtgcatccttcacagacggcttattctgtcatcgctagtttcgccttacaaaaattgtttcctctcctctaatttattatttttatttacaagact

SEQ ID NO: 85220 - protein, 394 aa, Arabidopsis thaliana
  peptide (1)..(394): Ceres Seq. ID no. 12679522
  misc_feature (70)..(386): Pfam Name: GDSL-like Lipase/Acylhydrolase Pfam Description: GDSL-like Lipase/Acylhydrolase
  misc_feature (34)..(394): Homolog of NCBI NO: 15225668 NR Description: putative GDSL-motif lipase hydrolase; protein id:
  misc_feature (42)..(394): Homolog of NCBI NO: 4587999 NR Description: hypothetical APG protein [Arabidopsis thaliana]
  misc_feature (40)..(394): Homolog of NCBI NO: 21537117 NR Description: putative GDSL-motif lipase/hydrolase [Arabidopsis
  misc_feature (40)..(384): Homolog of NCBI NO: 15225096 NR Description: putative GDSL-motif lipase/hydrolase; protein id:
  misc_feature (40)..(384): Homolog of NCBI NO: 21592974 NR Description: proline-rich protein, putative [Arabidopsis
  misc_feature (55)..(394): Homolog of NCBI NO: 18390708 NR Description: expressed protein; protein id: At1g06990.1,
  misc_feature (55)..(394): Homolog of NCBI NO: 25336267 NR Description: hypothetical protein [imported] - Arabidopsis
  misc_feature (40)..(385): Homolog of NCBI NO: 15227734 NR Description: putative GDSL-motif lipase/hydrolase; protein id:
  misc_feature (40)..(384): Homolog of NCBI NO: 15217963 NR Description: proline-rich protein, putative; protein id:
  misc_feature (40)..(384): Homolog of NCBI NO: 25336283 NR Description: hypothetical protein RXF26 [imported] -
TRTLSLVSIYIYAIPGKSVFFFFLYCHQHTNQTMNRNQHKPMFVTFLINILLLQLLNLTNASPSPPITALYAFGDSTVDSGNNNYIPTLFQSNHPPYGKSFPSKLSTGRFSDGKLATDFIVSSLGLKPTLPAYLNPSVKPVDLLTGVSFASAGGGLDDRTAKSSLTITMDKQWSYFEEALGKMKSLVGDSETNRVIKNAVFVISAGTNDMIFNVYDHVLGSLISVSDYQDSLLTKVEVFVQRLYEAGARRITIAGLPPIGCLPVQVTLTSINTPRIFHHRICTEHQNDDSRVYNQKLQKLIFGLSQRFRGSKVLYLDIYSPLIDMIKHPRKYGLEETLRGCCGTGLLEAGPLCQPLSRTCDDVSKYLFFDSVHPSQTAYSVIASFALQKLFPLL

SEQ ID NO: 85221 - protein, 361 aa, Arabidopsis thaliana; identical to SEQ ID NO: 36696
  peptide (1)..(361): Ceres Seq. ID no. 12679523
  misc_feature (37)..(353): Pfam Name: GDSL-like Lipase/Acylhydrolase Pfam Description: GDSL-like Lipase/Acylhydrolase
  misc_feature (1)..(361): Homolog of NCBI NO: 15225668 NR Description: putative GDSL-motif lipase hydrolase; protein id:
  misc_feature (9)..(361): Homolog of NCBI NO: 4587999 NR Description: hypothetical APG protein [Arabidopsis thaliana]
  misc_feature (7)..(361): Homolog of NCBI NO: 21537117 NR Description: putative GDSL-motif lipase/hydrolase [Arabidopsis
  misc_feature (7)..(351): Homolog of NCBI NO: 15225096 NR Description: putative GDSL-motif lipase/hydrolase; protein id:
  misc_feature (7)..(351): Homolog of NCBI NO: 21592974 NR Description: proline-rich protein, putative [Arabidopsis
  misc_feature (22)..(361): Homolog of NCBI NO: 18390708 NR Description: expressed protein; protein id: At1g06990.1,
  misc_feature (22)..(361): Homolog of NCBI NO: 25336267 NR Description: hypothetical protein [imported] - Arabidopsis
  misc_feature (7)..(352): Homolog of NCBI NO: 15227734 NR Description: putative GDSL-motif lipase/hydrolase; protein id:
  misc_feature (7)..(351): Homolog of NCBI NO: 15217963 NR Description: proline-rich protein, putative; protein id:
  misc_feature (7)..(351): Homolog of NCBI NO: 25336283 NR Description: hypothetical protein RXF26 [imported] -

SEQ ID NO: 85222 - protein, 353 aa, Arabidopsis thaliana; identical to SEQ ID NO: 36697
  peptide (1)..(353): Ceres Seq. ID no. 12679524
  misc_feature (29)..(345): Pfam Name: GDSL-like Lipase/Acylhydrolase Pfam Description: GDSL-like Lipase/Acylhydrolase
  misc_feature (1)..(353): Homolog of NCBI NO: 15225668 NR Description: putative GDSL-motif lipase hydrolase; protein id:
  misc_feature (1)..(353): Homolog of NCBI NO: 4587999 NR Description: hypothetical APG protein [Arabidopsis thaliana]
  misc_feature (1)..(353): Homolog of NCBI NO: 21537117 NR Description: putative GDSL-motif lipase/hydrolase [Arabidopsis
  misc_feature (1)..(343): Homolog of NCBI NO: 15225096 NR Description: putative GDSL-motif lipase/hydrolase; protein id:
  misc_feature (1)..(343): Homolog of NCBI NO: 21592974 NR Description: proline-rich protein, putative [Arabidopsis
  misc_feature (14)..(353): Homolog of NCBI NO: 18390708 NR Description: expressed protein; protein id: At1g06990.1,
  misc_feature (14)..(353): Homolog of NCBI NO: 25336267 NR Description: hypothetical protein [imported] - Arabidopsis
  misc_feature (1)..(344): Homolog of NCBI NO: 15227734 NR Description: putative GDSL-motif lipase/hydrolase; protein id:
  misc_feature (1)..(343): Homolog of NCBI NO: 15217963 NR Description: proline-rich protein, putative; protein id:
  misc_feature (1)..(343): Homolog of NCBI NO: 25336283 NR Description: hypothetical protein RXF26 [imported] -

SEQ ID NO: 85223 - DNA, 1418 bp, Arabidopsis thaliana
  misc_feature (1)..(1418): Ceres Seq. ID no. 12679541
  misc_feature: MA Experiment ID: 20000184 Result: Down-regulated in Transcription
  misc_feature: MA Experiment 20000184 PARAMETER Experiment Name: At_Shoots__P Parameter: Age (day) Value: 7
  misc_feature: MA Experiment 20000184 PARAMETER Experiment Name: At_Shoots__P Parameter: Tissue Value: Shoots vs. Whole Plant
  misc_feature: MA Experiment ID: 20000234 Result: Up-regulated in Transcription
  misc_feature: MA Experiment 20000234 PARAMETER Experiment Name: At_Siliques_P Parameter: Age (day) Value: 21
  misc_feature: MA Experiment 20000234 PARAMETER Experiment Name: At_Siliques_P Parameter: Organism Value: A. thaliana
  misc_feature: MA Experiment 20000234 PARAMETER Experiment Name: At_Siliques_P Parameter: Plant Line Value: WS
  misc_feature: MA Experiment 20000234 PARAMETER Experiment Name: At_Siliques_P Parameter: Tissue Value: Less Than 5mm Siliques vs. Whole Plant
  misc_feature: MA Experiment ID: 20000235 Result: Up-regulated in Transcription
  misc_feature: MA Experiment 20000235 PARAMETER Experiment Name: At_Siliques_P Parameter: Age (day) Value: 21
  misc_feature: MA Experiment 20000235 PARAMETER Experiment Name: At_Siliques_P Parameter: Organism Value: A. thaliana
  misc_feature: MA Experiment 20000235 PARAMETER Experiment Name: At_Siliques_P Parameter: Plant Line Value: WS
  misc_feature: MA Experiment 20000235 PARAMETER Experiment Name: At_Siliques_P Parameter: Tissue Value: 5-10mm Siliques vs. Whole Plant
  misc_feature: MA Experiment ID: 20000265 Result: Up-regulated in Transcription
  misc_feature: MA Experiment 20000265 PARAMETER Experiment Name: At_Open_Flower_P Parameter: Age (day) Value: 21
  misc_feature: MA Experiment 20000265 PARAMETER Experiment Name: At_Open_Flower_P Parameter: Plant Line Value: WS
  misc_feature: MA Experiment 20000265 PARAMETER Experiment Name: At_Open_Flower_P Parameter: Tissue Value: Closed Flower vs. Whole Plant
  misc_feature: MA Experiment ID: 20000286 Result: Up-regulated in Transcription
  misc_feature: MA Experiment 20000286 PARAMETER Experiment Name: At_Open_Flower_P Parameter: Age (day) Value: 21
  misc_feature: MA Experiment 20000286 PARAMETER Experiment Name: At_Open_Flower_P Parameter: Plant Line Value: WS
  misc_feature: MA Experiment 20000286 PARAMETER Experiment Name: At_Open_Flower_P Parameter: Tissue Value: Half Open vs. Whole Plant
  misc_feature: MA Experiment ID: 20000794 Result: Up-regulated in Transcription
  misc_feature: MA Experiment 20000794 PARAMETER Experiment Name: At_Petals_P Parameter: Age (day) Value: 23-25 days
  misc_feature: MA Experiment 20000794 PARAMETER Experiment Name: At_Petals_P Parameter: Plant Line Value: WS
  misc_feature: MA Experiment 20000794 PARAMETER Experiment Name: At_Petals_P Parameter: Tissue Value: Petals vs. Whole plant
  misc_feature: MA Experiment ID: 20001773 Result: Up-regulated in Transcription
  misc_feature: MA Experiment 20001773 PARAMETER Experiment Name: At_Far-red-enriched-adult_P Parameter: Age (day) Value: 30
  misc_feature: MA Experiment 20001773 PARAMETER Experiment Name: At_Far-red-enriched-adult_P Parameter: Light Value: Far-red enriched vs. White
  misc_feature: MA Experiment 20001773 PARAMETER Experiment Name: At_Far-red-enriched-adult_P Parameter: Organism Value: A. thaliana
  misc_feature: MA Experiment 20001773 PARAMETER Experiment Name: At_Far-red-enriched-adult_P Parameter: Plant Line Value: Columbia
  misc_feature: MA Experiment 20001773 PARAMETER Experiment Name: At_Far-red-enriched-adult_P Parameter: Timepoint (hr) Value: 48
  misc_feature: MA Experiment 20001773 PARAMETER Experiment Name: At_Far-red-enriched-adult_P Parameter: Tissue Value: Aerial
  misc_feature: MA Experiment ID: 20001910 Result: Up-regulated in Transcription
  misc_feature: MA Experiment 20001910 PARAMETER Experiment Name: At_Drought_Reproduction_P Parameter: Age (day) Value: 37
  misc_feature: MA Experiment 20001910 PARAMETER Experiment Name: At_Drought_Reproduction_P Parameter: Organism Value: A. thaliana
  misc_feature: MA Experiment 20001910 PARAMETER Experiment Name: At_Drought_Reproduction_P Parameter: Plant Line Value: WS
  misc_feature: MA Experiment 20001910 PARAMETER Experiment Name: At_Drought_Reproduction_P Parameter: Timepoint (day) Value: 7
  misc_feature: MA Experiment 20001910 PARAMETER Experiment Name: At_Drought_Reproduction_P Parameter: Tissue Value: Flowers
  misc_feature: MA Experiment 20001910 PARAMETER Experiment Name: At_Drought_Reproduction_P Parameter: Treatment Value: Drought vs. No Drought
atgattggaaaagttgtggtctcggtggcctccatcctcttaatagtcggagttgccataggagtcgttgccttcataaacaaaaatggcgatgctaatctgtctccccaaatgaaagcggttcaaggaatttgccagtcgacatccgacaaagcctcatgtgtcaaaactctcgagccggtcaagagcgaggacccaaacaagctgatcaaggctttcatgctcgctacaaaagacgaattaaccaaatcgtctaacttcacgggtcaaaccgaagtaaacatgggctcgagcatctcgccaaacaacaaagccgttcttgattactgcaagagagttttcatgtacgctcttgaggatctcgctaccattattgaagaaatgggtgaagatcttagccagatcgggagcaaaatcgaccagctcaaacaatggttaatcggtgtttacaattaccaaactgattgtcttgacgatatcgaagaagatgatttaagaaaggcgattggtgagggcattgcaaactccaagattctcactaccaacgctattgacatcttccacactgtcgttagcgccatggccaagattaacaacaaggttgacgacttgaagaacatgacaggcggaatccccactcccggagcccctcctgttgttgatgaatctcccgtggccgacccagatggtcctgctcgtcgtcttcttgaagacattgacgagaccggaatcccaacatgggtttcaggtgctgacaggaagctcatggctaaggctggacgtggccgtagaggcggccgcggaggcggtgctagggtcagaacgaactttgtggtggctaaggatggaagcggacagtttaagacggttcaacaagccgttgatgcttgtcctgagaataaccgaggccgatgcatcatctacatcaaggccggtctctacagagagcaagtaatcatccctaagaagaagaacaacatcttcatgtttggagatggtgcaagaaagaccgtcatttcttacaacagaagtgttgctctcagccgtggaaccaccacatccctcagtgccacagttcaggttgaatcggaaggattcatggcgaaatggatgggattcaagaacaccgccggtccaatgggacaccaagccgcggctatccgagtgaacggagaccgtgccgtgatcttcaactgcagattcgacggttatcaagacacattgtacgttaacaacggtcgtcagttctacagaaactgtgtggtctcgggaacagtagacttcatcttcggcaaatccgcaaccgtgatccaaaacacactaattgttgtccgtaaaggaagcaagggacaatacaacacggtcacagccgatggaaacgaattgggcttagggatgaaaattggtgtatgaaattg

SEQ ID NO: 85224 - protein, 470 aa, Arabidopsis thaliana
  peptide (1)..(470): Ceres Seq. ID no. 12679542
  misc_feature (276)..(470): Pfam Name: Pectinesterase Pfam Description: Pectinesterase
  misc_feature (1)..(470): Homolog of NCBI NO: 23197964 NR Description: putative pectinesterase [Arabidopsis thaliana]
  misc_feature (1)..(470): Homolog of NCBI NO: 15226482 NR Description: pectinesterase family; protein id: At2g47030.1, by cDNA: 40043., supported by cDNA: gi_15450764 [Arabidopsis >gi|7447387|pir||T02184 probable pectinesterase At2g47030
  misc_feature (1)..(470): Homolog of NCBI NO: 25313439 NR Description: pectinesterase (EC 3.1.1.11) precursor,
  misc_feature (1)..(470): Homolog of NCBI NO: 25313437 NR Description: pectinesterase (EC 3.1.1.11) [imported] - thaliana >gi|6093122|emb|CAB58974.1| pectin methylesterase
  misc_feature (1)..(470): Homolog of NCBI NO: 15226490 NR Description: pectinesterase family; protein id: At2g47040.1, by cDNA: gi_20147200 [Arabidopsis thaliana]
  misc_feature (2)..(470): Homolog of NCBI NO: 15228697 NR Description: pollen-specific pectin esterase, putative; id: At3g62170.1, supported by cDNA: 112346., supported by cDNA:
  misc_feature (2)..(470): Homolog of NCBI NO: 1172538 NR Description: Probable pectinesterase precursor (Pectin
  misc_feature (13)..(470): Homolog of NCBI NO: 6093741 NR Description: Pectinesterase (Pectin methylesterase) (PE)
  misc_feature (2)..(214): Homolog of NCBI NO: 7488527 NR Description: pectin esterase homolog, pollen-specific - turnip
  misc_feature (233)..(459): Homolog of NCBI NO: 7447384 NR Description: pectin methylesterase-like protein - maize
MIGKVVVSVASILLIVGVAIGVVAFINKNGDANLSPQMKAVQGICQSTSDKASCVKTLEPVKSEDPNKLIKAFMLATKDELTKSSNFTGQTEVNMGSSISPNNKAVLDYCKRVFMYALEDLATIIEEMGEDLSQIGSKIDQLKQWLIGVYNYQTDCLDDIEEDDLRKAIGEGIANSKILTTNAIDIFHTVVSAMAKINNKVDDLKNMTGGIPTPGAPPVVDESPVADPDGPARRLLEDIDETGIPTWVSGADRKLMAKAGRGRRGGRGGGARVRTNFVVAKDGSGQFKTVQQAVDACPENNRGRCIIYIKAGLYREQVIIPKKKNNIFMFGDGARKTVISYNRSVALSRGTTTSLSATVQVESEGFMAKWMGFKNTAGPMGHQAAAIRVNGDRAVIFNCRFDGYQDTLYVNNGRQFYRNCVVSGTVDFIFGKSATVIQNTLIVVRKGSKGQYNTVTADGNELGLGMKIGV

SEQ ID NO: 85225 - protein, 433 aa, Arabidopsis thaliana
  peptide (1)..(433): Ceres Seq. ID no. 12679543
  misc_feature (239)..(433): Pfam Name: Pectinesterase Pfam Description: Pectinesterase
  misc_feature (1)..(433): Homolog of NCBI NO: 23197964 NR Description: putative pectinesterase [Arabidopsis thaliana]
  misc_feature (1)..(433): Homolog of NCBI NO: 15226482 NR Description: pectinesterase family; protein id: At2g47030.1, by cDNA: 40043., supported by cDNA: gi_15450764 [Arabidopsis >gi|7447387|pir||T02184 probable pectinesterase At2g47030
  misc_feature (1)..(433): Homolog of NCBI NO: 25313439 NR Description: pectinesterase (EC 3.1.1.11) precursor,
  misc_feature (1)..(433): Homolog of NCBI NO: 25313437 NR Description: pectinesterase (EC 3.1.1.11) [imported] - thaliana >gi|6093122|emb|CAB58974.1| pectin methylesterase
  misc_feature (1)..(433): Homolog of NCBI NO: 15226490 NR Description: pectinesterase family; protein id: At2g47040.1, by cDNA: gi_20147200 [Arabidopsis thaliana]
  misc_feature (1)..(433): Homolog of NCBI NO: 15228697 NR Description: pollen-specific pectin esterase, putative; id: At3g62170.1, supported by cDNA: 112346., supported by cDNA:
  misc_feature (1)..(433): Homolog of NCBI NO: 1172538 NR Description: Probable pectinesterase precursor (Pectin
  misc_feature (1)..(433): Homolog of NCBI NO: 6093741 NR Description: Pectinesterase (Pectin methylesterase) (PE)
  misc_feature (1)..(177): Homolog of NCBI NO: 7488527 NR Description: pectin esterase homolog, pollen-specific - turnip
  misc_feature (196)..(422): Homolog of NCBI NO: 7447384 NR Description: pectin methylesterase-like protein - maize
MKAVQGICQSTSDKASCVKTLEPVKSEDPNKLIKAFMLATKDELTKSSNFTGQTEVNMGSSISPNNKAVLDYCKRVFMYALEDLATIIEEMGEDLSQIGSKIDQLKQWLIGVYNYQTDCLDDIEEDDLRKAIGEGIANSKILTTNAIDIFHTVVSAMAKINNKVDDLKNMTGGIPTPGAPPVVDESPVADPDGPARRLLEDIDETGIPTWVSGADRKLMAKAGRGRRGGRGGGARVRTNFVVAKDGSGQFKTVQQAVDACPENNRGRCIIYIKAGLYREQVIIPKKKNNIFMFGDGARKTVISYNRSVALSRGTTTSLSATVQVESEGFMAKWMGFKNTAGPMGHQAAAIRVNGDRAVIFNCRFDGYQDTLYVNNGRQFYRNCVVSGTVDFIFGKSATVIQNTLIVVRKGSKGQYNTVTADGNELGLGMKIGV

SEQ ID NO: 85226 - protein, 397 aa, Arabidopsis thaliana
  peptide (1)..(397): Ceres Seq. ID no. 12679544
  misc_feature (203)..(397): Pfam Name: Pectinesterase Pfam Description: Pectinesterase
  misc_feature (1)..(397): Homolog of NCBI NO: 23197964 NR Description: putative pectinesterase [Arabidopsis thaliana]
  misc_feature (1)..(397): Homolog of NCBI NO: 15226482 NR Description: pectinesterase family; protein id: At2g47030.1, by cDNA: 40043., supported by cDNA: gi_15450764 [Arabidopsis >gi|7447387|pir||T02184 probable pectinesterase At2g47030
  misc_feature (1)..(397): Homolog of NCBI NO: 25313439 NR Description: pectinesterase (EC 3.1.1.11) precursor,
  misc_feature (1)..(397): Homolog of NCBI NO: 25313437 NR Description: pectinesterase (EC 3.1.1.11) [imported] - thaliana >gi|6093122|emb|CAB58974.1| pectin methylesterase
  misc_feature (1)..(397): Homolog of NCBI NO: 15226490 NR Description: pectinesterase family; protein id: At2g47040.1, by cDNA: gi_20147200 [Arabidopsis thaliana]
  misc_feature (1)..(397): Homolog of NCBI NO: 15228697 NR Description: pollen-specific pectin esterase, putative; id: At3g62170.1, supported by cDNA: 112346., supported by cDNA:
  misc_feature (1)..(397): Homolog of NCBI NO: 1172538 NR Description: Probable pectinesterase precursor (Pectin
  misc_feature (1)..(397): Homolog of NCBI NO: 6093741 NR Description: Pectinesterase (Pectin methylesterase) (PE)
  misc_feature (1)..(141): Homolog of NCBI NO: 7488527 NR Description: pectin esterase homolog, pollen-specific - turnip
  misc_feature (160)..(386): Homolog of NCBI NO: 7447384 NR Description: pectin methylesterase-like protein - maize
MLATKDELTKSSNFTGQTEVNMGSSISPNNKAVLDYCKRVFMYALEDLATIIEEMGEDLSQIGSKIDQLKQWLIGVYNYQTDCLDDIEEDDLRKAIGEGIANSKILTTNAIDIFHTVVSAMAKINNKVDDLKNMTGGIPTPGAPPVVDESPVADPDGPARRLLEDIDETGIPTWVSGADRKLMAKAGRGRRGGRGGGARVRTNFVVAKDGSGQFKTVQQAVDACPENNRGRCIIYIKAGLYREQVIIPKKKNNIFMFGDGARKTVISYNRSVALSRGTTTSLSATVQVESEGFMAKWMGFKNTAGPMGHQAAAIRVNGDRAVIFNCRFDGYQDTLYVNNGRQFYRNCVVSGTVDFIFGKSATVIQNTLIVVRKGSKGQYNTVTADGNELGLGMKIGV

SEQ ID NO: 85227 - DNA, 5221 bp, Arabidopsis thaliana
  misc_feature (1)..(5221): Ceres Seq. ID no. 12679557
  misc_feature: MA Experiment ID: 20000184 Result: Down-regulated in Transcription
  misc_feature: MA Experiment 20000184 PARAMETER Experiment Name: At_Shoots__P Parameter: Age (day) Value: 7
  misc_feature: MA Experiment 20000184 PARAMETER Experiment Name: At_Shoots__P Parameter: Tissue Value: Shoots vs. Whole Plant
  misc_feature: MA Experiment ID: 20000794 Result: Up-regulated in Transcription
  misc_feature: MA Experiment 20000794 PARAMETER Experiment Name: At_Petals_P Parameter: Age (day) Value: 23-25 days
  misc_feature: MA Experiment 20000794 PARAMETER Experiment Name: At_Petals_P Parameter: Plant Line Value: WS
  misc_feature: MA Experiment 20000794 PARAMETER Experiment Name: At_Petals_P Parameter: Tissue Value: Petals vs. Whole plant
  misc_feature: MA Experiment ID: 20001451 Result: Down-regulated in Transcription
  misc_feature: MA Experiment 20001451 PARAMETER Experiment Name: At_Far-red-induction_P Parameter: Age (day) Value: 7
  misc_feature: MA Experiment 20001451 PARAMETER Experiment Name: At_Far-red-induction_P Parameter: Light Value: Far-red vs. White
  misc_feature: MA Experiment 20001451 PARAMETER Experiment Name: At_Far-red-induction_P Parameter: Organism Value: A. thaliana
  misc_feature: MA Experiment 20001451 PARAMETER Experiment Name: At_Far-red-induction_P Parameter: Plant Line Value: Columbia
  misc_feature: MA Experiment 20001451 PARAMETER Experiment Name: At_Far-red-induction_P Parameter: Timepoint (hr) Value: 24
  misc_feature: MA Experiment 20001451 PARAMETER Experiment Name: At_Far-red-induction_P Parameter: Tissue Value: Whole Plant
  misc_feature: MA Experiment ID: 20001905 Result: Up-regulated in Transcription
  misc_feature: MA Experiment 20001905 PARAMETER Experiment Name: At_Drought_Reproduction_P Parameter: Age (day) Value: 40
  misc_feature: MA Experiment 20001905 PARAMETER Experiment Name: At_Drought_Reproduction_P Parameter: Organism Value: A. thaliana
  misc_feature: MA Experiment 20001905 PARAMETER Experiment Name: At_Drought_Reproduction_P Parameter: Plant Line Value: WS
  misc_feature: MA Experiment 20001905 PARAMETER Experiment Name: At_Drought_Reproduction_P Parameter: Timepoint (day) Value: 10
  misc_feature: MA Experiment 20001905 PARAMETER Experiment Name: At_Drought_Reproduction_P Parameter: Tissue Value: Rosettes
  misc_feature: MA Experiment 20001905 PARAMETER Experiment Name: At_Drought_Reproduction_P Parameter: Treatment Value: Drought vs. No Drought
attctcaaatttgtattttccagattttccagaaaaatctcacagcggtaagaaaaaaagaaaaagaagagtcagtggtcttgttgtttcgttcttccttgttcgctcgacctggccgatgtctaaccaggaccaggagacgcgcacacaattcgcagaatgtaacgttgttgctactcttcttctctcgtttctgtgacctaagaaccattcgaattcgctgctccgtctctctggtttcgtccttgaaaaatcgtctactcgagattcctttctctagccacccatctcaactgctgagtagcaagctgtatttttgttgacctaactaaaccctagcttcttcgagtggcatttttttgacgagtgcttctcttccttatcatggactggatacacaaatctactccttttatggaaccttcgaatttggcaaaactggttcaaggaaatgttcctcttcagccacatgacagccattcttcgctaactgatctagatatggaccttagagaagtctatttcctgattttacattttctttctattggcccctgcgaacgaacctttggccacttgagagacgaaattttggaaaaagggcttttaccccgtagatatcattcctggtggtcaagaagtggcatttatagcgggcgtgctgatgatgatggcatctccctccccttgagttatgataatttgatagagaggtatcctcatatcgaaaaggatcacttggtgaagcttctcaaacaactaattttaaacccgtctttcccttcacacatgagagttgaaggaaatgctcctaatgctgctgatgttccaacactattgggatctggcaccttttcacttgtggatcgtagtaacaatatagagtctcagaaagctaggcatgttgcgtcatacttacgctggccgcatatgcatgccgatcaagtgcgtggcctaagtctcagagaaattggaggaggtttcaggaaacaccaccgtgctccgtccattctttcagcatgtcatgctattgcaaaaccatcaacaatggttcaaaagatgcaaaatataaagaagctcagaggacatcgtaatgctgtctactgcgctatatttgatcgttctggaagatatgttatcactggctccgatgaccggcttgtcaaaatttggtcaatggaaactgcgctttgcttggctagctgccgtgggcatgaaggtgacattacagacttggccgttagttcaaacaatgctttggttgcttcagcttcaaacgattttgtgattcgagtgtggcggttgcctgatggaatgccaatttctgtattgcggggacacactggagctgttaccgcaattgcattcagtcccagacaggcgtctgtttaccaacttttatcgtcatcagatgatggaacctgtcgtatctgggatgctaggtattctcagtggctcccacgaatctatgttccaagtccttcagatgctaacactggatccacgagcaatgcatctcagagtcatcaaatattatgttgtgcatacaatgctaatggaaccattttcgtcacgggtagctctgacagcaatgcaagggtttggagtgcctcaaaacctaacttggatgatgctgaacagccgactcatgagctggatgttctacggggccatgagaatgatgtcaactatgtgcaatttagtggttgtgctgtggctccaaaatcttcaacagctgatgctctgaaggaagatagctacccaaagtttaagaattcctggttttgtcatgacaatatagtaacctgctctcgcgatggtagtgcaattatatggactccaagatcacgtaaattccatgggaaatctggacgctggatgaaaggatatcatctgaaggttccacctcctccacttcctccacaacctcctcgaggaggcccacgtcaaaggtttcttccaacaccacggggtgttaatatgattatatggagcttggataatcgttttgtacttgccgctatcatggattgcaggatttgtgtttggaatgctgctgatggtagcttagtgcattgtttaactggtcacagtgaatcgtcttatgtcttggatgtccatcctttcaatcctcggattgctatgagcgctggctatgatgggaaaacaatcatctgggatatatgggagggtataccaatcaaagtgtacgaaatcgggagatttaagttggttgatggaaagttttcacaagatgggacatctattgtgctttcagatgatgttggccagatatattttctaaacacaggacaaggagagtctcaaaagaatgcaaaatacgaccagttcttccttggtgattatcgtcctcttattcgagataccaatggacatgttcttgatcaggagacgcagctacttcctcatcggaggaaccttcaggatcttctttgtgattcaagtatgattccgtatccagaacctgaccagacaatgtttcagcaacgcagacttggtgcattaggagttgaatggcgtccttcctcgataaagttttctgttggccctgattttagtttaggtcaagattatataatgcctcctttggctgatctggatagactgattgagccattgcctgagtttatagatgctatgtactgggaaccagaacacgaagttctgagtgacgacaatgattcagagtataatgctgaagtttcctctgatggggctagggcaagcccatgttccaactcttcaaatgaacttgagtgcagctccgaggacagtgacgttgaaaatattcacgaaagtagctatcattggaaaagaagaagaaaacatcctaaggtcaacgtctctacttcatctggaagacgtgataagaggattttggatgagaatgatagctcgaattctggaattaagagaaccaagaaccgaagaattgtcgtgaaggcttcaaaaagaaaacattctgatgtcaaagcatcacggccgcagagagcagcagctcaaaatgctcgatccttgctttctaaaatttctggaagctcttcggatgaagttgatgatgataatgattcatccaacagtgaatctgatagaagcatacccactttgcgacagttggacaaaccatctcagatgctggaatctctttcaaatgacaaacagaagaaaagattgattgtaaagatctctgttaagaagccagcagagtctatgggaagcaagggagatgtgataaatcaggctgatttagagcaactatcttccaaacctttggaggagaatcacagagtgattggtatatattccagagaacccgggtcaagttctgtagatgcaaaaggtgattcagggtgtcagagtattccctactctatgaatacgccacagagagaaaaggccgataatcagttgataagatcttcagatcaagaccagaatatgtgcaagtggagggaagagattcctgtttgtgaacctaccgaattaactgcgcctgagaacatagaagaagcccaaccattttatggggatgaagctgatgagattcttccaaagaaagttcgacgactgaggttaaagcttcggcatcccaacagtcctcgaaaactagaacctgatgaggtggcagatgatttggcagatggtggagatgggtttgcatccatagctccctctttcatgaatccgattatggattctgaacctgtgatagatagcgttagagattcttctgcacataactttgagtttggagaagctacagctgatgtgatacgtaggaaaagatccataagaagtgaatctagtacaagaaatagcgcattacgcataaggttgggctctggatctgtagacaaaataaagaaacaagggattccttccacaagcgtgtatgatgatgcatcacttgaagaatggccttctacctcaaaagctgggtccaggtctagatctgcaagcgtcagcaaaccaagtcttcatactgggataaggttgaatagtgtctcaggaaaaatctcatggttattgttgtctgaacacgaggaaggctgccgttatatacctcagctaggggatgaagttatttacttcaagcagggtcatcaagagttccttaaaactaaagaattaaatgacagggaccgatcaaggtaccttccccgaaacctaggagcagtagagatttgcaaagtcgagaaacttaactatgatacatatcctggttctggagatagctgctgcaaaatgaccctcagggttctggattcttcttcatcacatgcctcccgcaaagagtttcaactgacacttcctgagctcattaatttccctgattttattgtggagaagactcgatacgacgctgcaattcaaacaaactggaaaattggtaatgagtgccgtgtgtggtggagagacgcaaccggtgaaggcggggcttggtgggaaggtaggattgagtcttcacaagtaaaatccactgacttcccagagagtccatgggaaagatacagagttgtctatgaaacaggggaaacgagtcttcacagcccgtgggagtttgacaatcccgagtttccctgggaaaaatctaccatcgaagatgagagaagagagaaactgctttcattatttgctggactagtaaaatcaatcagcaagcatcaggatagttacgggatccaaaagctaaacgaagcagctcaaaagatggatttctgcaataggttcccggttccattataccctgagctgattcacgaaagactagagaatcagtactacagaagtattgaatcgtttaaacacgacgtggatgcaatgctctcaaatgcggagttgtatttcgttagaagtgcacatatgctttcgaagataaagcgactgcgagataaattgacaaaaacgttaagaaagctgatctgaggataaggcaacaccggtatgcttcttttggtcctttcttgatcttgtaaacacgttaggctgcggcagttttttcattatatagcgaagagagtgttaaaaagaaaatttaaaagttttcactctaaacaaaagaagtcggttttgtttgtagtaacccgacacaggtttcatgtatagttttagtaccacatgtctgtaaccgaaatttactctgttgtcacaaaaatgacatcataagtctaattttattacaagaagattattatcattt

SEQ ID NO: 85228 - protein, 1520 aa, Arabidopsis thaliana
  peptide (1)..(1520): Ceres Seq. ID no. 12679558
  misc_feature (422)..(485): Pfam Name: WD domain, G-beta repeat Pfam Description: WD domain, G-beta repeat
  misc_feature (1)..(407): Homolog of NCBI NO: 20196881 NR Description: hypothetical protein [Arabidopsis thaliana]
  misc_feature (550)..(675): Homolog of NCBI NO: 20196881 NR Description: hypothetical protein [Arabidopsis thaliana]
  misc_feature (276)..(1050): Homolog of NCBI NO: 17976802 NR Description: WD repeat domain 11 protein [Mus musculus]
  misc_feature (1230)..(1411): Homolog of NCBI NO: 17976802 NR Description: WD repeat domain 11 protein [Mus musculus]
  misc_feature (41)..(133): Homolog of NCBI NO: 17976802 NR Description: WD repeat domain 11 protein [Mus musculus]
  misc_feature (276)..(938): Homolog of NCBI NO: 34996489 NR Description: pleckstrin homology domain interacting protein sapiens] >gi|17976800|emb|CAC83118.1| WD repeat domain 11 protein
  misc_feature (1230)..(1411): Homolog of NCBI NO: 34996489 NR Description: pleckstrin homology domain interacting protein sapiens] >gi|17976800|emb|CAC83118.1| WD repeat domain 11 protein
  misc_feature (41)..(133): Homolog of NCBI NO: 34996489 NR Description: pleckstrin homology domain interacting protein sapiens] >gi|17976800|emb|CAC83118.1| WD repeat domain 11 protein
  misc_feature (276)..(699): Homolog of NCBI NO: 24649631 NR Description: CG31132-PA [Drosophila melanogaster]
  misc_feature (1178)..(1415): Homolog of NCBI NO: 24649631 NR Description: CG31132-PA [Drosophila melanogaster]
MDWIHKSTPFMEPSNLAKLVQGNVPLQPHDSHSSLTDLDMDLREVYFLILHFLSIGPCERTFGHLRDEILEKGLLPRRYHSWWSRSGIYSGRADDDGISLPLSYDNLIERYPHIEKDHLVKLLKQLILNPSFPSHMRVEGNAPNAADVPTLLGSGTFSLVDRSNNIESQKARHVASYLRWPHMHADQVRGLSLREIGGGFRKHHRAPSILSACHAIAKPSTMVQKMQNIKKLRGHRNAVYCAIFDRSGRYVITGSDDRLVKIWSMETALCLASCRGHEGDITDLAVSSNNALVASASNDFVIRVWRLPDGMPISVLRGHTGAVTAIAFSPRQASVYQLLSSSDDGTCRIWDARYSQWLPRIYVPSPSDANTGSTSNASQSHQILCCAYNANGTIFVTGSSDSNARVWSASKPNLDDAEQPTHELDVLRGHENDVNYVQFSGCAVAPKSSTADALKEDSYPKFKNSWFCHDNIVTCSRDGSAIIWTPRSRKFHGKSGRWMKGYHLKVPPPPLPPQPPRGGPRQRFLPTPRGVNMIIWSLDNRFVLAAIMDCRICVWNAADGSLVHCLTGHSESSYVLDVHPFNPRIAMSAGYDGKTIIWDIWEGIPIKVYEIGRFKLVDGKFSQDGTSIVLSDDVGQIYFLNTGQGESQKNAKYDQFFLGDYRPLIRDTNGHVLDQETQLLPHRRNLQDLLCDSSMIPYPEPDQTMFQQRRLGALGVEWRPSSIKFSVGPDFSLGQDYIMPPLADLDRLIEPLPEFIDAMYWEPEHEVLSDDNDSEYNAEVSSDGARASPCSNSSNELECSSEDSDVENIHESSYHWKRRRKHPKVNVSTSSGRRDKRILDENDSSNSGIKRTKNRRIVVKASKRKHSDVKASRPQRAAAQNARSLLSKISGSSSDEVDDDNDSSNSESDRSIPTLRQLDKPSQMLESLSNDKQKKRLIVKISVKKPAESMGSKGDVINQADLEQLSSKPLEENHRVIGIYSREPGSSSVDAKGDSGCQSIPYSMNTPQREKADNQLIRSSDQDQNMCKWREEIPVCEPTELTAPENIEEAQPFYGDEADEILPKKVRRLRLKLRHPNSPRKLEPDEVADDLADGGDGFASIAPSFMNPIMDSEPVIDSVRDSSAHNFEFGEATADVIRRKRSIRSESSTRNSALRIRLGSGSVDKIKKQGIPSTSVYDDASLEEWPSTSKAGSRSRSASVSKPSLHTGIRLNSVSGKISWLLLSEHEEGCRYIPQLGDEVIYFKQGHQEFLKTKELNDRDRSRYLPRNLGAVEICKVEKLNYDTYPGSGDSCCKMTLRVLDSSSSHASRKEFQLTLPELINFPDFIVEKTRYDAAIQTNWKIGNECRVWWRDATGEGGAWWEGRIESSQVKSTDFPESPWERYRVVYETGETSLHSPWEFDNPEFPWEKSTIEDERREKLLSLFAGLVKSISKHQDSYGIQKLNEAAQKMDFCNRFPVPLYPELIHERLENQYYRSIESFKHDVDAMLSNAELYFVRSAHMLSKIKRLRDKLTKTLRKLI

SEQ ID NO: 85229 - protein, 1510 aa, Arabidopsis thaliana
  peptide (1)..(1510): Ceres Seq. ID no. 12679559
  misc_feature (412)..(475): Pfam Name: WD domain, G-beta repeat Pfam Description: WD domain, G-beta repeat
  misc_feature (1)..(397): Homolog of NCBI NO: 20196881 NR Description: hypothetical protein [Arabidopsis thaliana]
  misc_feature (540)..(665): Homolog of NCBI NO: 20196881 NR Description: hypothetical protein [Arabidopsis thaliana]
  misc_feature (266)..(1040): Homolog of NCBI NO: 17976802 NR Description: WD repeat domain 11 protein [Mus musculus]
  misc_feature (1220)..(1401): Homolog of NCBI NO: 17976802 NR Description: WD repeat domain 11 protein [Mus musculus]
  misc_feature (31)..(123): Homolog of NCBI NO: 17976802 NR Description: WD repeat domain 11 protein [Mus musculus]
  misc_feature (266)..(928): Homolog of NCBI NO: 34996489 NR Description: pleckstrin homology domain interacting protein sapiens] >gi|17976800|emb|CAC83118.1| WD repeat domain 11 protein
  misc_feature (1220)..(1401): Homolog of NCBI NO: 34996489 NR Description: pleckstrin homology domain interacting protein sapiens] >gi|17976800|emb|CAC83118.1| WD repeat domain 11 protein
  misc_feature (31)..(123): Homolog of NCBI NO: 34996489 NR Description: pleckstrin homology domain interacting protein sapiens] >gi|17976800|emb|CAC83118.1| WD repeat domain 11 protein
  misc_feature (266)..(689): Homolog of NCBI NO: 24649631 NR Description: CG31132-PA [Drosophila melanogaster]
  misc_feature (1168)..(1405): Homolog of NCBI NO: 24649631 NR Description: CG31132-PA [Drosophila melanogaster]
MEPSNLAKLVQGNVPLQPHDSHSSLTDLDMDLREVYFLILHFLSIGPCERTFGHLRDEILEKGLLPRRYHSWWSRSGIYSGRADDDGISLPLSYDNLIERYPHIEKDHLVKLLKQLILNPSFPSHMRVEGNAPNAADVPTLLGSGTFSLVDRSNNIESQKARHVASYLRWPHMHADQVRGLSLREIGGGFRKHHRAPSILSACHAIAKPSTMVQKMQNIKKLRGHRNAVYCAIFDRSGRYVITGSDDRLVKIWSMETALCLASCRGHEGDITDLAVSSNNALVASASNDFVIRVWRLPDGMPISVLRGHTGAVTAIAFSPRQASVYQLLSSSDDGTCRIWDARYSQWLPRIYVPSPSDANTGSTSNASQSHQILCCAYNANGTIFVTGSSDSNARVWSASKPNLDDAEQPTHELDVLRGHENDVNYVQFSGCAVAPKSSTADALKEDSYPKFKNSWFCHDNIVTCSRDGSAIIWTPRSRKFHGKSGRWMKGYHLKVPPPPLPPQPPRGGPRQRFLPTPRGVNMIIWSLDNRFVLAAIMDCRICVWNAADGSLVHCLTGHSESSYVLDVHPFNPRIAMSAGYDGKTIIWDIWEGIPIKVYEIGRFKLVDGKFSQDGTSIVLSDDVGQIYFLNTGQGESQKNAKYDQFFLGDYRPLIRDTNGHVLDQETQLLPHRRNLQDLLCDSSMIPYPEPDQTMFQQRRLGALGVEWRPSSIKFSVGPDFSLGQDYIMPPLADLDRLIEPLPEFIDAMYWEPEHEVLSDDNDSEYNAEVSSDGARASPCSNSSNELECSSEDSDVENIHESSYHWKRRRKHPKVNVSTSSGRRDKRILDENDSSNSGIKRTKNRRIVVKASKRKHSDVKASRPQRAAAQNARSLLSKISGSSSDEVDDDNDSSNSESDRSIPTLRQLDKPSQMLESLSNDKQKKRLIVKISVKKPAESMGSKGDVINQADLEQLSSKPLEENHRVIGIYSREPGSSSVDAKGDSGCQSIPYSMNTPQREKADNQLIRSSDQDQNMCKWREEIPVCEPTELTAPENIEEAQPFYGDEADEILPKKVRRLRLKLRHPNSPRKLEPDEVADDLADGGDGFASIAPSFMNPIMDSEPVIDSVRDSSAHNFEFGEATADVIRRKRSIRSESSTRNSALRIRLGSGSVDKIKKQGIPSTSVYDDASLEEWPSTSKAGSRSRSASVSKPSLHTGIRLNSVSGKISWLLLSEHEEGCRYIPQLGDEVIYFKQGHQEFLKTKELNDRDRSRYLPRNLGAVEICKVEKLNYDTYPGSGDSCCKMTLRVLDSSSSHASRKEFQLTLPELINFPDFIVEKTRYDAAIQTNWKIGNECRVWWRDATGEGGAWWEGRIESSQVKSTDFPESPWERYRVVYETGETSLHSPWEFDNPEFPWEKSTIEDERREKLLSLFAGLVKSISKHQDSYGIQKLNEAAQKMDFCNRFPVPLYPELIHERLENQYYRSIESFKHDVDAMLSNAELYFVRSAHMLSKIKRLRDKLTKTLRKLI

SEQ ID NO: 85230 - protein, 1481 aa, Arabidopsis thaliana
  peptide (1)..(1481): Ceres Seq. ID no. 12679560
  misc_feature (383)..(446): Pfam Name: WD domain, G-beta repeat Pfam Description: WD domain, G-beta repeat
  misc_feature (1)..(368): Homolog of NCBI NO: 20196881 NR Description: hypothetical protein [Arabidopsis thaliana]
  misc_feature (511)..(636): Homolog of NCBI NO: 20196881 NR Description: hypothetical protein [Arabidopsis thaliana]
  misc_feature (237)..(1011): Homolog of NCBI NO: 17976802 NR Description: WD repeat domain 11 protein [Mus musculus]
  misc_feature (1191)..(1372): Homolog of NCBI NO: 17976802 NR Description: WD repeat domain 11 protein [Mus musculus]
  misc_feature (2)..(94): Homolog of NCBI NO: 17976802 NR Description: WD repeat domain 11 protein [Mus musculus]
  misc_feature (237)..(899): Homolog of NCBI NO: 34996489 NR Description: pleckstrin homology domain interacting protein sapiens] >gi|17976800|emb|CAC83118.1| WD repeat domain 11 protein
  misc_feature (1191)..(1372): Homolog of NCBI NO: 34996489 NR Description: pleckstrin homology domain interacting protein sapiens] >gi|17976800|emb|CAC83118.1| WD repeat domain 11 protein
  misc_feature (2)..(94): Homolog of NCBI NO: 34996489 NR Description: pleckstrin homology domain interacting protein sapiens] >gi|17976800|emb|CAC83118.1| WD repeat domain 11 protein
  misc_feature (237)..(660): Homolog of NCBI NO: 24649631 NR Description: CG31132-PA [Drosophila melanogaster]
  misc_feature (1139)..(1376): Homolog of NCBI NO: 24649631 NR Description: CG31132-PA [Drosophila melanogaster]
MDLREVYFLILHFLSIGPCERTFGHLRDEILEKGLLPRRYHSWWSRSGIYSGRADDDGISLPLSYDNLIERYPHIEKDHLVKLLKQLILNPSFPSHMRVEGNAPNAADVPTLLGSGTFSLVDRSNNIESQKARHVASYLRWPHMHADQVRGLSLREIGGGFRKHHRAPSILSACHAIAKPSTMVQKMQNIKKLRGHRNAVYCAIFDRSGRYVITGSDDRLVKIWSMETALCLASCRGHEGDITDLAVSSNNALVASASNDFVIRVWRLPDGMPISVLRGHTGAVTAIAFSPRQASVYQLLSSSDDGTCRIWDARYSQWLPRIYVPSPSDANTGSTSNASQSHQILCCAYNANGTIFVTGSSDSNARVWSASKPNLDDAEQPTHELDVLRGHENDVNYVQFSGCAVAPKSSTADALKEDSYPKFKNSWFCHDNIVTCSRDGSAIIWTPRSRKFHGKSGRWMKGYHLKVPPPPLPPQPPRGGPRQRFLPTPRGVNMIIWSLDNRFVLAAIMDCRICVWNAADGSLVHCLTGHSESSYVLDVHPFNPRIAMSAGYDGKTIIWDIWEGIPIKVYEIGRFKLVDGKFSQDGTSIVLSDDVGQIYFLNTGQGESQKNAKYDQFFLGDYRPLIRDTNGHVLDQETQLLPHRRNLQDLLCDSSMIPYPEPDQTMFQQRRLGALGVEWRPSSIKFSVGPDFSLGQDYIMPPLADLDRLIEPLPEFIDAMYWEPEHEVLSDDNDSEYNAEVSSDGARASPCSNSSNELECSSEDSDVENIHESSYHWKRRRKHPKVNVSTSSGRRDKRILDENDSSNSGIKRTKNRRIVVKASKRKHSDVKASRPQRAAAQNARSLLSKISGSSSDEVDDDNDSSNSESDRSIPTLRQLDKPSQMLESLSNDKQKKRLIVKISVKKPAESMGSKGDVINQADLEQLSSKPLEENHRVIGIYSREPGSSSVDAKGDSGCQSIPYSMNTPQREKADNQLIRSSDQDQNMCKWREEIPVCEPTELTAPENIEEAQPFYGDEADEILPKKVRRLRLKLRHPNSPRKLEPDEVADDLADGGDGFASIAPSFMNPIMDSEPVIDSVRDSSAHNFEFGEATADVIRRKRSIRSESSTRNSALRIRLGSGSVDKIKKQGIPSTSVYDDASLEEWPSTSKAGSRSRSASVSKPSLHTGIRLNSVSGKISWLLLSEHEEGCRYIPQLGDEVIYFKQGHQEFLKTKELNDRDRSRYLPRNLGAVEICKVEKLNYDTYPGSGDSCCKMTLRVLDSSSSHASRKEFQLTLPELINFPDFIVEKTRYDAAIQTNWKIGNECRVWWRDATGEGGAWWEGRIESSQVKSTDFPESPWERYRVVYETGETSLHSPWEFDNPEFPWEKSTIEDERREKLLSLFAGLVKSISKHQDSYGIQKLNEAAQKMDFCNRFPVPLYPELIHERLENQYYRSIESFKHDVDAMLSNAELYFVRSAHMLSKIKRLRDKLTKTLRKLI

SEQ ID NO: 85231 - DNA, 1890 bp, Arabidopsis thaliana
  misc_feature (1)..(1890): Ceres Seq. ID no. 12679571
  misc_feature: MA Experiment ID: 108464 Result: Up-regulated in Transcription
  misc_feature: MA Experiment 108464 PARAMETER Experiment Name: At_Germinating_Seeds_cDNA_P Parameter: Age (day) Value: 4 vs. 0
  misc_feature: MA Experiment 108464 PARAMETER Experiment Name: At_Germinating_Seeds_cDNA_P Parameter: Tissue Value: Germinating Seeds
  misc_feature: MA Experiment ID: 108488 Result: Down-regulated in Transcription
  misc_feature: MA Experiment ID: 20000071 Result: Up-regulated in Transcription
  misc_feature: MA Experiment 20000071 PARAMETER Experiment Name: At_100uM_ABA_Mutants_cDNA_P Parameter: Plant Line Value: CS8104
  misc_feature: MA Experiment 20000071 PARAMETER Experiment Name: At_100uM_ABA_Mutants_cDNA_P Parameter: Timepoint (hr) Value: 6
  misc_feature: MA Experiment 20000071 PARAMETER Experiment Name: At_100uM_ABA_Mutants_cDNA_P Parameter: Tissue Value: Aerial
  misc_feature: MA Experiment 20000071 PARAMETER Experiment Name: At_100uM_ABA_Mutants_cDNA_P Parameter: Treatment Value: 100uM ABA vs. No Treatment
  misc_feature: MA Experiment ID: 20000087 Result: Up-regulated in Transcription
  misc_feature: MA Experiment 20000087 PARAMETER Experiment Name: At_100uM_ABA_Mutants_cDNA_P Parameter: Plant Line Value: WS
  misc_feature: MA Experiment 20000087 PARAMETER Experiment Name: At_100uM_ABA_Mutants_cDNA_P Parameter: Timepoint (hr) Value: 6
  misc_feature: MA Experiment 20000087 PARAMETER Experiment Name: At_100uM_ABA_Mutants_cDNA_P Parameter: Tissue Value: Aerial
  misc_feature: MA Experiment 20000087 PARAMETER Experiment Name: At_100uM_ABA_Mutants_cDNA_P Parameter: Treatment Value: 100uM ABA vs. No Treatment
  misc_feature: MA Experiment ID: 20000117 Result: Up-regulated in Transcription
  misc_feature: MA Experiment 20000117 PARAMETER Experiment Name: At_100uM_ABA_Mutants_cDNA_P Parameter: Plant Line Value: Columbia
  misc_feature: MA Experiment 20000117 PARAMETER Experiment Name: At_100uM_ABA_Mutants_cDNA_P Parameter: Timepoint (hr) Value: 6
  misc_feature: MA Experiment 20000117 PARAMETER Experiment Name: At_100uM_ABA_Mutants_cDNA_P Parameter: Tissue Value: Aerial
  misc_feature: MA Experiment 20000117 PARAMETER Experiment Name: At_100uM_ABA_Mutants_cDNA_P Parameter: Treatment Value: 100uM ABA vs. No Treatment
gatatgtgtgatatctctttgtcccccatctattaatctcctcctccgcatcgtcgccgtgcacttccccacctcttccggcggatatgatgagcattgtatcaagtcatcatcactgtcaacaatctgttatacacgaacgtagcggtataggaacaatatctaaggtttcttgttcgagatattgcggtccgtgtttctctggacgactggctttctctcatagcctctgcttgaagactacttatgggaaaactgataggagaaagttttcaagaatttgcagtattgtggatgatgaggggaatctagataattcggatgacgaggaaaaggaatcactcgatgataaaactaaaagggtatgtatgagaaatctataagctttgtaaactccggccattttttgctgtcctctaaggtgaagtcatgacttgacctttaagaactgagacttggtttccctgtgctttatacactagaattatattaaacagtcaatgtggttttaatccttgttgtacatgaaagcctcaaactctctagttcgtgagattacttagaatgttgatctactcctgcttgatcctggaaaaagtgcgtaactaatttgatttcttgagtccttttgatgtctaaatgtttgtccatctctgtcatggcttagtgacacagcaagtaaacaagcgttttgtttaaatttattggttgcttgatatcatctaatcatttagaattactttttttttctttttctttagcaagcgaatgatatgaatcgggctaatcttgaaagaatggttgggtcagatgattctgcatttaacggcttagatcttgcaaccctcatcagacagaagtatggaaaatcttatgatgttcaactcatcaagaaggtatgcccttctgtattcaagtgtgtttgtgattctgtatcgtagaaagaagttaagacctccaatcatcttcatttcattgcatgaatacagaatcagcttttacgaaattcagttgatcattttccttttcattttgagatttttggtgtgagctttattttatcaatgtggaaagatttgtcgctttagaagctaaaaatataaatcatagttcttagatgtgattaatgtaggagttcatggggaagaatcttcttgcaatgaatgtcatgtggaagtacagagaacaggtaagagaatcctttgctgtatacttgatcacagaagcctaatgatatgatagttcaattgattttagtgtacttgtttggactttagataattatgatcttcgttttccatatcattcagatttggtatgagaatctttgccacatagaaagatgaagtgtatatccatattttgttggtatagttcttgcttttgcaagtcaatccttgtaagctaattcacctttatatatttcttgcttcttcttcaacgcctagaggtcttttcctctaaccgaagaagaatatatacttagacttgacgatgtagccaacatgttgaaatgctggggagcagtctcacatatccgtagcagcctagcaaagtcgaaggagcgacctcggatagggaaggctgtcagcattttcatagacatggattcgacagggggaagagcaaatgaatggatttacaagtaaaaatcgaccggtttgcagctgctaaaccaagaaatcaaaaggttttgtctctacgtttatcgtcatcaattcattttgaaggctcttcagtgatggttgcctgcagaaaccgaggtttttgctatatttgatgtccaaatcaggtagtatatatgtacatgtgtgtattaagtagacacaaatctttacttgaactctctgtgtaaaatatctccatgtgttgaaattcaatcatctttgt

SEQ ID NO: 85232 - protein, 98 aa, Arabidopsis thaliana; identical to SEQ ID NO: 37964
  peptide (1)..(98): Ceres Seq. ID no. 12679572
  misc_feature (1)..(92): Homolog of NCBI NO: 11994202 NR Description: dbj|BAA18864.1~gene_id:MPN9.15~similar to unknown
  misc_feature (1)..(92): Homolog of NCBI NO: 18402409 NR Description: expressed protein; protein id: At3g19900.1, by cDNA: 20558. [Arabidopsis thaliana] unknown [Arabidopsis thaliana] >gi|24030263|gb|AAN41306.1|

SEQ ID NO: 85233 - protein, 97 aa, Arabidopsis thaliana; identical to SEQ ID NO: 37965
  peptide (1)..(97): Ceres Seq. ID no. 12679573
  misc_feature (1)..(91): Homolog of NCBI NO: 11994202 NR Description: dbj|BAA18864.1~gene_id:MPN9.15~similar to unknown
  misc_feature (1)..(91): Homolog of NCBI NO: 18402409 NR Description: expressed protein; protein id: At3g19900.1, by cDNA: 20558. [Arabidopsis thaliana] unknown [Arabidopsis thaliana] >gi|24030263|gb|AAN41306.1|

SEQ ID NO: 85234 - protein, 62 aa, Arabidopsis thaliana; identical to SEQ ID NO: 37966
  peptide (1)..(62): Ceres Seq. ID no. 12679574

SEQ ID NO: 85235 - DNA, 1696 bp, Arabidopsis thaliana
  misc_feature (1)..(1696): Ceres Seq. ID no. 12679575
  misc_feature: MA Experiment ID: 20000185 Result: Up-regulated in Transcription
  misc_feature: MA Experiment 20000185 PARAMETER Experiment Name: At_Roots__P Parameter: Age (day) Value: 7 vs. 21
  misc_feature: MA Experiment 20000185 PARAMETER Experiment Name: At_Roots__P Parameter: Organism Value: A. thaliana
  misc_feature: MA Experiment 20000185 PARAMETER Experiment Name: At_Roots__P Parameter: Tissue Value: Roots vs. Whole Plant
  misc_feature: MA Experiment ID: 20001451 Result: Down-regulated in Transcription
  misc_feature: MA Experiment 20001451 PARAMETER Experiment Name: At_Far-red-induction_P Parameter: Age (day) Value: 7
  misc_feature: MA Experiment 20001451 PARAMETER Experiment Name: At_Far-red-induction_P Parameter: Light Value: Far-red vs. White
  misc_feature: MA Experiment 20001451 PARAMETER Experiment Name: At_Far-red-induction_P Parameter: Organism Value: A. thaliana
  misc_feature: MA Experiment 20001451 PARAMETER Experiment Name: At_Far-red-induction_P Parameter: Plant Line Value: Columbia
  misc_feature: MA Experiment 20001451 PARAMETER Experiment Name: At_Far-red-induction_P Parameter: Timepoint (hr) Value: 24
  misc_feature: MA Experiment 20001451 PARAMETER Experiment Name: At_Far-red-induction_P Parameter: Tissue Value: Whole Plant
aggaaaccaaaggaacctcgacttcactatgatttacctccgagccctccgactcttcccatcattggtcatcttcaccttcttctctctgttctagtccacagatctttacagacactctccaccaagtatgggtctattctctatcttcgcgtcttcagtttccctgtagccctcgtctcctcagcatctattgcttatgagatcttcagggaacacgacgtgaacatctcgtctcgtggtttccctcctaccgatgattccctttttgctggatctttcagcttcacctctgctccctatggagattactggaagttcatgaagaagctcctggtcacgaacttgcttggaccccaggcactcgagcggtcacgaggattccgtgcagatgagctagatctgttttacgagaacctgttggataaagcgatgaagaaggagagcgtggatatctgtgtggaggcgttgaagctcagtaacaacagcatctgcaagatgatcatggggaggagttgttcagaggagaatggtgaggcagagagagttagggctttggctacccagttagatggcttgacgaagaagatcttattggcgaacatgttgcgtgcggggtttaaaaagcttgttgtctcactgtttagaaaggaaatgatggatgtttccagcagatttgatgagctgctcgaaaggatccttgtggaacatgaagataaactggacatgcatcatcaaggtacagacttagtggacgcgttgttggcagcttgtcgggacaaaaatgcagagtataagatctctaggaaccatatcaagtcgtttttcgcggatctcttatttgcaagcactgacacctttgtgcaaacaacacagtggacagtggcggagatcattaataaccctaatgttcttgagagattgagaggagaaatcgattccgtggtcgggaaagcaaggttgattcaagaaactgatttgccaaacctcccttatttgcaagcggtggtcaaggaagggctaagactgcatccgccggggcctctctttgcaaggttctcccaagaagggtgtaggatcggagggttctatgtaccggagaaaacaacattaatgattaatgcttatgctgtgatgagagattctgattcttgggaagatcctgatgagtttaaaccagagaggtttctagcttcgtcaagatcagagcaggaaaaggagagaagagagcaagcaattaagtacattgctttcggaagcggacgaagaagctgtcctggagaaaatctagcatatatctttttaggaactgcaattggagtgatggtacagggatttgagtggagaatcaaagaagagaaagttaacatggaagaggctaatgtaggactgagcttgaccatggcttatcctcttaaggtcactcctgttcctcgaaccctagtccccttaactcagaatccactgaaccggagttcatgaatctttggtaagtaattaggtagccttgtttttacgttaccgtgtctgagtttactggtttagtttggctaatgtgtgaaaccgtaaacaattgtgttgttattcggatttatttgtggattggttcatatatggggttatcttgaaagcagcaaactttagcttcttcatgttacttggttcaatggatttgaaggatgccagttggagtagc

SEQ ID NO: 85236 - protein, 493 aa, Arabidopsis thaliana
  peptide (1)..(493): Ceres Seq. ID no. 12679576
  misc_feature (1)..(493): Homolog of NCBI NO: 18402480 NR Description: cytochrome P450, putative; protein id: supported by cDNA: 147792. [Arabidopsis thaliana]
  misc_feature (1)..(493): Homolog of NCBI NO: 21553493 NR Description: cytochrome P450, putative [Arabidopsis thaliana]
  misc_feature (1)..(493): Homolog of NCBI NO: 19699361 NR Description: AT3g20080/MAL21_9 [Arabidopsis thaliana]
  misc_feature (1)..(487): Homolog of NCBI NO: 15233799 NR Description: cytochrome p450 family; protein id: At4g15380.1 thaliana] >gi|22136622|gb|AAM91630.1| putative cytochrome P450
  misc_feature (11)..(487): Homolog of NCBI NO: 25282582 NR Description: cytochrome P450 like protein [imported] - thaliana >gi|5280994|emb|CAB45999.1| cytochrome P450 like protein thaliana] >gi|7268285|emb|CAB78580.1| cytochrome P450 like
  misc_feature (11)..(449): Homolog of NCBI NO: 7430615 NR Description: cytochrome P450 - Arabidopsis thaliana
  misc_feature (1)..(479): Homolog of NCBI NO: 9293969 NR Description: cytochrome P450-like protein [Arabidopsis
  misc_feature (2)..(481): Homolog of NCBI NO: 15233774 NR Description: cytochrome p450 family; protein id: At4g15350.1
  misc_feature (2)..(481): Homolog of NCBI NO: 7430617 NR Description: cytochrome P450 - Arabidopsis thaliana
  misc_feature (1)..(480): Homolog of NCBI NO: 15231047 NR Description: cytochrome P450, putative; protein id: At3g20090.1
RKPKEPRLHYDLPPSPPTLPIIGHLHLLLSVLVHRSLQTLSTKYGSILYLRVFSFPVALVSSASIAYEIFREHDVNISSRGFPPTDDSLFAGSFSFTSAPYGDYWKFMKKLLVTNLLGPQALERSRGFRADELDLFYENLLDKAMKKESVDICVEALKLSNNSICKMIMGRSCSEENGEAERVRALATQLDGLTKKILLANMLRAGFKKLVVSLFRKEMMDVSSRFDELLERILVEHEDKLDMHHQGTDLVDALLAACRDKNAEYKISRNHIKSFFADLLFASTDTFVQTTQWTVAEIINNPNVLERLRGEIDSVVGKARLIQETDLPNLPYLQAVVKEGLRLHPPGPLFARFSQEGCRIGGFYVPEKTTLMINAYAVMRDSDSWEDPDEFKPERFLASSRSEQEKERREQAIKYIAFGSGRRSCPGENLAYIFLGTAIGVMVQGFEWRIKEEKVNMEEANVGLSLTMAYPLKVTPVPRTLVPLTQNPLNRSS

SEQ ID NO: 85237 - protein, 386 aa, Arabidopsis thaliana; identical to SEQ ID NO: 42471
  peptide (1)..(386): Ceres Seq. ID no. 12679577
  misc_feature (1)..(386): Homolog of NCBI NO: 18402480 NR Description: cytochrome P450, putative; protein id: supported by cDNA: 147792. [Arabidopsis thaliana]
  misc_feature (1)..(386): Homolog of NCBI NO: 21553493 NR Description: cytochrome P450, putative [Arabidopsis thaliana]
  misc_feature (1)..(386): Homolog of NCBI NO: 19699361 NR Description: AT3g20080/MAL21_9 [Arabidopsis thaliana]
  misc_feature (1)..(380): Homolog of NCBI NO: 15233799 NR Description: cytochrome p450 family; protein id: At4g15380.1 thaliana] >gi|22136622|gb|AAM91630.1| putative cytochrome P450
  misc_feature (1)..(380): Homolog of NCBI NO: 25282582 NR Description: cytochrome P450 like protein [imported] - thaliana >gi|5280994|emb|CAB45999.1| cytochrome P450 like protein thaliana] >gi|7268285|emb|CAB78580.1| cytochrome P450 like
  misc_feature (1)..(342): Homolog of NCBI NO: 7430615 NR Description: cytochrome P450 - Arabidopsis thaliana
  misc_feature (1)..(372): Homolog of NCBI NO: 9293969 NR Description: cytochrome P450-like protein [Arabidopsis
  misc_feature (1)..(374): Homolog of NCBI NO: 15233774 NR Description: cytochrome p450 family; protein id: At4g15350.1
  misc_feature (1)..(374): Homolog of NCBI NO: 7430617 NR Description: cytochrome P450 - Arabidopsis thaliana
  misc_feature (1)..(373): Homolog of NCBI NO: 15231047 NR Description: cytochrome P450, putative; protein id: At3g20090.1

SEQ ID NO: 85238 - protein, 349 aa, Arabidopsis thaliana
  peptide (1)..(349): Ceres Seq. ID no. 12679578
  misc_feature (1)..(349): Homolog of NCBI NO: 18402480 NR Description: cytochrome P450, putative; protein id: supported by cDNA: 147792. [Arabidopsis thaliana]
  misc_feature (1)..(349): Homolog of NCBI NO: 21553493 NR Description: cytochrome P450, putative [Arabidopsis thaliana]
  misc_feature (1)..(349): Homolog of NCBI NO: 19699361 NR Description: AT3g20080/MAL21_9 [Arabidopsis thaliana]
  misc_feature (1)..(343): Homolog of NCBI NO: 15233799 NR Description: cytochrome p450 family; protein id: At4g15380.1 thaliana] >gi|22136622|gb|AAM91630.1| putative cytochrome P450
  misc_feature (1)..(343): Homolog of NCBI NO: 25282582 NR Description: cytochrome P450 like protein [imported] - thaliana >gi|5280994|emb|CAB45999.1| cytochrome P450 like protein thaliana] >gi|7268285|emb|CAB78580.1| cytochrome P450 like
  misc_feature (1)..(305): Homolog of NCBI NO: 7430615 NR Description: cytochrome P450 - Arabidopsis thaliana
  misc_feature (1)..(335): Homolog of NCBI NO: 9293969 NR Description: cytochrome P450-like protein [Arabidopsis
  misc_feature (1)..(337): Homolog of NCBI NO: 15233774 NR Description: cytochrome p450 family; protein id: At4g15350.1
  misc_feature (1)..(337): Homolog of NCBI NO: 7430617 NR Description: cytochrome P450 - Arabidopsis thaliana
  misc_feature (1)..(336): Homolog of NCBI NO: 15231047 NR Description: cytochrome P450, putative; protein id: At3g20090.1
MKKESVDICVEALKLSNNSICKMIMGRSCSEENGEAERVRALATQLDGLTKKILLANMLRAGFKKLVVSLFRKEMMDVSSRFDELLERILVEHEDKLDMHHQGTDLVDALLAACRDKNAEYKISRNHIKSFFADLLFASTDTFVQTTQWTVAEIINNPNVLERLRGEIDSVVGKARLIQETDLPNLPYLQAVVKEGLRLHPPGPLFARFSQEGCRIGGFYVPEKTTLMINAYAVMRDSDSWEDPDEFKPERFLASSRSEQEKERREQAIKYIAFGSGRRSCPGENLAYIFLGTAIGVMVQGFEWRIKEEKVNMEEANVGLSLTMAYPLKVTPVPRTLVPLTQNPLNRSS

SEQ ID NO: 85239 - DNA, 1271 bp, Arabidopsis thaliana
  misc_feature (1)..(1271): Ceres Seq. ID no. 12679585
  misc_feature: MA Experiment ID: 108573 Result: Up-regulated in Transcription
  misc_feature: MA Experiment 108573 PARAMETER Experiment Name: At_Drought_cDNA_P Parameter: Timepoint (hr) Value: 6
  misc_feature: MA Experiment 108573 PARAMETER Experiment Name: At_Drought_cDNA_P Parameter: Tissue Value: Aerial
  misc_feature: MA Experiment 108573 PARAMETER Experiment Name: At_Drought_cDNA_P Parameter: Treatment Value: Drought vs. No Drought
  misc_feature: MA Experiment ID: 20001560 Result: Down-regulated in Transcription
  misc_feature: MA Experiment 20001560 PARAMETER Experiment Name: At_Drought_Soil_Dry_P Parameter: Age (day) Value: 28
  misc_feature: MA Experiment 20001560 PARAMETER Experiment Name: At_Drought_Soil_Dry_P Parameter: Organism Value: A. thaliana
  misc_feature: MA Experiment 20001560 PARAMETER Experiment Name: At_Drought_Soil_Dry_P Parameter: Plant Line Value: WS
  misc_feature: MA Experiment 20001560 PARAMETER Experiment Name: At_Drought_Soil_Dry_P Parameter: Post Timepoint (hr) Value: None
  misc_feature: MA Experiment 20001560 PARAMETER Experiment Name: At_Drought_Soil_Dry_P Parameter: Post-Treatment Value: None
  misc_feature: MA Experiment 20001560 PARAMETER Experiment Name: At_Drought_Soil_Dry_P Parameter: Timepoint (day) Value: 14
  misc_feature: MA Experiment 20001560 PARAMETER Experiment Name: At_Drought_Soil_Dry_P Parameter: Treatment Value: Drought vs. No Drought
gtagtcagcgacacggaactcattaactttactcttctcactggtcaatcgtcggagataatcgggtgatcggcgatggagaatacggacgtcttcttggggctgcatgatttcctggagcggatgcgcaaaccctccgccggcgatttcgtcaaatccattaaaagtttcattgtttcattctcgaacaatgcaccagacccggaaaaagattgtgctatggttcaggagttcttttctaagatggaggctgctttcagggctcatccactttggtctggttgttctgaggaggaattggatagtgctggagatggcctggagaagtatgttatgacaaagctatttactcgggtgtttgcttcaaacactgaggaggttatagctgatgagaagctatttcagaagatgtcattggttcaacaattcatttctcccgagaatttggatatacaaccaacttttcaaaatgaatcgtcatggctgctagctcaaaaagagctccagaagataaacatgtacaaagctcctcgtgataagcttgtgtgtatccttaactgttgcaaagtgattaataacttactgctaaatgcttcaattgcttcaaacgagaatgcacctggagcagacgaatttcttcctgttttgatatatgtaacaataaaggctaaccctccacaacttcactcaaacttgttgtatatacaaagctgagtttgaaaagaacatggaatctgcacgggcacgaatttctggtttggacagccagacttatcaaactggtcatggctctgcaccaccccctcgtgatgagtccactcttcagaaaactcaaagtctgaatcccaagagggaaaacactcttttccaatcaaaatcgtctgatagtctttctgggaccaacgaattactgaatataaacagtgaaacaccaatgaagaaagctgaatccatttcagatttggaaaataagggtgcgacgcttctgaaggataccgagccaagcaaagtctttcaagaatatccttacatatttgccagtgctggtgatttgaggataggagatgttgaaggcttgttaaatagttataaacagctcgttttcaaatatgtgtgccttaccaaaggattgggtgatggaacatctttagctccatccagttcacccttgcaagcgtcgtccggttttaatacgtctaaggaatctgaggatcatagaagatcgtcttcagatgtacaaatgacaaaggaaactgacaggagtgttgatg

SEQ ID NO: 85240 - protein, 212 aa, Arabidopsis thaliana; identical to SEQ ID NO: 42951
  peptide (1)..(212): Ceres Seq. ID no. 12679586
  misc_feature (135)..(211): Pfam Name: Vacuolar sorting protein 9 (VPS9) domain Pfam Description: Vacuolar sorting protein 9 (VPS9) domain
  misc_feature (1)..(211): Homolog of NCBI NO: 18402362 NR Description: expressed protein; protein id: At3g19770.1, by cDNA: gi_15027906, supported by cDNA: gi_19310676 [Arabidopsis >gi|15027907|gb|AAK76484.1| unknown protein [Arabidopsis
  misc_feature (1)..(211): Homolog of NCBI NO: 15242388 NR Description: putative protein; protein id: At5g09320.1 thaliana] >gi|9955519|emb|CAC05458.1| putative protein
  misc_feature (32)..(197): Homolog of NCBI NO: 34902128 NR Description: unknown protein [Oryza sativa (japonica
  misc_feature (8)..(30): Homolog of NCBI NO: 34902128 NR Description: unknown protein [Oryza sativa (japonica
  misc_feature (3)..(211): Homolog of NCBI NO: 19112902 NR Description: putative vacuolar protein sorting-associated [Schizosaccharomyces pombe] >gi|7493160|pir||T40507 probable
  misc_feature (27)..(212): Homolog of NCBI NO: 21739944 NR Description: hypothetical protein [Homo sapiens]
  misc_feature (27)..(212): Homolog of NCBI NO: 27882595 NR Description: Similar to RIKEN cDNA 4432404J10 gene [Mus
  misc_feature (27)..(212): Homolog of NCBI NO: 15489034 NR Description: Unknown (protein for IMAGE:3451647) [Homo sapiens]
  misc_feature (27)..(212): Homolog of NCBI NO: 7512550 NR Description: hypothetical protein DKFZp434C212.1 - human
  misc_feature (27)..(212): Homolog of NCBI NO: 20521930 NR Description: KIAA1521 protein [Homo sapiens]

SEQ ID NO: 85241 - protein, 196 aa, Arabidopsis thaliana; identical to SEQ ID NO: 42952
  peptide (1)..(196): Ceres Seq. ID no. 12679587
  misc_feature (119)..(195): Pfam Name: Vacuolar sorting protein 9 (VPS9) domain Pfam Description: Vacuolar sorting protein 9 (VPS9) domain
  misc_feature (1)..(195): Homolog of NCBI NO: 18402362 NR Description: expressed protein; protein id: At3g19770.1, by cDNA: gi_15027906, supported by cDNA: gi_19310676 [Arabidopsis >gi|15027907|gb|AAK76484.1| unknown protein [Arabidopsis
  misc_feature (1)..(195): Homolog of NCBI NO: 15242388 NR Description: putative protein; protein id: At5g09320.1 thaliana] >gi|9955519|emb|CAC05458.1| putative protein
  misc_feature (16)..(181): Homolog of NCBI NO: 34902128 NR Description: unknown protein [Oryza sativa (japonica
  misc_feature (1)..(14): Homolog of NCBI NO: 34902128 NR Description: unknown protein [Oryza sativa (japonica
  misc_feature (1)..(195): Homolog of NCBI NO: 19112902 NR Description: putative vacuolar protein sorting-associated [Schizosaccharomyces pombe] >gi|7493160|pir||T40507 probable
  misc_feature (11)..(196): Homolog of NCBI NO: 21739944 NR Description: hypothetical protein [Homo sapiens]
  misc_feature (11)..(196): Homolog of NCBI NO: 27882595 NR Description: Similar to RIKEN cDNA 4432404J10 gene [Mus
  misc_feature (11)..(196): Homolog of NCBI NO: 15489034 NR Description: Unknown (protein for IMAGE:3451647) [Homo sapiens]
  misc_feature (11)..(196): Homolog of NCBI NO: 7512550 NR Description: hypothetical protein DKFZp434C212.1 - human
  misc_feature (11)..(196): Homolog of NCBI NO: 20521930 NR Description: KIAA1521 protein [Homo sapiens]

SEQ ID NO: 85242 - protein, 181 aa, Arabidopsis thaliana
  peptide (1)..(181): Ceres Seq. ID no. 12679588
  misc_feature (1)..(180): Homolog of NCBI NO: 18402362 NR Description: expressed protein; protein id: At3g19770.1, by cDNA: gi_15027906, supported by cDNA: gi_19310676 [Arabidopsis >gi|15027907|gb|AAK76484.1| unknown protein [Arabidopsis
  misc_feature (1)..(180): Homolog of NCBI NO: 15242388 NR Description: putative protein; protein id: At5g09320.1 thaliana] >gi|9955519|emb|CAC05458.1| putative protein
  misc_feature (1)..(180): Homolog of NCBI NO: 34902128 NR Description: unknown protein [Oryza sativa (japonica
MESARARISGLDSQTYQTGHGSAPPPRDESTLQKTQSLNPKRENTLFQSKSSDSLSGTNELLNINSETPMKKAESISDLENKGATLLKDTEPSKVFQEYPYIFASAGDLRIGDVEGLLNSYKQLVFKYVCLTKGLGDGTSLAPSSSPLQASSGFNTSKESEDHRRSSSDVQMTKETDRSVD

SEQ ID NO: 85243 - DNA, 1726 bp, Arabidopsis thaliana
  misc_feature (1)..(1726): Ceres Seq. ID no. 12679611
  misc_feature: MA Experiment ID: 20000180 Result: Up-regulated in Transcription
  misc_feature: MA Experiment 20000180 PARAMETER Experiment Name: At_Germinating_Seeds_P Parameter: Age (hr) Value: 24 vs. 0
  misc_feature: MA Experiment 20000180 PARAMETER Experiment Name: At_Germinating_Seeds_P Parameter: Tissue Value: Germinating Seeds
  misc_feature: MA Experiment ID: 20000267 Result: Up-regulated in Transcription
  misc_feature: MA Experiment 20000267 PARAMETER Experiment Name: At_Drought_P Parameter: Age (day) Value: 7
  misc_feature: MA Experiment 20000267 PARAMETER Experiment Name: At_Drought_P Parameter: Organism Value: A. thaliana
  misc_feature: MA Experiment 20000267 PARAMETER Experiment Name: At_Drought_P Parameter: Plant Line Value: WS
  misc_feature: MA Experiment 20000267 PARAMETER Experiment Name: At_Drought_P Parameter: Timepoint (hr) Value: 6
  misc_feature: MA Experiment 20000267 PARAMETER Experiment Name: At_Drought_P Parameter: Tissue Value: Whole Plant
  misc_feature: MA Experiment 20000267 PARAMETER Experiment Name: At_Drought_P Parameter: Treatment Value: Drought vs. No Drought
  misc_feature: MA Experiment ID: 20000268 Result: Up-regulated in Transcription
  misc_feature: MA Experiment 20000268 PARAMETER Experiment Name: At_100mM_NaCl__P Parameter: Age (day) Value: 14
  misc_feature: MA Experiment 20000268 PARAMETER Experiment Name: At_100mM_NaCl__P Parameter: Organism Value: A. thaliana
  misc_feature: MA Experiment 20000268 PARAMETER Experiment Name: At_100mM_NaCl__P Parameter: Plant Line Value: WS
  misc_feature: MA Experiment 20000268 PARAMETER Experiment Name: At_100mM_NaCl__P Parameter: Timepoint (hr) Value: 6
  misc_feature: MA Experiment 20000268 PARAMETER Experiment Name: At_100mM_NaCl__P Parameter: Tissue Value: Whole Plant
  misc_feature: MA Experiment 20000268 PARAMETER Experiment Name: At_100mM_NaCl__P Parameter: Treatment Value: 100mM NaCl vs. No Treatment
  misc_feature: MA Experiment ID: 20000436 Result: Up-regulated in Transcription
  misc_feature: MA Experiment 20000436 PARAMETER Experiment Name: At_Drought_P Parameter: Age (day) Value: 7
  misc_feature: MA Experiment 20000436 PARAMETER Experiment Name: At_Drought_P Parameter: Organism Value: A. thaliana
  misc_feature: MA Experiment 20000436 PARAMETER Experiment Name: At_Drought_P Parameter: Plant Line Value: WS
  misc_feature: MA Experiment 20000436 PARAMETER Experiment Name: At_Drought_P Parameter: Timepoint (hr) Value: 12
  misc_feature: MA Experiment 20000436 PARAMETER Experiment Name: At_Drought_P Parameter: Tissue Value: Whole Plant
  misc_feature: MA Experiment 20000436 PARAMETER Experiment Name: At_Drought_P Parameter: Treatment Value: Drought vs. No Drought
  misc_feature: MA Experiment ID: 20000437 Result: Up-regulated in Transcription
  misc_feature: MA Experiment 20000437 PARAMETER Experiment Name: At_Drought_P Parameter: Age (day) Value: 8
  misc_feature: MA Experiment 20000437 PARAMETER Experiment Name: At_Drought_P Parameter: Organism Value: A. thaliana
  misc_feature: MA Experiment 20000437 PARAMETER Experiment Name: At_Drought_P Parameter: Plant Line Value: WS
  misc_feature: MA Experiment 20000437 PARAMETER Experiment Name: At_Drought_P Parameter: Timepoint (hr) Value: 24
  misc_feature: MA Experiment 20000437 PARAMETER Experiment Name: At_Drought_P Parameter: Tissue Value: Whole Plant
  misc_feature: MA Experiment 20000437 PARAMETER Experiment Name: At_Drought_P Parameter: Treatment Value: Drought vs. No Drought
  misc_feature: MA Experiment ID: 20000453 Result: Up-regulated in Transcription
  misc_feature: MA Experiment 20000453 PARAMETER Experiment Name: At_100uM_ABA_P Parameter: Age (day) Value: 15
  misc_feature: MA Experiment 20000453 PARAMETER Experiment Name: At_100uM_ABA_P Parameter: Organism Value: A. thaliana
  misc_feature: MA Experiment 20000453 PARAMETER Experiment Name: At_100uM_ABA_P Parameter: Plant Line Value: WS
  misc_feature: MA Experiment 20000453 PARAMETER Experiment Name: At_100uM_ABA_P Parameter: Timepoint (hr) Value: 24
  misc_feature: MA Experiment 20000453 PARAMETER Experiment Name: At_100uM_ABA_P Parameter: Tissue Value: Aerial
  misc_feature: MA Experiment 20000453 PARAMETER Experiment Name: At_100uM_ABA_P Parameter: Treatment Value: 100uM ABA vs. No Treatment
  misc_feature: MA Experiment ID: 20001248 Result: Down-regulated in Transcription
  misc_feature: MA Experiment 20001248 PARAMETER Experiment Name: At_Far-red-induction_P Parameter: Age (day) Value: 7
  misc_feature: MA Experiment 20001248 PARAMETER Experiment Name: At_Far-red-induction_P Parameter: Light Value: Far-red vs. White
  misc_feature: MA Experiment 20001248 PARAMETER Experiment Name: At_Far-red-induction_P Parameter: Organism Value: A. thaliana
  misc_feature: MA Experiment 20001248 PARAMETER Experiment Name: At_Far-red-induction_P Parameter: Plant Line Value: Columbia
  misc_feature: MA Experiment 20001248 PARAMETER Experiment Name: At_Far-red-induction_P Parameter: Timepoint (hr) Value: 4
  misc_feature: MA Experiment 20001248 PARAMETER Experiment Name: At_Far-red-induction_P Parameter: Tissue Value: Whole Plant
  misc_feature: MA Experiment ID: 20001554 Result: Up-regulated in Transcription
  misc_feature: MA Experiment 20001554 PARAMETER Experiment Name: At_Drought_Soil_Dry_P Parameter: Age (day) Value: 21
  misc_feature: MA Experiment 20001554 PARAMETER Experiment Name: At_Drought_Soil_Dry_P Parameter: Organism Value: A. thaliana
  misc_feature: MA Experiment 20001554 PARAMETER Experiment Name: At_Drought_Soil_Dry_P Parameter: Plant Line Value: WS
  misc_feature: MA Experiment 20001554 PARAMETER Experiment Name: At_Drought_Soil_Dry_P Parameter: Post Timepoint (hr) Value: None
  misc_feature: MA Experiment 20001554 PARAMETER Experiment Name: At_Drought_Soil_Dry_P Parameter: Post-Treatment Value: None
  misc_feature: MA Experiment 20001554 PARAMETER Experiment Name: At_Drought_Soil_Dry_P Parameter: Timepoint (day) Value: 7
  misc_feature: MA Experiment 20001554 PARAMETER Experiment Name: At_Drought_Soil_Dry_P Parameter: Treatment Value: Drought vs. No Drought
  misc_feature: MA Experiment ID: 20001555 Result: Up-regulated in Transcription
  misc_feature: MA Experiment 20001555 PARAMETER Experiment Name: At_Drought_Soil_Dry_P Parameter: Age (day) Value: 24
  misc_feature: MA Experiment 20001555 PARAMETER Experiment Name: At_Drought_Soil_Dry_P Parameter: Organism Value: A. thaliana
  misc_feature: MA Experiment 20001555 PARAMETER Experiment Name: At_Drought_Soil_Dry_P Parameter: Plant Line Value: WS
  misc_feature: MA Experiment 20001555 PARAMETER Experiment Name: At_Drought_Soil_Dry_P Parameter: Post Timepoint (hr) Value: None
  misc_feature: MA Experiment 20001555 PARAMETER Experiment Name: At_Drought_Soil_Dry_P Parameter: Post-Treatment Value: None
  misc_feature: MA Experiment 20001555 PARAMETER Experiment Name: At_Drought_Soil_Dry_P Parameter: Timepoint (day) Value: 10
  misc_feature: MA Experiment 20001555 PARAMETER Experiment Name: At_Drought_Soil_Dry_P Parameter: Treatment Value: Drought vs. No Drought
  misc_feature: MA Experiment ID: 20001556 Result: Up-regulated in Transcription
  misc_feature: MA Experiment 20001556 PARAMETER Experiment Name: At_Drought_Soil_Dry_P Parameter: Age (day) Value: 26
  misc_feature: MA Experiment 20001556 PARAMETER Experiment Name: At_Drought_Soil_Dry_P Parameter: Organism Value: A. thaliana
  misc_feature: MA Experiment 20001556 PARAMETER Experiment Name: At_Drought_Soil_Dry_P Parameter: Plant Line Value: WS
  misc_feature: MA Experiment 20001556 PARAMETER Experiment Name: At_Drought_Soil_Dry_P Parameter: Post Timepoint (hr) Value: None
  misc_feature: MA Experiment 20001556 PARAMETER Experiment Name: At_Drought_Soil_Dry_P Parameter: Post-Treatment Value: None
  misc_feature: MA Experiment 20001556 PARAMETER Experiment Name: At_Drought_Soil_Dry_P Parameter: Timepoint (day) Value: 12
  misc_feature: MA Experiment 20001556 PARAMETER Experiment Name: At_Drought_Soil_Dry_P Parameter: Treatment Value: Drought vs. No Drought
  misc_feature: MA Experiment ID: 20001559 Result: Up-regulated in Transcription
  misc_feature: MA Experiment 20001559 PARAMETER Experiment Name: At_Drought_Soil_Dry_P Parameter: Age (day) Value: 28
  misc_feature: MA Experiment 20001559 PARAMETER Experiment Name: At_Drought_Soil_Dry_P Parameter: Organism Value: A. thaliana
  misc_feature: MA Experiment 20001559 PARAMETER Experiment Name: At_Drought_Soil_Dry_P Parameter: Plant Line Value: WS
  misc_feature: MA Experiment 20001559 PARAMETER Experiment Name: At_Drought_Soil_Dry_P Parameter: Post Timepoint (hr) Value: 29
  misc_feature: MA Experiment 20001559 PARAMETER Experiment Name: At_Drought_Soil_Dry_P Parameter: Post-Treatment Value: Re-Water vs. No Drought
  misc_feature: MA Experiment 20001559 PARAMETER Experiment Name: At_Drought_Soil_Dry_P Parameter: Timepoint (day) Value: 14
  misc_feature: MA Experiment 20001559 PARAMETER Experiment Name: At_Drought_Soil_Dry_P Parameter: Treatment Value: Drought vs. No Drought
  misc_feature: MA Experiment ID: 20001905 Result: Up-regulated in Transcription
  misc_feature: MA Experiment 20001905 PARAMETER Experiment Name: At_Drought_Reproduction_P Parameter: Age (day) Value: 40
  misc_feature: MA Experiment 20001905 PARAMETER Experiment Name: At_Drought_Reproduction_P Parameter: Organism Value: A. thaliana
  misc_feature: MA Experiment 20001905 PARAMETER Experiment Name: At_Drought_Reproduction_P Parameter: Plant Line Value: WS
  misc_feature: MA Experiment 20001905 PARAMETER Experiment Name: At_Drought_Reproduction_P Parameter: Timepoint (day) Value: 10
  misc_feature: MA Experiment 20001905 PARAMETER Experiment Name: At_Drought_Reproduction_P Parameter: Tissue Value: Rosettes
  misc_feature: MA Experiment 20001905 PARAMETER Experiment Name: At_Drought_Reproduction_P Parameter: Treatment Value: Drought vs. No Drought
  misc_feature: MA Experiment ID: 20001906 Result: Up-regulated in Transcription
  misc_feature: MA Experiment 20001906 PARAMETER Experiment Name: At_Drought_Reproduction_P Parameter: Age (day) Value: 35
  misc_feature: MA Experiment 20001906 PARAMETER Experiment Name: At_Drought_Reproduction_P Parameter: Organism Value: A. thaliana
  misc_feature: MA Experiment 20001906 PARAMETER Experiment Name: At_Drought_Reproduction_P Parameter: Plant Line Value: WS
  misc_feature: MA Experiment 20001906 PARAMETER Experiment Name: At_Drought_Reproduction_P Parameter: Timepoint (day) Value: 5
  misc_feature: MA Experiment 20001906 PARAMETER Experiment Name: At_Drought_Reproduction_P Parameter: Tissue Value: Siliques
  misc_feature: MA Experiment 20001906 PARAMETER Experiment Name: At_Drought_Reproduction_P Parameter: Treatment Value: Drought vs. No Drought
  misc_feature: MA Experiment ID: 20001908 Result: Up-regulated in Transcription
  misc_feature: MA Experiment 20001908 PARAMETER Experiment Name: At_Drought_Reproduction_P Parameter: Age (day) Value: 40
  misc_feature: MA Experiment 20001908 PARAMETER Experiment Name: At_Drought_Reproduction_P Parameter: Organism Value: A. thaliana
  misc_feature: MA Experiment 20001908 PARAMETER Experiment Name: At_Drought_Reproduction_P Parameter: Plant Line Value: WS
  misc_feature: MA Experiment 20001908 PARAMETER Experiment Name: At_Drought_Reproduction_P Parameter: Timepoint (day) Value: 10
  misc_feature: MA Experiment 20001908 PARAMETER Experiment Name: At_Drought_Reproduction_P Parameter: Tissue Value: Siliques
  misc_feature: MA Experiment 20001908 PARAMETER Experiment Name: At_Drought_Reproduction_P Parameter: Treatment Value: Drought vs. No Drought
  misc_feature: MA Experiment ID: 20001911 Result: Up-regulated in Transcription
  misc_feature: MA Experiment 20001911 PARAMETER Experiment Name: At_Drought_Reproduction_P Parameter: Age (day) Value: 40
  misc_feature: MA Experiment 20001911 PARAMETER Experiment Name: At_Drought_Reproduction_P Parameter: Organism Value: A. thaliana
  misc_feature: MA Experiment 20001911 PARAMETER Experiment Name: At_Drought_Reproduction_P Parameter: Plant Line Value: WS
  misc_feature: MA Experiment 20001911 PARAMETER Experiment Name: At_Drought_Reproduction_P Parameter: Timepoint (day) Value: 10
  misc_feature: MA Experiment 20001911 PARAMETER Experiment Name: At_Drought_Reproduction_P Parameter: Tissue Value: Flowers
  misc_feature: MA Experiment 20001911 PARAMETER Experiment Name: At_Drought_Reproduction_P Parameter: Treatment Value: Drought vs. No Drought
cctcgagattaaacagcatcaagacaacatccaaaaattacccaggtttttgtgtttgaaactcgaagattgttgcggattcctgaaagattaaggcttttagctccaagtttccaagagtgctgtgaatcagctcccactctgtctctgcatattgcaagacaccggttttgtttcagaagtttgtttcttcttgtctcatgatcactagttttcagcaatggggtatgtaaacgtggagaagagatgggtttttcctcttgtcatcacatctctcgtctgcgttttccttcttgcaacttctttcaacatgggactagtctcttccctccgaacaatcaacgggattttctccatcataccttcccgtctcgtcaagaaccaaacgagacttgattttgcagagtctaaagttgctagacaaacccgtgttttgcctcatgaagacaagcttccccgttttgcataccttgtttccgggtctaaaggggatgtagaaaagctttggagaacacttagagcagtgtaccatccaagaaaccagtatgttgttcacttggatcttgaatcacctgtgaatgagagattagagctggcctctcggattaataacgatcctatgtactctaaaaccgggaatgtatatatgataaccaaggctaaccttgtgacatataaaggaccaacgatggtggcaaatactcttcacgcttgtgctgttcttctcaagagaaatgcgaactgggattggtttattaaccttagtgcttcagattatcctctggtgacccaagatgatctgcttcatacgttttcaacattggaccggaacctcaactttatcgaacacacaagtcaactgggatggaaagaggagaagcgagcacagccattaatgattgatcctggactctacttgttgaacaaatctgatatttactgggtcacacctcgccgaagtttgccaactgcctttaagttattcactggatcagcttggatggctctatcacgcccgtttgtagagtattgcatatggggatgggacaatttaccacgaactctcctaatgtattacaccaacttcgtttcatcgcccgaaggttacttccagaccgtgatttgcaacgtgcctgagtttgcaaaaactgcagtaaaccatgacctacactacatttcctgggacaatccgccgcagcagcacccacacgtgttgtcactcaacgacacaatgccgatgatatggagcggtgctgcgtttgctaggaaattcagaagagatgatgaagtacttaataagatcgataaggaattacttaaacggaggaatgataaagatagttttactcctggtggatggtgcagtgggaaaccaaaatgctccagggtcggtaatgtggctaagattgttcctagctttggagctcagaggcttcaaggacttgtgaccaggttagtcaacgaagctaatacaggagttagtcagtgtaaatagaaagaattcgaagaaaaaaagaaccattatcgaagtaatggagagcgactgtcatgatatatatatttatacaacatatagagaatcttgcagttgcaggctttagataagactattagacattgtttgcattgagtagagatgccttgtaatgccacgacctactgggattcatttttgtttgtttgaagtcatctccttcaaaatccaataaaattataaccttttttt

SEQ ID NO: 85244 - protein, 424 aa, Arabidopsis thaliana
  peptide (1)..(424): Ceres Seq. ID no. 12679612
  misc_feature (81)..(306): Pfam Name: Core-2/I-Branching enzyme Pfam Description: Core-2/I-Branching enzyme
  misc_feature (1)..(424): Homolog of NCBI NO: 18400725 NR Description: N-acetylglucosaminyltransferase family enzyme family); protein id: At3g15350.1, supported by cDNA:
  misc_feature (1)..(424): Homolog of NCBI NO: 15146308 NR Description: AT3g15350/K7L4_15 [Arabidopsis thaliana]
  misc_feature (6)..(423): Homolog of NCBI NO: 15219202 NR Description: N-acetylglucosaminyltransferase family
  misc_feature (1)..(424): Homolog of NCBI NO: 30687610 NR Description: N-acetylglucosaminyltransferase family
  misc_feature (31)..(424): Homolog of NCBI NO: 7486258 NR Description: hypothetical protein F27G19.80 - Arabidopsis >gi|4972073|emb|CAB43880.1| putative protein [Arabidopsis >gi|7269602|emb|CAB81398.1| putative protein [Arabidopsis
  misc_feature (1)..(424): Homolog of NCBI NO: 15242532 NR Description: N-acetylglucosaminyltransferase family
  misc_feature (5)..(424): Homolog of NCBI NO: 15242199 NR Description: N-acetylglucosaminyltransferase family enzyme family); protein id: At5g15050.1, supported by cDNA: supported by cDNA: gi_16209673 [Arabidopsis thaliana]
  misc_feature (42)..(424): Homolog of NCBI NO: 34903664 NR Description: B1015E06.17 [Oryza sativa (japonica
  misc_feature (7)..(415): Homolog of NCBI NO: 15218824 NR Description: N-acetylglucosaminyltransferase family enzyme family); protein id: At1g03520.1, supported by cDNA: supported by cDNA: gi_20465790 [Arabidopsis thaliana] thaliana
  misc_feature (7)..(423): Homolog of NCBI NO: 15236287 NR Description: N-acetylglucosaminyltransferase family
MGYVNVEKRWVFPLVITSLVCVFLLATSFNMGLVSSLRTINGIFSIIPSRLVKNQTRLDFAESKVARQTRVLPHEDKLPRFAYLVSGSKGDVEKLWRTLRAVYHPRNQYVVHLDLESPVNERLELASRINNDPMYSKTGNVYMITKANLVTYKGPTMVANTLHACAVLLKRNANWDWFINLSASDYPLVTQDDLLHTFSTLDRNLNFIEHTSQLGWKEEKRAQPLMIDPGLYLLNKSDIYWVTPRRSLPTAFKLFTGSAWMALSRPFVEYCIWGWDNLPRTLLMYYTNFVSSPEGYFQTVICNVPEFAKTAVNHDLHYISWDNPPQQHPHVLSLNDTMPMIWSGAAFARKFRRDDEVLNKIDKELLKRRNDKDSFTPGGWCSGKPKCSRVGNVAKIVPSFGAQRLQGLVTRLVNEANTGVSQCK

SEQ ID NO: 85245 - protein, 394 aa, Arabidopsis thaliana
  peptide (1)..(394): Ceres Seq. ID no. 12679613
  misc_feature (51)..(276): Pfam Name: Core-2/I-Branching enzyme Pfam Description: Core-2/I-Branching enzyme
  misc_feature (1)..(394): Homolog of NCBI NO: 18400725 NR Description: N-acetylglucosaminyltransferase family enzyme family); protein id: At3g15350.1, supported by cDNA:
  misc_feature (1)..(394): Homolog of NCBI NO: 15146308 NR Description: AT3g15350/K7L4_15 [Arabidopsis thaliana]
  misc_feature (1)..(393): Homolog of NCBI NO: 15219202 NR Description: N-acetylglucosaminyltransferase family
  misc_feature (1)..(394): Homolog of NCBI NO: 30687610 NR Description: N-acetylglucosaminyltransferase family
  misc_feature (1)..(394): Homolog of NCBI NO: 7486258 NR Description: hypothetical protein F27G19.80 - Arabidopsis >gi|4972073|emb|CAB43880.1| putative protein [Arabidopsis >gi|7269602|emb|CAB81398.1| putative protein [Arabidopsis
  misc_feature (1)..(394): Homolog of NCBI NO: 15242532 NR Description: N-acetylglucosaminyltransferase family
  misc_feature (1)..(394): Homolog of NCBI NO: 15242199 NR Description: N-acetylglucosaminyltransferase family enzyme family); protein id: At5g15050.1, supported by cDNA: supported by cDNA: gi_16209673 [Arabidopsis thaliana]
  misc_feature (12)..(394): Homolog of NCBI NO: 34903664 NR Description: B1015E06.17 [Oryza sativa (japonica
  misc_feature (1)..(385): Homolog of NCBI NO: 15218824 NR Description: N-acetylglucosaminyltransferase family enzyme family); protein id: At1g03520.1, supported by cDNA: supported by cDNA: gi_20465790 [Arabidopsis thaliana] thaliana
  misc_feature (1)..(393): Homolog of NCBI NO: 15236287 NR Description: N-acetylglucosaminyltransferase family
MGLVSSLRTINGIFSIIPSRLVKNQTRLDFAESKVARQTRVLPHEDKLPRFAYLVSGSKGDVEKLWRTLRAVYHPRNQYVVHLDLESPVNERLELASRINNDPMYSKTGNVYMITKANLVTYKGPTMVANTLHACAVLLKRNANWDWFINLSASDYPLVTQDDLLHTFSTLDRNLNFIEHTSQLGWKEEKRAQPLMIDPGLYLLNKSDIYWVTPRRSLPTAFKLFTGSAWMALSRPFVEYCIWGWDNLPRTLLMYYTNFVSSPEGYFQTVICNVPEFAKTAVNHDLHYISWDNPPQQHPHVLSLNDTMPMIWSGAAFARKFRRDDEVLNKIDKELLKRRNDKDSFTPGGWCSGKPKCSRVGNVAKIVPSFGAQRLQGLVTRLVNEANTGVSQCK

SEQ ID NO: 85246 - protein, 291 aa, Arabidopsis thaliana
  peptide (1)..(291): Ceres Seq. ID no. 12679614
  misc_feature (1)..(173): Pfam Name: Core-2/I-Branching enzyme Pfam Description: Core-2/I-Branching enzyme
  misc_feature (1)..(291): Homolog of NCBI NO: 18400725 NR Description: N-acetylglucosaminyltransferase family enzyme family); protein id: At3g15350.1, supported by cDNA:
  misc_feature (1)..(291): Homolog of NCBI NO: 15146308 NR Description: AT3g15350/K7L4_15 [Arabidopsis thaliana]
  misc_feature (1)..(290): Homolog of NCBI NO: 15219202 NR Description: N-acetylglucosaminyltransferase family
  misc_feature (1)..(291): Homolog of NCBI NO: 30687610 NR Description: N-acetylglucosaminyltransferase family
  misc_feature (1)..(291): Homolog of NCBI NO: 7486258 NR Description: hypothetical protein F27G19.80 - Arabidopsis >gi|4972073|emb|CAB43880.1| putative protein [Arabidopsis >gi|7269602|emb|CAB81398.1| putative protein [Arabidopsis
  misc_feature (1)..(291): Homolog of NCBI NO: 15242532 NR Description: N-acetylglucosaminyltransferase family
  misc_feature (1)..(291): Homolog of NCBI NO: 15242199 NR Description: N-acetylglucosaminyltransferase family enzyme family); protein id: At5g15050.1, supported by cDNA: supported by cDNA: gi_16209673 [Arabidopsis thaliana]
  misc_feature (1)..(291): Homolog of NCBI NO: 34903664 NR Description: B1015E06.17 [Oryza sativa (japonica
  misc_feature (1)..(282): Homolog of NCBI NO: 15218824 NR Description: N-acetylglucosaminyltransferase family enzyme family); protein id: At1g03520.1, supported by cDNA: supported by cDNA: gi_20465790 [Arabidopsis thaliana] thaliana
  misc_feature (1)..(290): Homolog of NCBI NO: 15236287 NR Description: N-acetylglucosaminyltransferase family
MYSKTGNVYMITKANLVTYKGPTMVANTLHACAVLLKRNANWDWFINLSASDYPLVTQDDLLHTFSTLDRNLNFIEHTSQLGWKEEKRAQPLMIDPGLYLLNKSDIYWVTPRRSLPTAFKLFTGSAWMALSRPFVEYCIWGWDNLPRTLLMYYTNFVSSPEGYFQTVICNVPEFAKTAVNHDLHYISWDNPPQQHPHVLSLNDTMPMIWSGAAFARKFRRDDEVLNKIDKELLKRRNDKDSFTPGGWCSGKPKCSRVGNVAKIVPSFGAQRLQGLVTRLVNEANTGVSQCK

SEQ ID NO: 85247 - DNA, 855 bp, Arabidopsis thaliana
  misc_feature (1)..(855): Ceres Seq. ID no. 12679615
  misc_feature: MA Experiment ID: 108435 Result: Down-regulated in Transcription
  misc_feature: MA Experiment 108435 PARAMETER Experiment Name: At_stm_Mutants_cDNA_P Parameter: Plant Line Value: wt Landsburg vs stm
  misc_feature: MA Experiment 108435 PARAMETER Experiment Name: At_stm_Mutants_cDNA_P Parameter: Tissue Value: Shoot Apical Meristem Region
  misc_feature: MA Experiment ID: 108462 Result: Up-regulated in Transcription
  misc_feature: MA Experiment 108462 PARAMETER Experiment Name: At_Germinating_Seeds_cDNA_P Parameter: Age (day) Value: 2 vs. 0
  misc_feature: MA Experiment 108462 PARAMETER Experiment Name: At_Germinating_Seeds_cDNA_P Parameter: Tissue Value: Germinating Seeds
  misc_feature: MA Experiment ID: 108464 Result: Up-regulated in Transcription
  misc_feature: MA Experiment 108464 PARAMETER Experiment Name: At_Germinating_Seeds_cDNA_P Parameter: Age (day) Value: 4 vs. 0
  misc_feature: MA Experiment 108464 PARAMETER Experiment Name: At_Germinating_Seeds_cDNA_P Parameter: Tissue Value: Germinating Seeds
  misc_feature: MA Experiment ID: 108595 Result: Down-regulated in Transcription
  misc_feature: MA Experiment 108595 PARAMETER Experiment Name: At_Ler-pi_Ovule_cDNA_P Parameter: Plant Line Value: null
  misc_feature: MA Experiment ID: 20000180 Result: Up-regulated in Transcription
  misc_feature: MA Experiment 20000180 PARAMETER Experiment Name: At_Germinating_Seeds_P Parameter: Age (hr) Value: 24 vs. 0
  misc_feature: MA Experiment 20000180 PARAMETER Experiment Name: At_Germinating_Seeds_P Parameter: Tissue Value: Germinating Seeds
  misc_feature: MA Experiment ID: 20000185 Result: Down-regulated in Transcription
  misc_feature: MA Experiment 20000185 PARAMETER Experiment Name: At_Roots__P Parameter: Age (day) Value: 7 vs. 21
  misc_feature: MA Experiment 20000185 PARAMETER Experiment Name: At_Roots__P Parameter: Organism Value: A. thaliana
  misc_feature: MA Experiment 20000185 PARAMETER Experiment Name: At_Roots__P Parameter: Tissue Value: Roots vs. Whole Plant
  misc_feature: MA Experiment ID: 20000286 Result: Down-regulated in Transcription
  misc_feature: MA Experiment 20000286 PARAMETER Experiment Name: At_Open_Flower_P Parameter: Age (day) Value: 21
  misc_feature: MA Experiment 20000286 PARAMETER Experiment Name: At_Open_Flower_P Parameter: Plant Line Value: WS
  misc_feature: MA Experiment 20000286 PARAMETER Experiment Name: At_Open_Flower_P Parameter: Tissue Value: Half Open vs. Whole Plant
  misc_feature: MA Experiment ID: 20000439 Result: Down-regulated in Transcription
  misc_feature: MA Experiment 20000439 PARAMETER Experiment Name: At_Roots__P Parameter: Age (day) Value: 14 vs. 21
  misc_feature: MA Experiment 20000439 PARAMETER Experiment Name: At_Roots__P Parameter: Organism Value: A. thaliana
  misc_feature: MA Experiment 20000439 PARAMETER Experiment Name: At_Roots__P Parameter: Tissue Value: Roots vs. Whole Plant
  misc_feature: MA Experiment ID: 20000794 Result: Down-regulated in Transcription
  misc_feature: MA Experiment 20000794 PARAMETER Experiment Name: At_Petals_P Parameter: Age (day) Value: 23-25 days
  misc_feature: MA Experiment 20000794 PARAMETER Experiment Name: At_Petals_P Parameter: Plant Line Value: WS
  misc_feature: MA Experiment 20000794 PARAMETER Experiment Name: At_Petals_P Parameter: Tissue Value: Petals vs. Whole plant
  misc_feature: MA Experiment ID: 20001557 Result: Down-regulated in Transcription
  misc_feature: MA Experiment 20001557 PARAMETER Experiment Name: At_Drought_Soil_Dry_P Parameter: Age (day) Value: 27
  misc_feature: MA Experiment 20001557 PARAMETER Experiment Name: At_Drought_Soil_Dry_P Parameter: Organism Value: A. thaliana
  misc_feature: MA Experiment 20001557 PARAMETER Experiment Name: At_Drought_Soil_Dry_P Parameter: Plant Line Value: WS
  misc_feature: MA Experiment 20001557 PARAMETER Experiment Name: At_Drought_Soil_Dry_P Parameter: Post Timepoint (hr) Value: 3
  misc_feature: MA Experiment 20001557 PARAMETER Experiment Name: At_Drought_Soil_Dry_P Parameter: Post-Treatment Value: Re-Water vs. No Drought
  misc_feature: MA Experiment 20001557 PARAMETER Experiment Name: At_Drought_Soil_Dry_P Parameter: Timepoint (day) Value: 13
  misc_feature: MA Experiment 20001557 PARAMETER Experiment Name: At_Drought_Soil_Dry_P Parameter: Treatment Value: Drought vs. No Drought
  misc_feature: MA Experiment ID: 20001558 Result: Down-regulated in Transcription
  misc_feature: MA Experiment 20001558 PARAMETER Experiment Name: At_Drought_Soil_Dry_P Parameter: Age (day) Value: 27
  misc_feature: MA Experiment 20001558 PARAMETER Experiment Name: At_Drought_Soil_Dry_P Parameter: Organism Value: A. thaliana
  misc_feature: MA Experiment 20001558 PARAMETER Experiment Name: At_Drought_Soil_Dry_P Parameter: Plant Line Value: WS
  misc_feature: MA Experiment 20001558 PARAMETER Experiment Name: At_Drought_Soil_Dry_P Parameter: Post Timepoint (hr) Value: 6
  misc_feature: MA Experiment 20001558 PARAMETER Experiment Name: At_Drought_Soil_Dry_P Parameter: Post-Treatment Value: Re-Water vs. No Drought
  misc_feature: MA Experiment 20001558 PARAMETER Experiment Name: At_Drought_Soil_Dry_P Parameter: Timepoint (day) Value: 13
  misc_feature: MA Experiment 20001558 PARAMETER Experiment Name: At_Drought_Soil_Dry_P Parameter: Treatment Value: Drought vs. No Drought
  misc_feature: MA Experiment ID: 20001905 Result: Down-regulated in Transcription
  misc_feature: MA Experiment 20001905 PARAMETER Experiment Name: At_Drought_Reproduction_P Parameter: Age (day) Value: 40
  misc_feature: MA Experiment 20001905 PARAMETER Experiment Name: At_Drought_Reproduction_P Parameter: Organism Value: A. thaliana
  misc_feature: MA Experiment 20001905 PARAMETER Experiment Name: At_Drought_Reproduction_P Parameter: Plant Line Value: WS
  misc_feature: MA Experiment 20001905 PARAMETER Experiment Name: At_Drought_Reproduction_P Parameter: Timepoint (day) Value: 10
  misc_feature: MA Experiment 20001905 PARAMETER Experiment Name: At_Drought_Reproduction_P Parameter: Tissue Value: Rosettes
  misc_feature: MA Experiment 20001905 PARAMETER Experiment Name: At_Drought_Reproduction_P Parameter: Treatment Value: Drought vs. No Drought
aaccactcaaaaaaatatctctgctctgctccaatggcgtcgttactcgattccgtcaccgtgacccgcgtgttttctctgccgattgcggcttcggtctcgtcttcttcagctgctccgtcggtttcacgacgccggatttctcccgccaggtttctggaattcagaggtttgaagtcttcgcggagtttggtgactcagtcggccagtctgggtgcgaatcgtagaaccagaatcgctcgcggtggacgaatcgcctgtgaggctcaggacaccactgccgccgccgtcgaagtaccaaatctgtctgattcagaatggcaaacaaaggttctggaatcagatgtcccagttctggtcgagttctgggcaccatggtgtggaccttgccgtatgattcaccccatagttgaccagctagccaaagatttcgcagggaagttcaaattctacaaaatcaacactgacgagagcccaaatacagcaaaccgttacgggatacgaagcgttccaacagtaatcatcttcaaaggcggtgagaagaaagatagcatcattggagctgtgcctagagagacgttggagaaaactatagaaagattcttggtcgagtaacaaaatttgactcttttgtcactctgaaccattttaccttatcttctctcttgtaatctctgtaaagtcttttaagtttttgactattatgttatcgtgggtcctctttgtcttcttcaataaaaaaaatggaaacaaagtaatccaccgacgcatgagaagcataactccacgttgaaccacatgccattgttcttcctaattcaccgtacaatctatatacatacatatgttttgagt

SEQ ID NO: 85248 - protein, 204 aa, Arabidopsis thaliana
  peptide (1)..(204): Ceres Seq. ID no. 12679616
  misc_feature (12)..(204): Homolog of NCBI NO: 15232567 NR Description: thioredoxin m4; protein id: At3g15360.1, by cDNA: 42151., supported by cDNA: gi_14030704, supported by gi_16974518, supported by cDNA: gi_6539613 [Arabidopsis thaliana]
  misc_feature (12)..(204): Homolog of NCBI NO: 6539614 NR Description: thioredoxin m4 [Arabidopsis thaliana]
  misc_feature (25)..(202): Homolog of NCBI NO: 15594012 NR Description: putative thioredoxin m2 [Pisum sativum]
  misc_feature (33)..(202): Homolog of NCBI NO: 15236327 NR Description: putative M-type thioredoxin; protein id: supported by cDNA: 10950., supported by cDNA: gi_15028102, by cDNA: gi_19310724, supported by cDNA: gi_6539609 [Arabidopsis
  misc_feature (33)..(202): Homolog of NCBI NO: 6539610 NR Description: thioredoxin m2 [Arabidopsis thaliana]
  misc_feature (33)..(202): Homolog of NCBI NO: 21618235 NR Description: putative M-type thioredoxin [Arabidopsis thaliana]
  misc_feature (26)..(202): Homolog of NCBI NO: 11135407 NR Description: Thioredoxin M-type, chloroplast precursor (TRX-M)
  misc_feature (35)..(202): Homolog of NCBI NO: 30678634 NR Description: thioredoxin M-type 1, chloroplast precursor
  misc_feature (12)..(202): Homolog of NCBI NO: 38346628 NR Description: OSJNBa0074L08.22 [Oryza sativa (japonica
  misc_feature (27)..(202): Homolog of NCBI NO: 21354 NR Description: thioredoxin M precursor (AA -67 to 114) [Spinacia
NHSKKYLCSAPMASLLDSVTVTRVFSLPIAASVSSSSAAPSVSRRRISPARFLEFRGLKSSRSLVTQSASLGANRRTRIARGGRIACEAQDTTAAAVEVPNLSDSEWQTKVLESDVPVLVEFWAPWCGPCRMIHPIVDQLAKDFAGKFKFYKINTDESPNTANRYGIRSVPTVIIFKGGEKKDSIIGAVPRETLEKTIERFLVE

SEQ ID NO: 85249 - protein, 193 aa, Arabidopsis thaliana; identical to SEQ ID NO: 37672
  peptide (1)..(193): Ceres Seq. ID no. 12679617
  misc_feature (1)..(193): Homolog of NCBI NO: 15232567 NR Description: thioredoxin m4; protein id: At3g15360.1, by cDNA: 42151., supported by cDNA: gi_14030704, supported by gi_16974518, supported by cDNA: gi_6539613 [Arabidopsis thaliana]
  misc_feature (1)..(193): Homolog of NCBI NO: 6539614 NR Description: thioredoxin m4 [Arabidopsis thaliana]
  misc_feature (14)..(191): Homolog of NCBI NO: 15594012 NR Description: putative thioredoxin m2 [Pisum sativum]
  misc_feature (22)..(191): Homolog of NCBI NO: 15236327 NR Description: putative M-type thioredoxin; protein id: supported by cDNA: 10950., supported by cDNA: gi_15028102, by cDNA: gi_19310724, supported by cDNA: gi_6539609 [Arabidopsis
  misc_feature (22)..(191): Homolog of NCBI NO: 6539610 NR Description: thioredoxin m2 [Arabidopsis thaliana]
  misc_feature (22)..(191): Homolog of NCBI NO: 21618235 NR Description: putative M-type thioredoxin [Arabidopsis thaliana]
  misc_feature (15)..(191): Homolog of NCBI NO: 11135407 NR Description: Thioredoxin M-type, chloroplast precursor (TRX-M)
  misc_feature (24)..(191): Homolog of NCBI NO: 30678634 NR Description: thioredoxin M-type 1, chloroplast precursor
  misc_feature (1)..(191): Homolog of NCBI NO: 38346628 NR Description: OSJNBa0074L08.22 [Oryza sativa (japonica
  misc_feature (16)..(191): Homolog of NCBI NO: 21354 NR Description: thioredoxin M precursor (AA -67 to 114) [Spinacia

SEQ ID NO: 85250 - DNA, 780 bp, Arabidopsis thaliana
  misc_feature (1)..(780): Ceres Seq. ID no. 12679722
  misc_feature: MA Experiment ID: 20000355 Result: Down-regulated in Transcription
  misc_feature: MA Experiment 20000355 PARAMETER Experiment Name: At_Siliques_Sub_P Parameter: Age (day) Value: 21
  misc_feature: MA Experiment 20000355 PARAMETER Experiment Name: At_Siliques_Sub_P Parameter: Organism Value: A. thaliana
  misc_feature: MA Experiment 20000355 PARAMETER Experiment Name: At_Siliques_Sub_P Parameter: Plant Line Value: WS
  misc_feature: MA Experiment 20000355 PARAMETER Experiment Name: At_Siliques_Sub_P Parameter: Tissue Value: Less Than 5mm Siliques vs. Whole Plant
atgatgagtttcgtgatttcagatgaatttctggggacatttgtgccgattctggtgtattgggtgtattcagggatgtacatttgcttaggatctttggataaatatagattgcattcgaagatagatgaggatgagaagaatctcgtttctaaatctgccgtcgttaagggcgttcttcttcaacagactcttcaggctattatctccgttattctcttcaagataacaggaagtgatgcagatgctgctacgacacagcaattttccattctacttctggctaggcagtttatcatcgctatgcttgtaattgacacttggcaatatttcattcatcgatatatgcacctcaacaagttcttatacaagcacatccactctcagcatcatcgccttattgtgccttattcgtatggagctctatacaaccatccactagaaggtcttctcttggacactattggtggtgctttgtctttcctcttctctggtatgtccccaagaacagccatctttttcttctccttcgctaccatcaaaacagtagatgatcattgtggactatggcttccgggaaatccatttcacatcttcttcagtaataactctgcttaccatgatgttcaccaccaactctatggaaccaaatacaacttctcgcagccattctttgttatgtgggataggattctcggcacttacttgccttattcattggagaaaagagccaatggaggatttgaaacacggccaatcaaagtatccaaagatgagtaa

SEQ ID NO: 85251 - protein, 259 aa, Arabidopsis thaliana; identical to SEQ ID NO: 77395
  peptide (1)..(259): Ceres Seq. ID no. 12679723
  misc_feature (1)..(259): Homolog of NCBI NO: 18394095 NR Description: acid phosphatase, putative; protein id: supported by cDNA: gi_13605749 [Arabidopsis thaliana] At1g14290/F14L17_4 [Arabidopsis thaliana]
  misc_feature (2)..(259): Homolog of NCBI NO: 25511716 NR Description: F14L17.5 protein - Arabidopsis thaliana Contains similarity to acid phosphatase from Lupinus albus and contains a Sterol desaturase PF|01598 domain. EST gb|AI995340
  misc_feature (1)..(259): Homolog of NCBI NO: 22330531 NR Description: acid phosphatase, putative; protein id: supported by cDNA: gi_17979534 [Arabidopsis thaliana] At1g69640/F24J1.22 [Arabidopsis thaliana]
  misc_feature (2)..(259): Homolog of NCBI NO: 25404823 NR Description: probable sterol desaturase T6C23.16 [imported] -
  misc_feature (11)..(254): Homolog of NCBI NO: 34913184 NR Description: similar to acid phosphatase [Oryza sativa
  misc_feature (34)..(199): Homolog of NCBI NO: 5360721 NR Description: acid phosphatase [Lupinus albus]
  misc_feature (81)..(253): Homolog of NCBI NO: 34911990 NR Description: P0694A04.28 [Oryza sativa (japonica
  misc_feature (2)..(82): Homolog of NCBI NO: 34911990 NR Description: P0694A04.28 [Oryza sativa (japonica
  misc_feature (89)..(237): Homolog of NCBI NO: 19113281 NR Description: hypothetical integral membrane protein, putative in lipid metabolism [Schizosaccharomyces pombe]
  misc_feature (16)..(78): Homolog of NCBI NO: 19113281 NR Description: hypothetical integral membrane protein, putative in lipid metabolism [Schizosaccharomyces pombe]

SEQ ID NO: 85252 - protein, 258 aa, Arabidopsis thaliana; identical to SEQ ID NO: 77396
  peptide (1)..(258): Ceres Seq. ID no. 12679724
  misc_feature (1)..(258): Homolog of NCBI NO: 18394095 NR Description: acid phosphatase, putative; protein id: supported by cDNA: gi_13605749 [Arabidopsis thaliana] At1g14290/F14L17_4 [Arabidopsis thaliana]
  misc_feature (1)..(258): Homolog of NCBI NO: 25511716 NR Description: F14L17.5 protein - Arabidopsis thaliana Contains similarity to acid phosphatase from Lupinus albus and contains a Sterol desaturase PF|01598 domain. EST gb|AI995340
  misc_feature (1)..(258): Homolog of NCBI NO: 22330531 NR Description: acid phosphatase, putative; protein id: supported by cDNA: gi_17979534 [Arabidopsis thaliana] At1g69640/F24J1.22 [Arabidopsis thaliana]
  misc_feature (1)..(258): Homolog of NCBI NO: 25404823 NR Description: probable sterol desaturase T6C23.16 [imported] -
  misc_feature (10)..(253): Homolog of NCBI NO: 34913184 NR Description: similar to acid phosphatase [Oryza sativa
  misc_feature (33)..(198): Homolog of NCBI NO: 5360721 NR Description: acid phosphatase [Lupinus albus]
  misc_feature (80)..(252): Homolog of NCBI NO: 34911990 NR Description: P0694A04.28 [Oryza sativa (japonica
  misc_feature (1)..(81): Homolog of NCBI NO: 34911990 NR Description: P0694A04.28 [Oryza sativa (japonica
  misc_feature (88)..(236): Homolog of NCBI NO: 19113281 NR Description: hypothetical integral membrane protein, putative in lipid metabolism [Schizosaccharomyces pombe]
  misc_feature (15)..(77): Homolog of NCBI NO: 19113281 NR Description: hypothetical integral membrane protein, putative in lipid metabolism [Schizosaccharomyces pombe]

SEQ ID NO: 85253 - protein, 234 aa, Arabidopsis thaliana; identical to SEQ ID NO: 77397
  peptide (1)..(234): Ceres Seq. ID no. 12679725
  misc_feature (1)..(234): Homolog of NCBI NO: 18394095 NR Description: acid phosphatase, putative; protein id: supported by cDNA: gi_13605749 [Arabidopsis thaliana] At1g14290/F14L17_4 [Arabidopsis thaliana]
  misc_feature (1)..(234): Homolog of NCBI NO: 25511716 NR Description: F14L17.5 protein - Arabidopsis thaliana Contains similarity to acid phosphatase from Lupinus albus and contains a Sterol desaturase PF|01598 domain. EST gb|AI995340
  misc_feature (1)..(234): Homolog of NCBI NO: 22330531 NR Description: acid phosphatase, putative; protein id: supported by cDNA: gi_17979534 [Arabidopsis thaliana] At1g69640/F24J1.22 [Arabidopsis thaliana]
  misc_feature (1)..(234): Homolog of NCBI NO: 25404823 NR Description: probable sterol desaturase T6C23.16 [imported] -
  misc_feature (1)..(229): Homolog of NCBI NO: 34913184 NR Description: similar to acid phosphatase [Oryza sativa
  misc_feature (9)..(174): Homolog of NCBI NO: 5360721 NR Description: acid phosphatase [Lupinus albus]
  misc_feature (56)..(228): Homolog of NCBI NO: 34911990 NR Description: P0694A04.28 [Oryza sativa (japonica
  misc_feature (1)..(57): Homolog of NCBI NO: 34911990 NR Description: P0694A04.28 [Oryza sativa (japonica
  misc_feature (64)..(212): Homolog of NCBI NO: 19113281 NR Description: hypothetical integral membrane protein, putative in lipid metabolism [Schizosaccharomyces pombe]
  misc_feature (1)..(53): Homolog of NCBI NO: 19113281 NR Description: hypothetical integral membrane protein, putative in lipid metabolism [Schizosaccharomyces pombe]

SEQ ID NO: 85254 - DNA, 972 bp, Arabidopsis thaliana
  misc_feature (1)..(972): Ceres Seq. ID no. 12679726
  misc_feature: MA Experiment ID: 20000184 Result: Down-regulated in Transcription
  misc_feature: MA Experiment 20000184 PARAMETER Experiment Name: At_Shoots__P Parameter: Age (day) Value: 7
  misc_feature: MA Experiment 20000184 PARAMETER Experiment Name: At_Shoots__P Parameter: Tissue Value: Shoots vs. Whole Plant
  misc_feature: MA Experiment ID: 20000185 Result: Down-regulated in Transcription
  misc_feature: MA Experiment 20000185 PARAMETER Experiment Name: At_Roots__P Parameter: Age (day) Value: 7 vs. 21
  misc_feature: MA Experiment 20000185 PARAMETER Experiment Name: At_Roots__P Parameter: Organism Value: A. thaliana
  misc_feature: MA Experiment 20000185 PARAMETER Experiment Name: At_Roots__P Parameter: Tissue Value: Roots vs. Whole Plant
  misc_feature: MA Experiment ID: 20001451 Result: Down-regulated in Transcription
  misc_feature: MA Experiment 20001451 PARAMETER Experiment Name: At_Far-red-induction_P Parameter: Age (day) Value: 7
  misc_feature: MA Experiment 20001451 PARAMETER Experiment Name: At_Far-red-induction_P Parameter: Light Value: Far-red vs. White
  misc_feature: MA Experiment 20001451 PARAMETER Experiment Name: At_Far-red-induction_P Parameter: Organism Value: A. thaliana
  misc_feature: MA Experiment 20001451 PARAMETER Experiment Name: At_Far-red-induction_P Parameter: Plant Line Value: Columbia
  misc_feature: MA Experiment 20001451 PARAMETER Experiment Name: At_Far-red-induction_P Parameter: Timepoint (hr) Value: 24
  misc_feature: MA Experiment 20001451 PARAMETER Experiment Name: At_Far-red-induction_P Parameter: Tissue Value: Whole Plant
  misc_feature: MA Experiment ID: 20001557 Result: Up-regulated in Transcription
  misc_feature: MA Experiment 20001557 PARAMETER Experiment Name: At_Drought_Soil_Dry_P Parameter: Age (day) Value: 27
  misc_feature: MA Experiment 20001557 PARAMETER Experiment Name: At_Drought_Soil_Dry_P Parameter: Organism Value: A. thaliana
  misc_feature: MA Experiment 20001557 PARAMETER Experiment Name: At_Drought_Soil_Dry_P Parameter: Plant Line Value: WS
  misc_feature: MA Experiment 20001557 PARAMETER Experiment Name: At_Drought_Soil_Dry_P Parameter: Post Timepoint (hr) Value: 3
  misc_feature: MA Experiment 20001557 PARAMETER Experiment Name: At_Drought_Soil_Dry_P Parameter: Post-Treatment Value: Re-Water vs. No Drought
  misc_feature: MA Experiment 20001557 PARAMETER Experiment Name: At_Drought_Soil_Dry_P Parameter: Timepoint (day) Value: 13
  misc_feature: MA Experiment 20001557 PARAMETER Experiment Name: At_Drought_Soil_Dry_P Parameter: Treatment Value: Drought vs. No Drought
  misc_feature: MA Experiment ID: 20001558 Result: Up-regulated in Transcription
  misc_feature: MA Experiment 20001558 PARAMETER Experiment Name: At_Drought_Soil_Dry_P Parameter: Age (day) Value: 27
  misc_feature: MA Experiment 20001558 PARAMETER Experiment Name: At_Drought_Soil_Dry_P Parameter: Organism Value: A. thaliana
  misc_feature: MA Experiment 20001558 PARAMETER Experiment Name: At_Drought_Soil_Dry_P Parameter: Plant Line Value: WS
  misc_feature: MA Experiment 20001558 PARAMETER Experiment Name: At_Drought_Soil_Dry_P Parameter: Post Timepoint (hr) Value: 6
  misc_feature: MA Experiment 20001558 PARAMETER Experiment Name: At_Drought_Soil_Dry_P Parameter: Post-Treatment Value: Re-Water vs. No Drought
  misc_feature: MA Experiment 20001558 PARAMETER Experiment Name: At_Drought_Soil_Dry_P Parameter: Timepoint (day) Value: 13
  misc_feature: MA Experiment 20001558 PARAMETER Experiment Name: At_Drought_Soil_Dry_P Parameter: Treatment Value: Drought vs. No Drought
  misc_feature: MA Experiment ID: 20001757 Result: Up-regulated in Transcription
  misc_feature: MA Experiment 20001757 PARAMETER Experiment Name: At_50mM_NH4NO3_L-to-H_P Parameter: Timepoint (hr) Value: 6
  misc_feature: MA Experiment 20001757 PARAMETER Experiment Name: At_50mM_NH4NO3_L-to-H_P Parameter: Tissue Value: Leaf
  misc_feature: MA Experiment 20001757 PARAMETER Experiment Name: At_50mM_NH4NO3_L-to-H_P Parameter: Treatment Value: 50mM NH4NO3 vs 100mM Mannitol
atggtgacggagctggaagagcttgtcgaatttttgtcatctccttcaccgcctgtgaagaaagctgcggtggaaattgttagtggtttaactggttccgaggaaggtttacaatctctatcaaagtattccgagattcttcttccatcattgtctcagcttctaaatgaaagcaaggaggtatcagagccagcagctcaagctcttgttaatctttctcagaagtgtgaattggcaaagaagatgattcaaatgggtttgattaaagtggccatggacatgttgtataagccagagtcttgtattaccagattacttgttatgcttctagtgaatcttactcagttggatgatggggtttcttctttgcttcagattgacgatgagaagatgcatggactacatatcatgaagcttgttaggtcattttgcaggtcttctggtgaaactgctgatgatcagtttgagcatgttggttcgatccttgtcaacatatcaaaaacagaagatgggaggaaattgttactggagccaaagagacgactattaaaacagatcattaggcagtttgattcaacaaatcaattgcgaaagaaaggggttgctgggactattcgtaactgttgttttgaagccaaaaaccaactccagaatatactcttgatatcagagtttctttggcccgctctgctcctaccagttgcaggcagcaagacatacagtgagcaagatgtcgcaaaaatgccacctgagcttggaagtgcactgtccattgagcgagaaccagttactgatcctgacattcgcgttcagacactcgaagctatatatttgatcatcttagaggaggcaggtcgaagggcattttggtcagtcaacggcccacggattctacaattgggatacgaatatgaagaagatccgaaagcaatgagagcctatgagcaagtcggttctttggacttaagatag

SEQ ID NO: 85255 - protein, 323 aa, Arabidopsis thaliana
  peptide (1)..(323): Ceres Seq. ID no. 12679727
  misc_feature (92)..(271): Pfam Name: Domain of unknown function (DUF383) Pfam Description: Domain of unknown function (DUF383)
  misc_feature (1)..(320): Homolog of NCBI NO: 15223707 NR Description: hypothetical protein; protein id: At1g14300.1
  misc_feature (1)..(320): Homolog of NCBI NO: 26449855 NR Description: unknown protein [Arabidopsis thaliana]
  misc_feature (124)..(320): Homolog of NCBI NO: 37534210 NR Description: unknown protein [Oryza sativa (japonica
  misc_feature (1)..(126): Homolog of NCBI NO: 37534210 NR Description: unknown protein [Oryza sativa (japonica
  misc_feature (4)..(323): Homolog of NCBI NO: 19569883 NR Description: SIMILAR TO HYPOTHETICAL PROTEIN [Dictyostelium >gi|28828120|gb|AAO50803.1| similar to Homo sapiens (Human).
  misc_feature (5)..(317): Homolog of NCBI NO: 21356909 NR Description: CG6073-PA [Drosophila melanogaster] GM06077p [Drosophila melanogaster] >gi|21711727|gb|AAM75054.1|
  misc_feature (2)..(286): Homolog of NCBI NO: 19115795 NR Description: hypothetical protein [Schizosaccharomyces pombe]
  misc_feature (51)..(307): Homolog of NCBI NO: 40745990 NR Description: hypothetical protein AN9409.2 [Aspergillus
MVTELEELVEFLSSPSPPVKKAAVEIVSGLTGSEEGLQSLSKYSEILLPSLSQLLNESKEVSEPAAQALVNLSQKCELAKKMIQMGLIKVAMDMLYKPESCITRLLVMLLVNLTQLDDGVSSLLQIDDEKMHGLHIMKLVRSFCRSSGETADDQFEHVGSILVNISKTEDGRKLLLEPKRRLLKQIIRQFDSTNQLRKKGVAGTIRNCCFEAKNQLQNILLISEFLWPALLLPVAGSKTYSEQDVAKMPPELGSALSIEREPVTDPDIRVQTLEAIYLIILEEAGRRAFWSVNGPRILQLGYEYEEDPKAMRAYEQVGSLDLR

SEQ ID NO: 85256 - protein, 242 aa, Arabidopsis thaliana
  peptide (1)..(242): Ceres Seq. ID no. 12679728
  misc_feature (11)..(190): Pfam Name: Domain of unknown function (DUF383) Pfam Description: Domain of unknown function (DUF383)
  misc_feature (1)..(239): Homolog of NCBI NO: 15223707 NR Description: hypothetical protein; protein id: At1g14300.1
  misc_feature (1)..(239): Homolog of NCBI NO: 26449855 NR Description: unknown protein [Arabidopsis thaliana]
  misc_feature (43)..(239): Homolog of NCBI NO: 37534210 NR Description: unknown protein [Oryza sativa (japonica
  misc_feature (1)..(45): Homolog of NCBI NO: 37534210 NR Description: unknown protein [Oryza sativa (japonica
  misc_feature (1)..(242): Homolog of NCBI NO: 19569883 NR Description: SIMILAR TO HYPOTHETICAL PROTEIN [Dictyostelium >gi|28828120|gb|AAO50803.1| similar to Homo sapiens (Human).
  misc_feature (1)..(236): Homolog of NCBI NO: 21356909 NR Description: CG6073-PA [Drosophila melanogaster] GM06077p [Drosophila melanogaster] >gi|21711727|gb|AAM75054.1|
  misc_feature (1)..(205): Homolog of NCBI NO: 19115795 NR Description: hypothetical protein [Schizosaccharomyces pombe]
  misc_feature (1)..(226): Homolog of NCBI NO: 40745990 NR Description: hypothetical protein AN9409.2 [Aspergillus
MIQMGLIKVAMDMLYKPESCITRLLVMLLVNLTQLDDGVSSLLQIDDEKMHGLHIMKLVRSFCRSSGETADDQFEHVGSILVNISKTEDGRKLLLEPKRRLLKQIIRQFDSTNQLRKKGVAGTIRNCCFEAKNQLQNILLISEFLWPALLLPVAGSKTYSEQDVAKMPPELGSALSIEREPVTDPDIRVQTLEAIYLIILEEAGRRAFWSVNGPRILQLGYEYEEDPKAMRAYEQVGSLDLR

SEQ ID NO: 85257 - protein, 239 aa, Arabidopsis thaliana
  peptide (1)..(239): Ceres Seq. ID no. 12679729
  misc_feature (8)..(187): Pfam Name: Domain of unknown function (DUF383) Pfam Description: Domain of unknown function (DUF383)
  misc_feature (1)..(236): Homolog of NCBI NO: 15223707 NR Description: hypothetical protein; protein id: At1g14300.1
  misc_feature (1)..(236): Homolog of NCBI NO: 26449855 NR Description: unknown protein [Arabidopsis thaliana]
  misc_feature (40)..(236): Homolog of NCBI NO: 37534210 NR Description: unknown protein [Oryza sativa (japonica
  misc_feature (1)..(42): Homolog of NCBI NO: 37534210 NR Description: unknown protein [Oryza sativa (japonica
  misc_feature (1)..(239): Homolog of NCBI NO: 19569883 NR Description: SIMILAR TO HYPOTHETICAL PROTEIN [Dictyostelium >gi|28828120|gb|AAO50803.1| similar to Homo sapiens (Human).
  misc_feature (1)..(233): Homolog of NCBI NO: 21356909 NR Description: CG6073-PA [Drosophila melanogaster] GM06077p [Drosophila melanogaster] >gi|21711727|gb|AAM75054.1|
  misc_feature (1)..(202): Homolog of NCBI NO: 19115795 NR Description: hypothetical protein [Schizosaccharomyces pombe]
  misc_feature (1)..(223): Homolog of NCBI NO: 40745990 NR Description: hypothetical protein AN9409.2 [Aspergillus
MGLIKVAMDMLYKPESCITRLLVMLLVNLTQLDDGVSSLLQIDDEKMHGLHIMKLVRSFCRSSGETADDQFEHVGSILVNISKTEDGRKLLLEPKRRLLKQIIRQFDSTNQLRKKGVAGTIRNCCFEAKNQLQNILLISEFLWPALLLPVAGSKTYSEQDVAKMPPELGSALSIEREPVTDPDIRVQTLEAIYLIILEEAGRRAFWSVNGPRILQLGYEYEEDPKAMRAYEQVGSLDLR

SEQ ID NO: 85258 - DNA, 2148 bp, Arabidopsis thaliana
  misc_feature (1)..(2148): Ceres Seq. ID no. 12679822
  misc_feature: MA Experiment ID: 20000794 Result: Up-regulated in Transcription
  misc_feature: MA Experiment 20000794 PARAMETER Experiment Name: At_Petals_P Parameter: Age (day) Value: 23-25 days
  misc_feature: MA Experiment 20000794 PARAMETER Experiment Name: At_Petals_P Parameter: Plant Line Value: WS
  misc_feature: MA Experiment 20000794 PARAMETER Experiment Name: At_Petals_P Parameter: Tissue Value: Petals vs. Whole plant
  misc_feature: MA Experiment ID: 20001910 Result: Up-regulated in Transcription
  misc_feature: MA Experiment 20001910 PARAMETER Experiment Name: At_Drought_Reproduction_P Parameter: Age (day) Value: 37
  misc_feature: MA Experiment 20001910 PARAMETER Experiment Name: At_Drought_Reproduction_P Parameter: Organism Value: A. thaliana
  misc_feature: MA Experiment 20001910 PARAMETER Experiment Name: At_Drought_Reproduction_P Parameter: Plant Line Value: WS
  misc_feature: MA Experiment 20001910 PARAMETER Experiment Name: At_Drought_Reproduction_P Parameter: Timepoint (day) Value: 7
  misc_feature: MA Experiment 20001910 PARAMETER Experiment Name: At_Drought_Reproduction_P Parameter: Tissue Value: Flowers
  misc_feature: MA Experiment 20001910 PARAMETER Experiment Name: At_Drought_Reproduction_P Parameter: Treatment Value: Drought vs. No Drought
atggacaaagtccagcaacaagcagatttattcggtaagacgatatctccgtttgtagcttcacaaccaacaaatgtcggaggattcactgatcagaaaatcattggcggttctgagacgacacaacctccagccacctcacctccttctcctccatcccctgacacacaaacatctcccccgccggcaacagctgctcaaccaccaccgaatcagcctcctaatacaactccacctccaacgcctccttcttcccctccaccttctataactccacctccttcacctcctcagcctcaacctccgcctcaatccaccccaactggagattctccggtggtgattccttttccaaagcctcaattacctcctccttctctttttcctcccccctccttagttaatcagctaccggatccaagacctaatgataataacatacttgaacccatcaacaaccctatttctcttccgtctccgccttctactcccttttcgccaccgtctcaggaaaattccggcagtcaagggtctcctccgttgtcatctttattgcctccgatgcttccgctaaaccctaattctcctggaaaccctttacagcccttggattcacctctgggaggagaatcaaatcgtgtaccctcgtcgtcttcttccccatctcctccttccctctccggatcaaataaccattccggaggctctaatagacataatgccaatagtaacggggatggtggtactagccaacaaagtaatgagtctaattacaccgagaagacagtgattggtattgggatcgcaggtgtgttggtcatattgttcatcgctggcgttttctttgttaggaggaaacaaaagaaaggctcttcttccccgcgctctaaccagtatttgccaccggctaatgtctctgtaaatacagaaggattcatccattacagacagaaacccgggaatgggaacagctcggcgcagaactcttcaccggatactaacagtcttgggaacccaaaacatggtagaggaacccctgactccgcagtaatagggacttcaaagatccatttcacctacgaagagctaagtcagataactgaaggattttgcaagagctttgtggtaggagaaggcgggttcgggtgtgtctacaagggcatcctattcgagggaaagccagtagcgatcaaacagctgaagtcggtcagcgcagaaggatatagagagttcaaagctgaagtagagatcataagcagagtgcatcataggcacttggtgtctcttgtgggttattgcatctctgaacaacacagattcctcatctatgagtttgtccccaacaatactttggattaccatttacatggtacgtacttctttttacagtctctctttgttactaaattaggattctatatagaatatatgtgcaaaaacttaccggttttggaatggagtagaagagtcaggattgcaataggcgcagccaaaggacttgcttatctacatgaagattgccacccaaagattatccatagggacatcaaatcgtcaaacattctgctggatgatgaattcgaagctcaggcaaagtatctagcaccagaatatgcgtcaagcggaaagctaacggatagatcagatgtgttttcatttggagttgtgcttctcgaactcatcaccggtcgcaaacctgttgatacctctcaacctttgggtgaagaaagtctcgtcgaatgggcacgtccaaggctaatcgaggccattgaaaaaggtgacatcagcgaagtagtggatccacggctagagaatgattacgtcgaaagtgaagtctataaaatgattgaaacggcagcgtcttgtgttagacattccgctttaaaacgacctcgtatggttcaggttgttagagctctggacacgagagatgacttgtcggatctgacaaacggagttaaagtgggtcaaagtagggtctacgactccggtcaatacagtaatgagattcgaattttcagacgagcctctgaagattcctcggatcttggtactaatactggctactaccctagccaagactacgccactagccatgaatatgaatctgagagccgagccttcaacacaagtcaccggaaccattga

SEQ ID NO: 85259 - protein, 715 aa, Arabidopsis thaliana
  peptide (1)..(715): Ceres Seq. ID no. 12679823
  misc_feature (43)..(234): Pfam Name: Formin Homology 2 Domain Pfam Description: Formin Homology 2 Domain
  misc_feature (38)..(530): Homolog of NCBI NO: 15223161 NR Description: putative protein kinase; protein id: At1g70460.1
  misc_feature (533)..(714): Homolog of NCBI NO: 15223161 NR Description: putative protein kinase; protein id: At1g70460.1
  misc_feature (43)..(457): Homolog of NCBI NO: 15220786 NR Description: Pto kinase interactor, putative; protein id:
  misc_feature (532)..(709): Homolog of NCBI NO: 15220786 NR Description: Pto kinase interactor, putative; protein id:
  misc_feature (479)..(531): Homolog of NCBI NO: 15220786 NR Description: Pto kinase interactor, putative; protein id:
  misc_feature (43)..(429): Homolog of NCBI NO: 8778584 NR Description: F28C11.17 [Arabidopsis thaliana]
  misc_feature (532)..(709): Homolog of NCBI NO: 8778584 NR Description: F28C11.17 [Arabidopsis thaliana]
  misc_feature (479)..(531): Homolog of NCBI NO: 8778584 NR Description: F28C11.17 [Arabidopsis thaliana]
  misc_feature (344)..(709): Homolog of NCBI NO: 25518375 NR Description: hypothetical protein F5O8.10 - Arabidopsis
  misc_feature (35)..(335): Homolog of NCBI NO: 25518375 NR Description: hypothetical protein F5O8.10 - Arabidopsis
MDKVQQQADLFGKTISPFVASQPTNVGGFTDQKIIGGSETTQPPATSPPSPPSPDTQTSPPPATAAQPPPNQPPNTTPPPTPPSSPPPSITPPPSPPQPQPPPQSTPTGDSPVVIPFPKPQLPPPSLFPPPSLVNQLPDPRPNDNNILEPINNPISLPSPPSTPFSPPSQENSGSQGSPPLSSLLPPMLPLNPNSPGNPLQPLDSPLGGESNRVPSSSSSPSPPSLSGSNNHSGGSNRHNANSNGDGGTSQQSNESNYTEKTVIGIGIAGVLVILFIAGVFFVRRKQKKGSSSPRSNQYLPPANVSVNTEGFIHYRQKPGNGNSSAQNSSPDTNSLGNPKHGRGTPDSAVIGTSKIHFTYEELSQITEGFCKSFVVGEGGFGCVYKGILFEGKPVAIKQLKSVSAEGYREFKAEVEIISRVHHRHLVSLVGYCISEQHRFLIYEFVPNNTLDYHLHGTYFFLQSLFVTKLGFYIEYMCKNLPVLEWSRRVRIAIGAAKGLAYLHEDCHPKIIHRDIKSSNILLDDEFEAQAKYLAPEYASSGKLTDRSDVFSFGVVLLELITGRKPVDTSQPLGEESLVEWARPRLIEAIEKGDISEVVDPRLENDYVESEVYKMIETAASCVRHSALKRPRMVQVVRALDTRDDLSDLTNGVKVGQSRVYDSGQYSNEIRIFRRASEDSSDLGTNTGYYPSQDYATSHEYESESRAFNTSHRNH

SEQ ID NO: 85260 - protein, 528 aa, Arabidopsis thaliana
  peptide (1)..(528): Ceres Seq. ID no. 12679824
  misc_feature (1)..(51): Pfam Name: Formin Homology 2 Domain Pfam Description: Formin Homology 2 Domain
  misc_feature (1)..(343): Homolog of NCBI NO: 15223161 NR Description: putative protein kinase; protein id: At1g70460.1
  misc_feature (346)..(527): Homolog of NCBI NO: 15223161 NR Description: putative protein kinase; protein id: At1g70460.1
  misc_feature (1)..(270): Homolog of NCBI NO: 15220786 NR Description: Pto kinase interactor, putative; protein id:
  misc_feature (345)..(522): Homolog of NCBI NO: 15220786 NR Description: Pto kinase interactor, putative; protein id:
  misc_feature (292)..(344): Homolog of NCBI NO: 15220786 NR Description: Pto kinase interactor, putative; protein id:
  misc_feature (1)..(242): Homolog of NCBI NO: 8778584 NR Description: F28C11.17 [Arabidopsis thaliana]
  misc_feature (345)..(522): Homolog of NCBI NO: 8778584 NR Description: F28C11.17 [Arabidopsis thaliana]
  misc_feature (292)..(344): Homolog of NCBI NO: 8778584 NR Description: F28C11.17 [Arabidopsis thaliana]
  misc_feature (157)..(522): Homolog of NCBI NO: 25518375 NR Description: hypothetical protein F5O8.10 - Arabidopsis
  misc_feature (1)..(148): Homolog of NCBI NO: 25518375 NR Description: hypothetical protein F5O8.10 - Arabidopsis
MLPLNPNSPGNPLQPLDSPLGGESNRVPSSSSSPSPPSLSGSNNHSGGSNRHNANSNGDGGTSQQSNESNYTEKTVIGIGIAGVLVILFIAGVFFVRRKQKKGSSSPRSNQYLPPANVSVNTEGFIHYRQKPGNGNSSAQNSSPDTNSLGNPKHGRGTPDSAVIGTSKIHFTYEELSQITEGFCKSFVVGEGGFGCVYKGILFEGKPVAIKQLKSVSAEGYREFKAEVEIISRVHHRHLVSLVGYCISEQHRFLIYEFVPNNTLDYHLHGTYFFLQSLFVTKLGFYIEYMCKNLPVLEWSRRVRIAIGAAKGLAYLHEDCHPKIIHRDIKSSNILLDDEFEAQAKYLAPEYASSGKLTDRSDVFSFGVVLLELITGRKPVDTSQPLGEESLVEWARPRLIEAIEKGDISEVVDPRLENDYVESEVYKMIETAASCVRHSALKRPRMVQVVRALDTRDDLSDLTNGVKVGQSRVYDSGQYSNEIRIFRRASEDSSDLGTNTGYYPSQDYATSHEYESESRAFNTSHRNH

SEQ ID NO: 85261 - DNA, 3897 bp, Arabidopsis thaliana
  misc_feature (1)..(3897): Ceres Seq. ID no. 12679840
  misc_feature: MA Experiment ID: 20000355 Result: Up-regulated in Transcription
  misc_feature: MA Experiment 20000355 PARAMETER Experiment Name: At_Siliques_Sub_P Parameter: Age (day) Value: 21
  misc_feature: MA Experiment 20000355 PARAMETER Experiment Name: At_Siliques_Sub_P Parameter: Organism Value: A. thaliana
  misc_feature: MA Experiment 20000355 PARAMETER Experiment Name: At_Siliques_Sub_P Parameter: Plant Line Value: WS
  misc_feature: MA Experiment 20000355 PARAMETER Experiment Name: At_Siliques_Sub_P Parameter: Tissue Value: Less Than 5mm Siliques vs. Whole Plant
atgcaaccgtcaaatgatccagcaatcgtggacatggcagcggcggagaaggagaagaagcggccaagtgtatcatttcttaagctcttctcatttgctgatttttacgattgcgttctgatggctcttggatccattggtgcttgcattcacggagcctccgttccagttttcttcatcttctttggcaaactcatcaacatcatcggtcttgcttacctcttcccacaagaagcttctcacaaagtcgccaagtactcgttggattttgtatatctgagtgtggtgatactcttttcatcatggttagaggttgcatgttggatgcatacgggagagagacaagcagcgaagattagaaaagcttatttgcggtcaatgttaagccaagacataagcttattcgacaccgagatttccaccggagaagtcatctccgccatcacctccgagatccttgttgtccaagacgctatctccgagaaggtacgctataccaagatcaaaccggtattggtcttaaattttggatgttggatttttaattttcctatagcaagcatgcatcttgtagggaatttcatgcacttcataagccggttcatagccggttttgcgatcgggttcgcgagcgtatggcaaataagtctcgtcactctctccatagtcccattcattgctctcgccggcggaatttacgcttttgtcagcagcggacttatcgtccgtgtccggaaatcatacgtcaaggccaacgagatcgcagaagaggtgatcgggaatgtgaggaccgtacaagcgtttacgggagaagaaaaggcggtgagttcgtaccaaggagctttgaggaacacttacaattacgggagaaaagccggtttagccaaaggactagggcttggttcgttgcattttgtcctgtttttgtcttgggctttgctcatttggttcacaagcatcgttgttcacaagggaatcgctaatggtggcgaatctttcacgaccatgctcaatgttgtcatcgctggcttgtctcttggtcaggcggctcctgacatttccacattcatgcgagccagtgctgctgcgtatccgatttttcagatgattgaacggaacacggaggataaaacaggtcgtaaactcgggaatgtaaacggagacattctattcaaagacgtgactttcacatacccctctcgccctgatgtggtgatctttgacaagctaaacttcgtgatccctgcggggaaagtcgtggctcttgttggaggaagcgggtctgggaaaagcaccatgatatccttaattgaacgattctacgagcctaccgatggagcggtgatgctggatgggaacgatatcagatacttggatcttaagtggttaagaggtcatattggtttggttaatcaagagcctgtcctgtttgcaaccacgattcgcgagaacattatgtatggtaaagacgatgccacctctgaggaaattaccaatgctgcaaagctctcggaagccatctcattcatcaacaacctaccggaaggattcgaaactcaggtatgtcgaacatcagatagcttagaacacaagaaattaacaactgtaaaccctagattttgcttgttattcggtttacaggtaggtgagagaggaattcagctatctggcgggcagaagcagaggatcagtatttctagggcgatagtgaagaatccatcgatcctcttactcgatgaggcaacaagcgcactagatgcagagtcagagaaaatcgtgcaggaagctttggacagggtgatggttgggagaacaacggtcgtggtggctcatagactctccactgtaagaaacgctgacatcatagccgttgttggaggagggaagatcattgagtccggaagccacgacgaactcatatctaaccctgatggagcttattcttctcttcttcgtatccaagaagctgccagccctaacttgaaccacactccaagcttaccagtcagtacaaaacccttgccggaactaccaatcacggagacgacctcgtccattcatcaatcagtaaaccaaccagatacgaccaaacaggccaaagtaacggtgggacgtctttactctatgatccgtccggattggaaatacggattatgtgggacgttaggttcctttattgcgggatctcaaatgccgcttttcgcgcttggtatcgcacaggctttagtatcttattacatggactgggagacaactcaaaacgaggtcaaaagaatctctatcctcttctgttgtggctccgtcatcactgtcatcgtacataccattgagcataccacctttggtattatgggtgagcgtctcactctccgagtccgacaaaagatgttttcagcgatcttgaggaatgaaatcgggtggtttgataaggttgataacactagttcgatgttggcatcgcggcttgaaagtgatgcgactttgcttagaaccatcgtggtcgatagatcgacaattctacttgagaatttaggtcttgttgtgactgctttcatcatttcttttatactcaactggcgtctcactcttgttgtcttggccacataccccttgattataagcggtcatatcagcgaggtaaaacgcagctttttgcgtttttacatacttttttttggtcgtcaaaaaattttcatgcaaggctatggaggaaacttgagtaaagcgtatttaaaggctaacatgttggctggagagtctattagcaacatccgaaccgtggtcgccttttgtgcagaggagaaggttttagacctttattccaaagagcttctagaaccttcagaacgttctttcaggcgtggacagatggccgggattttgtacggtgtttctcaattcttcatcttctcctcctacggccttgccctctggtacggatcgattttgatggagaaaggattatcaagtttcgaatctgtgatgaaaacattcatggttttgatagtaacggcgttagtgatgggtgaagtgttggctctagccccagatcttcttaaaggaaaccagatggttgtttcggttttcgagctattggatcgaagaacacaggttgttggtgatactggtgaggagctgagtaatgtggaaggcactatagagctcaaaggtgttcatttcagttatccttcacggcctgatgtgactattttcagcgatttcaatctactagttccttctggcaaaagcatggcgcttgtgggacaaagcggatctggaaaaagttcggttctttcgcttgttctccggttctacgatcctacagccggaataatcatgatagacgggcaagacatcaagaaactgaagttgaaatcactgcgaagacacattggtctggttcaacaagaaccggctctgtttgcaacgactatctatgagaacatcttgtatggtaaagaaggagcttctgaatctgaagtcatggaagcagctaagcttgcaaatgctcacagtttcatcagctctctccctgaaggttactcaaccaaagtcggtgaacgtggcattcagatgtcaggcggccagagacagagaattgctatagctagagccgtcctcaagaacccagagattctgcttcttgatgaagccacaagcgccttagatgttgaatcagagcgtgtggtacaacaagcattggatcggctaatgagagaccgaaccacggtggtggtggctcaccggctatcgacgatcaagaactcagatatgataagtgtaatacaagacggtaagatcatagagcaaggcagccacaatatcctcgttgagaacaagaatggtccctactctaaacttatcagtcttcagcagcggcagcgccatcatccttaa

SEQ ID NO: 85262 - protein, 1298 aa, Arabidopsis thaliana
  peptide (1)..(1298): Ceres Seq. ID no. 12679841
  misc_feature (34)..(343): Pfam Name: ABC transporter transmembrane region Pfam Description: ABC transporter transmembrane region
  misc_feature (191)..(1297): Homolog of NCBI NO: 27368845 NR Description: MDR-like ABC transporter [Oryza sativa (japonica
  misc_feature (22)..(163): Homolog of NCBI NO: 27368845 NR Description: MDR-like ABC transporter [Oryza sativa (japonica
  misc_feature (191)..(879): Homolog of NCBI NO: 15236067 NR Description: multidrug resistance P-glycoprotein, putative; id: At4g25960.1, supported by cDNA: gi_20466379 [Arabidopsis
  misc_feature (191)..(1297): Homolog of NCBI NO: 28071306 NR Description: P0705A05.10 [Oryza sativa (japonica
  misc_feature (19)..(163): Homolog of NCBI NO: 28071306 NR Description: P0705A05.10 [Oryza sativa (japonica
  misc_feature (191)..(879): Homolog of NCBI NO: 20466380 NR Description: P-glycoprotein-2 [Arabidopsis thaliana]
  misc_feature (191)..(1297): Homolog of NCBI NO: 27368847 NR Description: MDR-like ABC transporter [Oryza sativa (japonica
  misc_feature (16)..(163): Homolog of NCBI NO: 27368847 NR Description: MDR-like ABC transporter [Oryza sativa (japonica
  misc_feature (141)..(1292): Homolog of NCBI NO: 4204793 NR Description: P-glycoprotein [Solanum tuberosum]
  misc_feature (22)..(163): Homolog of NCBI NO: 4204793 NR Description: P-glycoprotein [Solanum tuberosum]
MQPSNDPAIVDMAAAEKEKKRPSVSFLKLFSFADFYDCVLMALGSIGACIHGASVPVFFIFFGKLINIIGLAYLFPQEASHKVAKYSLDFVYLSVVILFSSWLEVACWMHTGERQAAKIRKAYLRSMLSQDISLFDTEISTGEVISAITSEILVVQDAISEKVRYTKIKPVLVLNFGCWIFNFPIASMHLVGNFMHFISRFIAGFAIGFASVWQISLVTLSIVPFIALAGGIYAFVSSGLIVRVRKSYVKANEIAEEVIGNVRTVQAFTGEEKAVSSYQGALRNTYNYGRKAGLAKGLGLGSLHFVLFLSWALLIWFTSIVVHKGIANGGESFTTMLNVVIAGLSLGQAAPDISTFMRASAAAYPIFQMIERNTEDKTGRKLGNVNGDILFKDVTFTYPSRPDVVIFDKLNFVIPAGKVVALVGGSGSGKSTMISLIERFYEPTDGAVMLDGNDIRYLDLKWLRGHIGLVNQEPVLFATTIRENIMYGKDDATSEEITNAAKLSEAISFINNLPEGFETQVCRTSDSLEHKKLTTVNPRFCLLFGLQVGERGIQLSGGQKQRISISRAIVKNPSILLLDEATSALDAESEKIVQEALDRVMVGRTTVVVAHRLSTVRNADIIAVVGGGKIIESGSHDELISNPDGAYSSLLRIQEAASPNLNHTPSLPVSTKPLPELPITETTSSIHQSVNQPDTTKQAKVTVGRLYSMIRPDWKYGLCGTLGSFIAGSQMPLFALGIAQALVSYYMDWETTQNEVKRISILFCCGSVITVIVHTIEHTTFGIMGERLTLRVRQKMFSAILRNEIGWFDKVDNTSSMLASRLESDATLLRTIVVDRSTILLENLGLVVTAFIISFILNWRLTLVVLATYPLIISGHISEVKRSFLRFYILFFGRQKIFMQGYGGNLSKAYLKANMLAGESISNIRTVVAFCAEEKVLDLYSKELLEPSERSFRRGQMAGILYGVSQFFIFSSYGLALWYGSILMEKGLSSFESVMKTFMVLIVTALVMGEVLALAPDLLKGNQMVVSVFELLDRRTQVVGDTGEELSNVEGTIELKGVHFSYPSRPDVTIFSDFNLLVPSGKSMALVGQSGSGKSSVLSLVLRFYDPTAGIIMIDGQDIKKLKLKSLRRHIGLVQQEPALFATTIYENILYGKEGASESEVMEAAKLANAHSFISSLPEGYSTKVGERGIQMSGGQRQRIAIARAVLKNPEILLLDEATSALDVESERVVQQALDRLMRDRTTVVVAHRLSTIKNSDMISVIQDGKIIEQGSHNILVENKNGPYSKLISLQQRQRHHP

SEQ ID NO: 85263 - protein, 1287 aa, Arabidopsis thaliana
  peptide (1)..(1287): Ceres Seq. ID no. 12679842
  misc_feature (23)..(332): Pfam Name: ABC transporter transmembrane region Pfam Description: ABC transporter transmembrane region
  misc_feature (180)..(1286): Homolog of NCBI NO: 27368845 NR Description: MDR-like ABC transporter [Oryza sativa (japonica
  misc_feature (11)..(152): Homolog of NCBI NO: 27368845 NR Description: MDR-like ABC transporter [Oryza sativa (japonica
  misc_feature (180)..(868): Homolog of NCBI NO: 15236067 NR Description: multidrug resistance P-glycoprotein, putative; id: At4g25960.1, supported by cDNA: gi_20466379 [Arabidopsis
  misc_feature (180)..(1286): Homolog of NCBI NO: 28071306 NR Description: P0705A05.10 [Oryza sativa (japonica
  misc_feature (8)..(152): Homolog of NCBI NO: 28071306 NR Description: P0705A05.10 [Oryza sativa (japonica
  misc_feature (180)..(868): Homolog of NCBI NO: 20466380 NR Description: P-glycoprotein-2 [Arabidopsis thaliana]
  misc_feature (180)..(1286): Homolog of NCBI NO: 27368847 NR Description: MDR-like ABC transporter [Oryza sativa (japonica
  misc_feature (5)..(152): Homolog of NCBI NO: 27368847 NR Description: MDR-like ABC transporter [Oryza sativa (japonica
  misc_feature (130)..(1281): Homolog of NCBI NO: 4204793 NR Description: P-glycoprotein [Solanum tuberosum]
  misc_feature (11)..(152): Homolog of NCBI NO: 4204793 NR Description: P-glycoprotein [Solanum tuberosum]
MAAAEKEKKRPSVSFLKLFSFADFYDCVLMALGSIGACIHGASVPVFFIFFGKLINIIGLAYLFPQEASHKVAKYSLDFVYLSVVILFSSWLEVACWMHTGERQAAKIRKAYLRSMLSQDISLFDTEISTGEVISAITSEILVVQDAISEKVRYTKIKPVLVLNFGCWIFNFPIASMHLVGNFMHFISRFIAGFAIGFASVWQISLVTLSIVPFIALAGGIYAFVSSGLIVRVRKSYVKANEIAEEVIGNVRTVQAFTGEEKAVSSYQGALRNTYNYGRKAGLAKGLGLGSLHFVLFLSWALLIWFTSIVVHKGIANGGESFTTMLNVVIAGLSLGQAAPDISTFMRASAAAYPIFQMIERNTEDKTGRKLGNVNGDILFKDVTFTYPSRPDVVIFDKLNFVIPAGKVVALVGGSGSGKSTMISLIERFYEPTDGAVMLDGNDIRYLDLKWLRGHIGLVNQEPVLFATTIRENIMYGKDDATSEEITNAAKLSEAISFINNLPEGFETQVCRTSDSLEHKKLTTVNPRFCLLFGLQVGERGIQLSGGQKQRISISRAIVKNPSILLLDEATSALDAESEKIVQEALDRVMVGRTTVVVAHRLSTVRNADIIAVVGGGKIIESGSHDELISNPDGAYSSLLRIQEAASPNLNHTPSLPVSTKPLPELPITETTSSIHQSVNQPDTTKQAKVTVGRLYSMIRPDWKYGLCGTLGSFIAGSQMPLFALGIAQALVSYYMDWETTQNEVKRISILFCCGSVITVIVHTIEHTTFGIMGERLTLRVRQKMFSAILRNEIGWFDKVDNTSSMLASRLESDATLLRTIVVDRSTILLENLGLVVTAFIISFILNWRLTLVVLATYPLIISGHISEVKRSFLRFYILFFGRQKIFMQGYGGNLSKAYLKANMLAGESISNIRTVVAFCAEEKVLDLYSKELLEPSERSFRRGQMAGILYGVSQFFIFSSYGLALWYGSILMEKGLSSFESVMKTFMVLIVTALVMGEVLALAPDLLKGNQMVVSVFELLDRRTQVVGDTGEELSNVEGTIELKGVHFSYPSRPDVTIFSDFNLLVPSGKSMALVGQSGSGKSSVLSLVLRFYDPTAGIIMIDGQDIKKLKLKSLRRHIGLVQQEPALFATTIYENILYGKEGASESEVMEAAKLANAHSFISSLPEGYSTKVGERGIQMSGGQRQRIAIARAVLKNPEILLLDEATSALDVESERVVQQALDRLMRDRTTVVVAHRLSTIKNSDMISVIQDGKIIEQGSHNILVENKNGPYSKLISLQQRQRHHP

SEQ ID NO: 85264 - protein, 1258 aa, Arabidopsis thaliana
  peptide (1)..(1258): Ceres Seq. ID no. 12679843
  misc_feature (1)..(303): Pfam Name: ABC transporter transmembrane region Pfam Description: ABC transporter transmembrane region
  misc_feature (151)..(1257): Homolog of NCBI NO: 27368845 NR Description: MDR-like ABC transporter [Oryza sativa (japonica
  misc_feature (1)..(123): Homolog of NCBI NO: 27368845 NR Description: MDR-like ABC transporter [Oryza sativa (japonica
  misc_feature (151)..(839): Homolog of NCBI NO: 15236067 NR Description: multidrug resistance P-glycoprotein, putative; id: At4g25960.1, supported by cDNA: gi_20466379 [Arabidopsis
  misc_feature (151)..(1257): Homolog of NCBI NO: 28071306 NR Description: P0705A05.10 [Oryza sativa (japonica
  misc_feature (1)..(123): Homolog of NCBI NO: 28071306 NR Description: P0705A05.10 [Oryza sativa (japonica
  misc_feature (151)..(839): Homolog of NCBI NO: 20466380 NR Description: P-glycoprotein-2 [Arabidopsis thaliana]
  misc_feature (151)..(1257): Homolog of NCBI NO: 27368847 NR Description: MDR-like ABC transporter [Oryza sativa (japonica
  misc_feature (1)..(123): Homolog of NCBI NO: 27368847 NR Description: MDR-like ABC transporter [Oryza sativa (japonica
  misc_feature (101)..(1252): Homolog of NCBI NO: 4204793 NR Description: P-glycoprotein [Solanum tuberosum]
  misc_feature (1)..(123): Homolog of NCBI NO: 4204793 NR Description: P-glycoprotein [Solanum tuberosum]
MALGSIGACIHGASVPVFFIFFGKLINIIGLAYLFPQEASHKVAKYSLDFVYLSVVILFSSWLEVACWMHTGERQAAKIRKAYLRSMLSQDISLFDTEISTGEVISAITSEILVVQDAISEKVRYTKIKPVLVLNFGCWIFNFPIASMHLVGNFMHFISRFIAGFAIGFASVWQISLVTLSIVPFIALAGGIYAFVSSGLIVRVRKSYVKANEIAEEVIGNVRTVQAFTGEEKAVSSYQGALRNTYNYGRKAGLAKGLGLGSLHFVLFLSWALLIWFTSIVVHKGIANGGESFTTMLNVVIAGLSLGQAAPDISTFMRASAAAYPIFQMIERNTEDKTGRKLGNVNGDILFKDVTFTYPSRPDVVIFDKLNFVIPAGKVVALVGGSGSGKSTMISLIERFYEPTDGAVMLDGNDIRYLDLKWLRGHIGLVNQEPVLFATTIRENIMYGKDDATSEEITNAAKLSEAISFINNLPEGFETQVCRTSDSLEHKKLTTVNPRFCLLFGLQVGERGIQLSGGQKQRISISRAIVKNPSILLLDEATSALDAESEKIVQEALDRVMVGRTTVVVAHRLSTVRNADIIAVVGGGKIIESGSHDELISNPDGAYSSLLRIQEAASPNLNHTPSLPVSTKPLPELPITETTSSIHQSVNQPDTTKQAKVTVGRLYSMIRPDWKYGLCGTLGSFIAGSQMPLFALGIAQALVSYYMDWETTQNEVKRISILFCCGSVITVIVHTIEHTTFGIMGERLTLRVRQKMFSAILRNEIGWFDKVDNTSSMLASRLESDATLLRTIVVDRSTILLENLGLVVTAFIISFILNWRLTLVVLATYPLIISGHISEVKRSFLRFYILFFGRQKIFMQGYGGNLSKAYLKANMLAGESISNIRTVVAFCAEEKVLDLYSKELLEPSERSFRRGQMAGILYGVSQFFIFSSYGLALWYGSILMEKGLSSFESVMKTFMVLIVTALVMGEVLALAPDLLKGNQMVVSVFELLDRRTQVVGDTGEELSNVEGTIELKGVHFSYPSRPDVTIFSDFNLLVPSGKSMALVGQSGSGKSSVLSLVLRFYDPTAGIIMIDGQDIKKLKLKSLRRHIGLVQQEPALFATTIYENILYGKEGASESEVMEAAKLANAHSFISSLPEGYSTKVGERGIQMSGGQRQRIAIARAVLKNPEILLLDEATSALDVESERVVQQALDRLMRDRTTVVVAHRLSTIKNSDMISVIQDGKIIEQGSHNILVENKNGPYSKLISLQQRQRHHP

SEQ ID NO: 85265 - DNA, 2109 bp, Arabidopsis thaliana
  misc_feature (1)..(2109): Ceres Seq. ID no. 12679907
  misc_feature: MA Experiment ID: 20000169 Result: Down-regulated in Transcription
  misc_feature: MA Experiment 20000169 PARAMETER Experiment Name: At_100uM_ABA_P Parameter: Age (day) Value: 14
  misc_feature: MA Experiment 20000169 PARAMETER Experiment Name: At_100uM_ABA_P Parameter: Organism Value: A. thaliana
  misc_feature: MA Experiment 20000169 PARAMETER Experiment Name: At_100uM_ABA_P Parameter: Plant Line Value: WS
  misc_feature: MA Experiment 20000169 PARAMETER Experiment Name: At_100uM_ABA_P Parameter: Timepoint (hr) Value: 6
  misc_feature: MA Experiment 20000169 PARAMETER Experiment Name: At_100uM_ABA_P Parameter: Tissue Value: Aerial
  misc_feature: MA Experiment 20000169 PARAMETER Experiment Name: At_100uM_ABA_P Parameter: Treatment Value: 100uM ABA vs. No Treatment
  misc_feature: MA Experiment ID: 20000179 Result: Up-regulated in Transcription
  misc_feature: MA Experiment 20000179 PARAMETER Experiment Name: At_Germinating_Seeds_P Parameter: Age (hr) Value: 6 vs. 0
  misc_feature: MA Experiment 20000179 PARAMETER Experiment Name: At_Germinating_Seeds_P Parameter: Tissue Value: Germinating Seeds
  misc_feature: MA Experiment ID: 20000180 Result: Up-regulated in Transcription
  misc_feature: MA Experiment 20000180 PARAMETER Experiment Name: At_Germinating_Seeds_P Parameter: Age (hr) Value: 24 vs. 0
  misc_feature: MA Experiment 20000180 PARAMETER Experiment Name: At_Germinating_Seeds_P Parameter: Tissue Value: Germinating Seeds
  misc_feature: MA Experiment ID: 20000182 Result: Down-regulated in Transcription
  misc_feature: MA Experiment 20000182 PARAMETER Experiment Name: At_2mM_SA_P Parameter: Age (day) Value: 14
  misc_feature: MA Experiment 20000182 PARAMETER Experiment Name: At_2mM_SA_P Parameter: Organism Value: A. thaliana
  misc_feature: MA Experiment 20000182 PARAMETER Experiment Name: At_2mM_SA_P Parameter: Plant Line Value: WS
  misc_feature: MA Experiment 20000182 PARAMETER Experiment Name: At_2mM_SA_P Parameter: Timepoint (hr) Value: 6
  misc_feature: MA Experiment 20000182 PARAMETER Experiment Name: At_2mM_SA_P Parameter: Tissue Value: Aerial
  misc_feature: MA Experiment 20000182 PARAMETER Experiment Name: At_2mM_SA_P Parameter: Treatment Value: 2mM SA vs. No Treatment
  misc_feature: MA Experiment ID: 20000184 Result: Up-regulated in Transcription
  misc_feature: MA Experiment 20000184 PARAMETER Experiment Name: At_Shoots__P Parameter: Age (day) Value: 7
  misc_feature: MA Experiment 20000184 PARAMETER Experiment Name: At_Shoots__P Parameter: Tissue Value: Shoots vs. Whole Plant
  misc_feature: MA Experiment ID: 20000185 Result: Up-regulated in Transcription
  misc_feature: MA Experiment 20000185 PARAMETER Experiment Name: At_Roots__P Parameter: Age (day) Value: 7 vs. 21
  misc_feature: MA Experiment 20000185 PARAMETER Experiment Name: At_Roots__P Parameter: Organism Value: A. thaliana
  misc_feature: MA Experiment 20000185 PARAMETER Experiment Name: At_Roots__P Parameter: Tissue Value: Roots vs. Whole Plant
  misc_feature: MA Experiment ID: 20000234 Result: Up-regulated in Transcription
  misc_feature: MA Experiment 20000234 PARAMETER Experiment Name: At_Siliques_P Parameter: Age (day) Value: 21
  misc_feature: MA Experiment 20000234 PARAMETER Experiment Name: At_Siliques_P Parameter: Organism Value: A. thaliana
  misc_feature: MA Experiment 20000234 PARAMETER Experiment Name: At_Siliques_P Parameter: Plant Line Value: WS
  misc_feature: MA Experiment 20000234 PARAMETER Experiment Name: At_Siliques_P Parameter: Tissue Value: Less Than 5mm Siliques vs. Whole Plant
  misc_feature: MA Experiment ID: 20000264 Result: Up-regulated in Transcription
  misc_feature: MA Experiment 20000264 PARAMETER Experiment Name: At_Open_Flower_P Parameter: Age (day) Value: 21
  misc_feature: MA Experiment 20000264 PARAMETER Experiment Name: At_Open_Flower_P Parameter: Plant Line Value: WS
  misc_feature: MA Experiment 20000264 PARAMETER Experiment Name: At_Open_Flower_P Parameter: Tissue Value: Open Flower vs. Whole Plant
  misc_feature: MA Experiment ID: 20000265 Result: Up-regulated in Transcription
  misc_feature: MA Experiment 20000265 PARAMETER Experiment Name: At_Open_Flower_P Parameter: Age (day) Value: 21
  misc_feature: MA Experiment 20000265 PARAMETER Experiment Name: At_Open_Flower_P Parameter: Plant Line Value: WS
  misc_feature: MA Experiment 20000265 PARAMETER Experiment Name: At_Open_Flower_P Parameter: Tissue Value: Closed Flower vs. Whole Plant
  misc_feature: MA Experiment ID: 20000286 Result: Up-regulated in Transcription
  misc_feature: MA Experiment 20000286 PARAMETER Experiment Name: At_Open_Flower_P Parameter: Age (day) Value: 21
  misc_feature: MA Experiment 20000286 PARAMETER Experiment Name: At_Open_Flower_P Parameter: Plant Line Value: WS
  misc_feature: MA Experiment 20000286 PARAMETER Experiment Name: At_Open_Flower_P Parameter: Tissue Value: Half Open vs. Whole Plant
  misc_feature: MA Experiment ID: 20000438 Result: Up-regulated in Transcription
  misc_feature: MA Experiment 20000438 PARAMETER Experiment Name: At_Shoots__P Parameter: Age (day) Value: 14
  misc_feature: MA Experiment 20000438 PARAMETER Experiment Name: At_Shoots__P Parameter: Tissue Value: Shoots vs. Whole Plant
  misc_feature: MA Experiment ID: 20000439 Result: Up-regulated in Transcription
  misc_feature: MA Experiment 20000439 PARAMETER Experiment Name: At_Roots__P Parameter: Age (day) Value: 14 vs. 21
  misc_feature: MA Experiment 20000439 PARAMETER Experiment Name: At_Roots__P Parameter: Organism Value: A. thaliana
  misc_feature: MA Experiment 20000439 PARAMETER Experiment Name: At_Roots__P Parameter: Tissue Value: Roots vs. Whole Plant
  misc_feature: MA Experiment ID: 20000496 Result: Up-regulated in Transcription
  misc_feature: MA Experiment 20000496 PARAMETER Experiment Name: At_Guard_Cells_P Parameter: Harvest Date Value: 7/19/2002
  misc_feature: MA Experiment 20000496 PARAMETER Experiment Name: At_Guard_Cells_P Parameter: Organism Value: Canola
  misc_feature: MA Experiment 20000496 PARAMETER Experiment Name: At_Guard_Cells_P Parameter: Tissue Value: Guard Cells vs. Leaves
  misc_feature: MA Experiment ID: 20001247 Result: Down-regulated in Transcription
  misc_feature: MA Experiment 20001247 PARAMETER Experiment Name: At_Far-red-induction_P Parameter: Age (day) Value: 7
  misc_feature: MA Experiment 20001247 PARAMETER Experiment Name: At_Far-red-induction_P Parameter: Light Value: Far-red vs. White
  misc_feature: MA Experiment 20001247 PARAMETER Experiment Name: At_Far-red-induction_P Parameter: Organism Value: A. thaliana
  misc_feature: MA Experiment 20001247 PARAMETER Experiment Name: At_Far-red-induction_P Parameter: Plant Line Value: Columbia
  misc_feature: MA Experiment 20001247 PARAMETER Experiment Name: At_Far-red-induction_P Parameter: Timepoint (hr) Value: 1
  misc_feature: MA Experiment 20001247 PARAMETER Experiment Name: At_Far-red-induction_P Parameter: Tissue Value: Whole Plant
  misc_feature: MA Experiment ID: 20001248 Result: Down-regulated in Transcription
  misc_feature: MA Experiment 20001248 PARAMETER Experiment Name: At_Far-red-induction_P Parameter: Age (day) Value: 7
  misc_feature: MA Experiment 20001248 PARAMETER Experiment Name: At_Far-red-induction_P Parameter: Light Value: Far-red vs. White
  misc_feature: MA Experiment 20001248 PARAMETER Experiment Name: At_Far-red-induction_P Parameter: Organism Value: A. thaliana
  misc_feature: MA Experiment 20001248 PARAMETER Experiment Name: At_Far-red-induction_P Parameter: Plant Line Value: Columbia
  misc_feature: MA Experiment 20001248 PARAMETER Experiment Name: At_Far-red-induction_P Parameter: Timepoint (hr) Value: 4
  misc_feature: MA Experiment 20001248 PARAMETER Experiment Name: At_Far-red-induction_P Parameter: Tissue Value: Whole Plant
  misc_feature: MA Experiment ID: 20001450 Result: Down-regulated in Transcription
  misc_feature: MA Experiment 20001450 PARAMETER Experiment Name: At_Far-red-induction_P Parameter: Age (day) Value: 7
  misc_feature: MA Experiment 20001450 PARAMETER Experiment Name: At_Far-red-induction_P Parameter: Light Value: Far-red vs. White
  misc_feature: MA Experiment 20001450 PARAMETER Experiment Name: At_Far-red-induction_P Parameter: Organism Value: A. thaliana
  misc_feature: MA Experiment 20001450 PARAMETER Experiment Name: At_Far-red-induction_P Parameter: Plant Line Value: Columbia
  misc_feature: MA Experiment 20001450 PARAMETER Experiment Name: At_Far-red-induction_P Parameter: Timepoint (hr) Value: 8
  misc_feature: MA Experiment 20001450 PARAMETER Experiment Name: At_Far-red-induction_P Parameter: Tissue Value: Whole Plant
  misc_feature: MA Experiment ID: 20001451 Result: Down-regulated in Transcription
  misc_feature: MA Experiment 20001451 PARAMETER Experiment Name: At_Far-red-induction_P Parameter: Age (day) Value: 7
  misc_feature: MA Experiment 20001451 PARAMETER Experiment Name: At_Far-red-induction_P Parameter: Light Value: Far-red vs. White
  misc_feature: MA Experiment 20001451 PARAMETER Experiment Name: At_Far-red-induction_P Parameter: Organism Value: A. thaliana
  misc_feature: MA Experiment 20001451 PARAMETER Experiment Name: At_Far-red-induction_P Parameter: Plant Line Value: Columbia
  misc_feature: MA Experiment 20001451 PARAMETER Experiment Name: At_Far-red-induction_P Parameter: Timepoint (hr) Value: 24
  misc_feature: MA Experiment 20001451 PARAMETER Experiment Name: At_Far-red-induction_P Parameter: Tissue Value: Whole Plant
  misc_feature: MA Experiment ID: 20001911 Result: Down-regulated in Transcription
  misc_feature: MA Experiment 20001911 PARAMETER Experiment Name: At_Drought_Reproduction_P Parameter: Age (day) Value: 40
  misc_feature: MA Experiment 20001911 PARAMETER Experiment Name: At_Drought_Reproduction_P Parameter: Organism Value: A. thaliana
  misc_feature: MA Experiment 20001911 PARAMETER Experiment Name: At_Drought_Reproduction_P Parameter: Plant Line Value: WS
  misc_feature: MA Experiment 20001911 PARAMETER Experiment Name: At_Drought_Reproduction_P Parameter: Timepoint (day) Value: 10
  misc_feature: MA Experiment 20001911 PARAMETER Experiment Name: At_Drought_Reproduction_P Parameter: Tissue Value: Flowers
  misc_feature: MA Experiment 20001911 PARAMETER Experiment Name: At_Drought_Reproduction_P Parameter: Treatment Value: Drought vs. No Drought
atgtttcggcgattaataacttgtatatcactttgggagcaccatctctacatcattggcttgcttttggaggagacccttgtggagaaaagtggcaaggtgtggtgtgtgactcctcaaacatcacagaaatggacaattccgcaggctttgccttcttccatccgaaacctatctctctcaagcaatcgcttcactgggaacattccctttacattgtcctttctatccgatttgtctgaactgtcattgggaagcaatcttctatcaggagagataccagattactttcagcagctatcaaaactgacaaaactggacttatcgtctaacatactggaggggcatttaccttcttccatgggagacttagcttctcttaagatattaggatcttttcttaaccgatttgaatgtagaaaacaacttattctcgggacctataccgccaaatctattgaaaattccaaacttcaaccattcatgttacattgtcattataaccgcagaaaagatggaactccgttcaatacatcgattataacaccaccgcctccgcctgtggttgatcctcctcccgctactcaccgtgctcctcctgttccccgtatccctcctgtttctggtgttcccccagcaccttttgctccttttgctccactgcaaccacaacaacatccaccaccatcaccacctctggtctggtcaccaccttcttctgataatggaggaggagatccctggaactctgtgtcagggcaacctaccttgcaaatatcacctccttcaggttcaggatcaggaaaattctggtccactcaaagaatcattctagtagtttcttcagtggccataattgttcttgtatccggtttgtgtgttacactttggagatgttgcagaagtaaaatatataaccgatattacagtggagctcgtaaagatttacaacgaccatacttcaataagcctccatctcaaccaacccccactatgggaaaagtttctcgggagcctatggttaagcctttcgatggatatggagctggagacaggaaatatgggtatccaatgccacagcgggctgaagagagccggagagcaatgcctcctacttcatattataataaggatgttaatacacctcaaaagccgctgcaacaaccaccgaggcagttccagtccaatgatactgcttcaaagagagcggctcatttccccccgggcttgaattcctcatcttctgctactgttttcaccattgcttcacttcagcaatacacaaataatttctcagaagagaatataatcggggaagggtcgattggtaatgtctacagagctgagcttcgtcatggaaagtttcttgcggtgaagaagctgagcaataccatcaacagaacacagagtgacggcgaattcctcaatctagtctccaatgtgttgaagcttaaacgcggtcatatattggagcttcttggttactgtaacgagtttggtcaaaggttacttgtgtatgagtactgtcctaatggatcacttcaagatgcactacatttggatcgcaagttgcacaagaagctcacttggaatgtacgtataaatattgcattaggagcttcaaaggcattgcagtttcttcatgaggtatgtcaaccgccggttgttcaccagaatttcaagtcttccaaggttcttcttgatggaaagctctcagtacgtgttgcagacagcggtttggcttatatgttaccaccacgcccaacgagtcagatggcgggttatgccgctcctgaggttgagtatggaagctacacttgtcagagcgacgtatttagccttggggttgtaatgttagaactgctcactggacgcagaccatttgacaggacaaggccgaggggacatcaaacactagctcagtgggcgattcctcggcttcatgacatcgatgcgttgacaagaatggttgatccgtcattacacggagcgtatccaatgaaatcattgtcacgttttgcagatatcatatcacgttcactgcagatggaaccaggatttagaccgccgatatcagaaatagtccaagatcttcaacatatgatctaa

SEQ ID NO: 85266 - protein, 702 aa, Arabidopsis thaliana
  peptide (1)..(702): Ceres Seq. ID no. 12679908
  misc_feature (162)..(702): Homolog of NCBI NO: 1931637 NR Description: receptor-associated kinase isolog; 3024-808
  misc_feature (419)..(702): Homolog of NCBI NO: 25411997 NR Description: probable LRR receptor protein kinase [imported] -
  misc_feature (46)..(239): Homolog of NCBI NO: 25411997 NR Description: probable LRR receptor protein kinase [imported] -
  misc_feature (53)..(702): Homolog of NCBI NO: 15236294 NR Description: leucine-rich repeat transmembrane protein kinase, protein id: At4g03390.1 [Arabidopsis thaliana]
  misc_feature (379)..(702): Homolog of NCBI NO: 7489783 NR Description: leucine-rich repeat transmembrane protein kinase
  misc_feature (51)..(196): Homolog of NCBI NO: 7489783 NR Description: leucine-rich repeat transmembrane protein kinase
  misc_feature (379)..(702): Homolog of NCBI NO: 7489784 NR Description: leucine-rich repeat transmembrane protein kinase
  misc_feature (51)..(196): Homolog of NCBI NO: 7489784 NR Description: leucine-rich repeat transmembrane protein kinase
  misc_feature (342)..(702): Homolog of NCBI NO: 29367551 NR Description: putative leucine-rich repeat transmembrane
  misc_feature (51)..(197): Homolog of NCBI NO: 29367551 NR Description: putative leucine-rich repeat transmembrane
MFRRLITCISLWEHHLYIIGLLLEETLVEKSGKVWCVTPQTSQKWTIPQALPSSIRNLSLSSNRFTGNIPFTLSFLSDLSELSLGSNLLSGEIPDYFQQLSKLTKLDLSSNILEGHLPSSMGDLASLKILGSFLNRFECRKQLILGTYTAKSIENSKLQPFMLHCHYNRRKDGTPFNTSIITPPPPPVVDPPPATHRAPPVPRIPPVSGVPPAPFAPFAPLQPQQHPPPSPPLVWSPPSSDNGGGDPWNSVSGQPTLQISPPSGSGSGKFWSTQRIILVVSSVAIIVLVSGLCVTLWRCCRSKIYNRYYSGARKDLQRPYFNKPPSQPTPTMGKVSREPMVKPFDGYGAGDRKYGYPMPQRAEESRRAMPPTSYYNKDVNTPQKPLQQPPRQFQSNDTASKRAAHFPPGLNSSSSATVFTIASLQQYTNNFSEENIIGEGSIGNVYRAELRHGKFLAVKKLSNTINRTQSDGEFLNLVSNVLKLKRGHILELLGYCNEFGQRLLVYEYCPNGSLQDALHLDRKLHKKLTWNVRINIALGASKALQFLHEVCQPPVVHQNFKSSKVLLDGKLSVRVADSGLAYMLPPRPTSQMAGYAAPEVEYGSYTCQSDVFSLGVVMLELLTGRRPFDRTRPRGHQTLAQWAIPRLHDIDALTRMVDPSLHGAYPMKSLSRFADIISRSLQMEPGFRPPISEIVQDLQHMI

SEQ ID NO: 85267 - protein, 582 aa, Arabidopsis thaliana
  peptide (1)..(582): Ceres Seq. ID no. 12679909
  misc_feature (42)..(582): Homolog of NCBI NO: 1931637 NR Description: receptor-associated kinase isolog; 3024-808
  misc_feature (299)..(582): Homolog of NCBI NO: 25411997 NR Description: probable LRR receptor protein kinase [imported] -
  misc_feature (1)..(119): Homolog of NCBI NO: 25411997 NR Description: probable LRR receptor protein kinase [imported] -
  misc_feature (1)..(582): Homolog of NCBI NO: 15236294 NR Description: leucine-rich repeat transmembrane protein kinase, protein id: At4g03390.1 [Arabidopsis thaliana]
  misc_feature (259)..(582): Homolog of NCBI NO: 7489783 NR Description: leucine-rich repeat transmembrane protein kinase
  misc_feature (1)..(76): Homolog of NCBI NO: 7489783 NR Description: leucine-rich repeat transmembrane protein kinase
  misc_feature (259)..(582): Homolog of NCBI NO: 7489784 NR Description: leucine-rich repeat transmembrane protein kinase
  misc_feature (1)..(76): Homolog of NCBI NO: 7489784 NR Description: leucine-rich repeat transmembrane protein kinase
  misc_feature (222)..(582): Homolog of NCBI NO: 29367551 NR Description: putative leucine-rich repeat transmembrane
  misc_feature (1)..(77): Homolog of NCBI NO: 29367551 NR Description: putative leucine-rich repeat transmembrane
MGDLASLKILGSFLNRFECRKQLILGTYTAKSIENSKLQPFMLHCHYNRRKDGTPFNTSIITPPPPPVVDPPPATHRAPPVPRIPPVSGVPPAPFAPFAPLQPQQHPPPSPPLVWSPPSSDNGGGDPWNSVSGQPTLQISPPSGSGSGKFWSTQRIILVVSSVAIIVLVSGLCVTLWRCCRSKIYNRYYSGARKDLQRPYFNKPPSQPTPTMGKVSREPMVKPFDGYGAGDRKYGYPMPQRAEESRRAMPPTSYYNKDVNTPQKPLQQPPRQFQSNDTASKRAAHFPPGLNSSSSATVFTIASLQQYTNNFSEENIIGEGSIGNVYRAELRHGKFLAVKKLSNTINRTQSDGEFLNLVSNVLKLKRGHILELLGYCNEFGQRLLVYEYCPNGSLQDALHLDRKLHKKLTWNVRINIALGASKALQFLHEVCQPPVVHQNFKSSKVLLDGKLSVRVADSGLAYMLPPRPTSQMAGYAAPEVEYGSYTCQSDVFSLGVVMLELLTGRRPFDRTRPRGHQTLAQWAIPRLHDIDALTRMVDPSLHGAYPMKSLSRFADIISRSLQMEPGFRPPISEIVQDLQHMI

SEQ ID NO: 85268 - protein, 541 aa, Arabidopsis thaliana; identical to SEQ ID NO: 69499
  peptide (1)..(541): Ceres Seq. ID no. 12679910
  misc_feature (1)..(541): Homolog of NCBI NO: 1931637 NR Description: receptor-associated kinase isolog; 3024-808
  misc_feature (258)..(541): Homolog of NCBI NO: 25411997 NR Description: probable LRR receptor protein kinase [imported] -
  misc_feature (1)..(78): Homolog of NCBI NO: 25411997 NR Description: probable LRR receptor protein kinase [imported] -
  misc_feature (1)..(541): Homolog of NCBI NO: 15236294 NR Description: leucine-rich repeat transmembrane protein kinase, protein id: At4g03390.1 [Arabidopsis thaliana]
  misc_feature (218)..(541): Homolog of NCBI NO: 7489783 NR Description: leucine-rich repeat transmembrane protein kinase
  misc_feature (1)..(35): Homolog of NCBI NO: 7489783 NR Description: leucine-rich repeat transmembrane protein kinase
  misc_feature (218)..(541): Homolog of NCBI NO: 7489784 NR Description: leucine-rich repeat transmembrane protein kinase
  misc_feature (1)..(35): Homolog of NCBI NO: 7489784 NR Description: leucine-rich repeat transmembrane protein kinase
  misc_feature (181)..(541): Homolog of NCBI NO: 29367551 NR Description: putative leucine-rich repeat transmembrane
  misc_feature (1)..(36): Homolog of NCBI NO: 29367551 NR Description: putative leucine-rich repeat transmembrane

SEQ ID NO: 85269 - DNA, 1903 bp, Arabidopsis thaliana
  misc_feature (1)..(1903): Ceres Seq. ID no. 12679922
  misc_feature: MA Experiment ID: 108462 Result: Down-regulated in Transcription
  misc_feature: MA Experiment 108462 PARAMETER Experiment Name: At_Germinating_Seeds_cDNA_P Parameter: Age (day) Value: 2 vs. 0
  misc_feature: MA Experiment 108462 PARAMETER Experiment Name: At_Germinating_Seeds_cDNA_P Parameter: Tissue Value: Germinating Seeds
  misc_feature: MA Experiment ID: 108463 Result: Down-regulated in Transcription
  misc_feature: MA Experiment 108463 PARAMETER Experiment Name: At_Germinating_Seeds_cDNA_P Parameter: Age (day) Value: 3 vs. 0
  misc_feature: MA Experiment 108463 PARAMETER Experiment Name: At_Germinating_Seeds_cDNA_P Parameter: Tissue Value: Germinating Seeds
  misc_feature: MA Experiment ID: 108501 Result: Down-regulated in Transcription
  misc_feature: MA Experiment 108501 PARAMETER Experiment Name: At_ap2_floral_buds_cDNA_P Parameter: Plant Line Value: ap2 (Ler.)
  misc_feature: MA Experiment 108501 PARAMETER Experiment Name: At_ap2_floral_buds_cDNA_P Parameter: Tissue Value: Closed Flower
  misc_feature: MA Experiment ID: 108573 Result: Up-regulated in Transcription
  misc_feature: MA Experiment 108573 PARAMETER Experiment Name: At_Drought_cDNA_P Parameter: Timepoint (hr) Value: 6
  misc_feature: MA Experiment 108573 PARAMETER Experiment Name: At_Drought_cDNA_P Parameter: Tissue Value: Aerial
  misc_feature: MA Experiment 108573 PARAMETER Experiment Name: At_Drought_cDNA_P Parameter: Treatment Value: Drought vs. No Drought
  misc_feature: MA Experiment ID: 108577 Result: Down-regulated in Transcription
  misc_feature: MA Experiment 108577 PARAMETER Experiment Name: At_42deg_Heat_cDNA_P Parameter: Temperature (deg C) Value: 42 vs. 22
  misc_feature: MA Experiment 108577 PARAMETER Experiment Name: At_42deg_Heat_cDNA_P Parameter: Timepoint (hr) Value: 6
  misc_feature: MA Experiment 108577 PARAMETER Experiment Name: At_42deg_Heat_cDNA_P Parameter: Tissue Value: Aerial
  misc_feature: MA Experiment ID: 108594 Result: Up-regulated in Transcription
  misc_feature: MA Experiment 108594 PARAMETER Experiment Name: At_Ler-rhl_Root_cDNA_P Parameter: Plant Line Value: null
  misc_feature: MA Experiment ID: 20000111 Result: Down-regulated in Transcription
  misc_feature: MA Experiment 20000111 PARAMETER Experiment Name: At_42deg_Heat_cDNA_P Parameter: Temperature (deg C) Value: 42 vs. 22
  misc_feature: MA Experiment 20000111 PARAMETER Experiment Name: At_42deg_Heat_cDNA_P Parameter: Timepoint (hr) Value: 6
  misc_feature: MA Experiment 20000111 PARAMETER Experiment Name: At_42deg_Heat_cDNA_P Parameter: Tissue Value: Aerial
  misc_feature: MA Experiment ID: 20000113 Result: Down-regulated in Transcription
  misc_feature: MA Experiment 20000113 PARAMETER Experiment Name: At_42deg_Heat_cDNA_P Parameter: Temperature (deg C) Value: 42 vs. 22
  misc_feature: MA Experiment 20000113 PARAMETER Experiment Name: At_42deg_Heat_cDNA_P Parameter: Timepoint (hr) Value: 8
  misc_feature: MA Experiment 20000113 PARAMETER Experiment Name: At_42deg_Heat_cDNA_P Parameter: Tissue Value: Aerial
  misc_feature: MA Experiment ID: 20000117 Result: Down-regulated in Transcription
  misc_feature: MA Experiment 20000117 PARAMETER Experiment Name: At_100uM_ABA_Mutants_cDNA_P Parameter: Plant Line Value: Columbia
  misc_feature: MA Experiment 20000117 PARAMETER Experiment Name: At_100uM_ABA_Mutants_cDNA_P Parameter: Timepoint (hr) Value: 6
  misc_feature: MA Experiment 20000117 PARAMETER Experiment Name: At_100uM_ABA_Mutants_cDNA_P Parameter: Tissue Value: Aerial
  misc_feature: MA Experiment 20000117 PARAMETER Experiment Name: At_100uM_ABA_Mutants_cDNA_P Parameter: Treatment Value: 100uM ABA vs. No Treatment
  misc_feature: MA Experiment ID: 20000173 Result: Down-regulated in Transcription
  misc_feature: MA Experiment 20000173 PARAMETER Experiment Name: At_42deg_Heat_P Parameter: Age (day) Value: 14
  misc_feature: MA Experiment 20000173 PARAMETER Experiment Name: At_42deg_Heat_P Parameter: Organism Value: A. thaliana
  misc_feature: MA Experiment 20000173 PARAMETER Experiment Name: At_42deg_Heat_P Parameter: Plant Line Value: WS
  misc_feature: MA Experiment 20000173 PARAMETER Experiment Name: At_42deg_Heat_P Parameter: Temperature (deg C) Value: 42 vs. 22
  misc_feature: MA Experiment 20000173 PARAMETER Experiment Name: At_42deg_Heat_P Parameter: Timepoint (hr) Value: 6
  misc_feature: MA Experiment 20000173 PARAMETER Experiment Name: At_42deg_Heat_P Parameter: Tissue Value: Aerial
  misc_feature: MA Experiment ID: 20000179 Result: Down-regulated in Transcription
  misc_feature: MA Experiment 20000179 PARAMETER Experiment Name: At_Germinating_Seeds_P Parameter: Age (hr) Value: 6 vs. 0
  misc_feature: MA Experiment 20000179 PARAMETER Experiment Name: At_Germinating_Seeds_P Parameter: Tissue Value: Germinating Seeds
  misc_feature: MA Experiment ID: 20000180 Result: Down-regulated in Transcription
  misc_feature: MA Experiment 20000180 PARAMETER Experiment Name: At_Germinating_Seeds_P Parameter: Age (hr) Value: 24 vs. 0
  misc_feature: MA Experiment 20000180 PARAMETER Experiment Name: At_Germinating_Seeds_P Parameter: Tissue Value: Germinating Seeds
  misc_feature: MA Experiment ID: 20000185 Result: Down-regulated in Transcription
  misc_feature: MA Experiment 20000185 PARAMETER Experiment Name: At_Roots__P Parameter: Age (day) Value: 7 vs. 21
  misc_feature: MA Experiment 20000185 PARAMETER Experiment Name: At_Roots__P Parameter: Organism Value: A. thaliana
  misc_feature: MA Experiment 20000185 PARAMETER Experiment Name: At_Roots__P Parameter: Tissue Value: Roots vs. Whole Plant
  misc_feature: MA Experiment ID: 20000224 Result: Down-regulated in Transcription
  misc_feature: MA Experiment ID: 20000227 Result: Up-regulated in Transcription
  misc_feature: MA Experiment 20000227 PARAMETER Experiment Name: At_Root-Tips-vs-Tops_P Parameter: Tissue Value: Root Tips vs. Root Tops
  misc_feature: MA Experiment ID: 20000234 Result: Down-regulated in Transcription
  misc_feature: MA Experiment 20000234 PARAMETER Experiment Name: At_Siliques_P Parameter: Age (day) Value: 21
  misc_feature: MA Experiment 20000234 PARAMETER Experiment Name: At_Siliques_P Parameter: Organism Value: A. thaliana
  misc_feature: MA Experiment 20000234 PARAMETER Experiment Name: At_Siliques_P Parameter: Plant Line Value: WS
  misc_feature: MA Experiment 20000234 PARAMETER Experiment Name: At_Siliques_P Parameter: Tissue Value: Less Than 5mm Siliques vs. Whole Plant
  misc_feature: MA Experiment ID: 20000264 Result: Down-regulated in Transcription
  misc_feature: MA Experiment 20000264 PARAMETER Experiment Name: At_Open_Flower_P Parameter: Age (day) Value: 21
  misc_feature: MA Experiment 20000264 PARAMETER Experiment Name: At_Open_Flower_P Parameter: Plant Line Value: WS
  misc_feature: MA Experiment 20000264 PARAMETER Experiment Name: At_Open_Flower_P Parameter: Tissue Value: Open Flower vs. Whole Plant
  misc_feature: MA Experiment ID: 20000265 Result: Down-regulated in Transcription
  misc_feature: MA Experiment 20000265 PARAMETER Experiment Name: At_Open_Flower_P Parameter: Age (day) Value: 21
  misc_feature: MA Experiment 20000265 PARAMETER Experiment Name: At_Open_Flower_P Parameter: Plant Line Value: WS
  misc_feature: MA Experiment 20000265 PARAMETER Experiment Name: At_Open_Flower_P Parameter: Tissue Value: Closed Flower vs. Whole Plant
  misc_feature: MA Experiment ID: 20000268 Result: Down-regulated in Transcription
  misc_feature: MA Experiment 20000268 PARAMETER Experiment Name: At_100mM_NaCl__P Parameter: Age (day) Value: 14
  misc_feature: MA Experiment 20000268 PARAMETER Experiment Name: At_100mM_NaCl__P Parameter: Organism Value: A. thaliana
  misc_feature: MA Experiment 20000268 PARAMETER Experiment Name: At_100mM_NaCl__P Parameter: Plant Line Value: WS
  misc_feature: MA Experiment 20000268 PARAMETER Experiment Name: At_100mM_NaCl__P Parameter: Timepoint (hr) Value: 6
  misc_feature: MA Experiment 20000268 PARAMETER Experiment Name: At_100mM_NaCl__P Parameter: Tissue Value: Whole Plant
  misc_feature: MA Experiment 20000268 PARAMETER Experiment Name: At_100mM_NaCl__P Parameter: Treatment Value: 100mM NaCl vs. No Treatment
  misc_feature: MA Experiment ID: 20000286 Result: Down-regulated in Transcription
  misc_feature: MA Experiment 20000286 PARAMETER Experiment Name: At_Open_Flower_P Parameter: Age (day) Value: 21
  misc_feature: MA Experiment 20000286 PARAMETER Experiment Name: At_Open_Flower_P Parameter: Plant Line Value: WS
  misc_feature: MA Experiment 20000286 PARAMETER Experiment Name: At_Open_Flower_P Parameter: Tissue Value: Half Open vs. Whole Plant
  misc_feature: MA Experiment ID: 20000308 Result: Down-regulated in Transcription
  misc_feature: MA Experiment 20000308 PARAMETER Experiment Name: At_100mM_NaCl__P Parameter: Age (day) Value: 17
  misc_feature: MA Experiment 20000308 PARAMETER Experiment Name: At_100mM_NaCl__P Parameter: Organism Value: A. thaliana
  misc_feature: MA Experiment 20000308 PARAMETER Experiment Name: At_100mM_NaCl__P Parameter: Plant Line Value: WS
  misc_feature: MA Experiment 20000308 PARAMETER Experiment Name: At_100mM_NaCl__P Parameter: Timepoint (hr) Value: 72
  misc_feature: MA Experiment 20000308 PARAMETER Experiment Name: At_100mM_NaCl__P Parameter: Tissue Value: Whole Plant
  misc_feature: MA Experiment 20000308 PARAMETER Experiment Name: At_100mM_NaCl__P Parameter: Treatment Value: 100mM NaCl vs. No Treatment
  misc_feature: MA Experiment ID: 20000438 Result: Down-regulated in Transcription
  misc_feature: MA Experiment 20000438 PARAMETER Experiment Name: At_Shoots__P Parameter: Age (day) Value: 14
  misc_feature: MA Experiment 20000438 PARAMETER Experiment Name: At_Shoots__P Parameter: Tissue Value: Shoots vs. Whole Plant
  misc_feature: MA Experiment ID: 20000439 Result: Down-regulated in Transcription
  misc_feature: MA Experiment 20000439 PARAMETER Experiment Name: At_Roots__P Parameter: Age (day) Value: 14 vs. 21
  misc_feature: MA Experiment 20000439 PARAMETER Experiment Name: At_Roots__P Parameter: Organism Value: A. thaliana
  misc_feature: MA Experiment 20000439 PARAMETER Experiment Name: At_Roots__P Parameter: Tissue Value: Roots vs. Whole Plant
  misc_feature: MA Experiment ID: 20000441 Result: Up-regulated in Transcription
  misc_feature: MA Experiment 20000441 PARAMETER Experiment Name: At_1uM_BR-BRZ__P Parameter: Tissue Value: Shoot Apices
  misc_feature: MA Experiment 20000441 PARAMETER Experiment Name: At_1uM_BR-BRZ__P Parameter: Treatment Value: 1uM BR vs. No Treatment
  misc_feature: MA Experiment ID: 20000443 Result: Up-regulated in Transcription
  misc_feature: MA Experiment 20000443 PARAMETER Experiment Name: At_1uM_BR-BRZ__P Parameter: Tissue Value: Shoot Apices
  misc_feature: MA Experiment 20000443 PARAMETER Experiment Name: At_1uM_BR-BRZ__P Parameter: Treatment Value: 1uM BRZ vs. No Treatment
  misc_feature: MA Experiment ID: 20000452 Result: Down-regulated in Transcription
  misc_feature: MA Experiment 20000452 PARAMETER Experiment Name: At_CS6879_Shoots-Roots_P Parameter: Age (day) Value: 14
  misc_feature: MA Experiment 20000452 PARAMETER Experiment Name: At_CS6879_Shoots-Roots_P Parameter: Organism Value: A. thaliana
  misc_feature: MA Experiment 20000452 PARAMETER Experiment Name: At_CS6879_Shoots-Roots_P Parameter: Plant Line Value: CS6879 vs. WS
  misc_feature: MA Experiment 20000452 PARAMETER Experiment Name: At_CS6879_Shoots-Roots_P Parameter: Tissue Value: Shoots
  misc_feature: MA Experiment ID: 20000496 Result: Up-regulated in Transcription
  misc_feature: MA Experiment 20000496 PARAMETER Experiment Name: At_Guard_Cells_P Parameter: Harvest Date Value: 7/19/2002
  misc_feature: MA Experiment 20000496 PARAMETER Experiment Name: At_Guard_Cells_P Parameter: Organism Value: Canola
  misc_feature: MA Experiment 20000496 PARAMETER Experiment Name: At_Guard_Cells_P Parameter: Tissue Value: Guard Cells vs. Leaves
  misc_feature: MA Experiment ID: 20000573 Result: Up-regulated in Transcription
  misc_feature: MA Experiment 20000573 PARAMETER Experiment Name: At_100uM_ABA_Mutants__P Parameter: Organism Value: A. thaliana
  misc_feature: MA Experiment 20000573 PARAMETER Experiment Name: At_100uM_ABA_Mutants__P Parameter: Plant Line Value: CS22 vs. Ler wt
  misc_feature: MA Experiment 20000573 PARAMETER Experiment Name: At_100uM_ABA_Mutants__P Parameter: Timepoint (hr) Value: N/A
  misc_feature: MA Experiment 20000573 PARAMETER Experiment Name: At_100uM_ABA_Mutants__P Parameter: Tissue Value: Whole Plant
  misc_feature: MA Experiment 20000573 PARAMETER Experiment Name: At_100uM_ABA_Mutants__P Parameter: Treatment Value: None
  misc_feature: MA Experiment ID: 20000794 Result: Down-regulated in Transcription
  misc_feature: MA Experiment 20000794 PARAMETER Experiment Name: At_Petals_P Parameter: Age (day) Value: 23-25 days
  misc_feature: MA Experiment 20000794 PARAMETER Experiment Name: At_Petals_P Parameter: Plant Line Value: WS
  misc_feature: MA Experiment 20000794 PARAMETER Experiment Name: At_Petals_P Parameter: Tissue Value: Petals vs. Whole plant
  misc_feature: MA Experiment ID: 20001247 Result: Up-regulated in Transcription
  misc_feature: MA Experiment 20001247 PARAMETER Experiment Name: At_Far-red-induction_P Parameter: Age (day) Value: 7
  misc_feature: MA Experiment 20001247 PARAMETER Experiment Name: At_Far-red-induction_P Parameter: Light Value: Far-red vs. White
  misc_feature: MA Experiment 20001247 PARAMETER Experiment Name: At_Far-red-induction_P Parameter: Organism Value: A. thaliana
  misc_feature: MA Experiment 20001247 PARAMETER Experiment Name: At_Far-red-induction_P Parameter: Plant Line Value: Columbia
  misc_feature: MA Experiment 20001247 PARAMETER Experiment Name: At_Far-red-induction_P Parameter: Timepoint (hr) Value: 1
  misc_feature: MA Experiment 20001247 PARAMETER Experiment Name: At_Far-red-induction_P Parameter: Tissue Value: Whole Plant
  misc_feature: MA Experiment ID: 20001248 Result: Up-regulated in Transcription
  misc_feature: MA Experiment 20001248 PARAMETER Experiment Name: At_Far-red-induction_P Parameter: Age (day) Value: 7
  misc_feature: MA Experiment 20001248 PARAMETER Experiment Name: At_Far-red-induction_P Parameter: Light Value: Far-red vs. White
  misc_feature: MA Experiment 20001248 PARAMETER Experiment Name: At_Far-red-induction_P Parameter: Organism Value: A. thaliana
  misc_feature: MA Experiment 20001248 PARAMETER Experiment Name: At_Far-red-induction_P Parameter: Plant Line Value: Columbia
  misc_feature: MA Experiment 20001248 PARAMETER Experiment Name: At_Far-red-induction_P Parameter: Timepoint (hr) Value: 4
  misc_feature: MA Experiment 20001248 PARAMETER Experiment Name: At_Far-red-induction_P Parameter: Tissue Value: Whole Plant
  misc_feature: MA Experiment ID: 20001450 Result: Up-regulated in Transcription
  misc_feature: MA Experiment 20001450 PARAMETER Experiment Name: At_Far-red-induction_P Parameter: Age (day) Value: 7
  misc_feature: MA Experiment 20001450 PARAMETER Experiment Name: At_Far-red-induction_P Parameter: Light Value: Far-red vs. White
  misc_feature: MA Experiment 20001450 PARAMETER Experiment Name: At_Far-red-induction_P Parameter: Organism Value: A. thaliana
  misc_feature: MA Experiment 20001450 PARAMETER Experiment Name: At_Far-red-induction_P Parameter: Plant Line Value: Columbia
  misc_feature: MA Experiment 20001450 PARAMETER Experiment Name: At_Far-red-induction_P Parameter: Timepoint (hr) Value: 8
  misc_feature: MA Experiment 20001450 PARAMETER Experiment Name: At_Far-red-induction_P Parameter: Tissue Value: Whole Plant
  misc_feature: MA Experiment ID: 20001451 Result: Up-regulated in Transcription
  misc_feature: MA Experiment 20001451 PARAMETER Experiment Name: At_Far-red-induction_P Parameter: Age (day) Value: 7
  misc_feature: MA Experiment 20001451 PARAMETER Experiment Name: At_Far-red-induction_P Parameter: Light Value: Far-red vs. White
  misc_feature: MA Experiment 20001451 PARAMETER Experiment Name: At_Far-red-induction_P Parameter: Organism Value: A. thaliana
  misc_feature: MA Experiment 20001451 PARAMETER Experiment Name: At_Far-red-induction_P Parameter: Plant Line Value: Columbia
  misc_feature: MA Experiment 20001451 PARAMETER Experiment Name: At_Far-red-induction_P Parameter: Timepoint (hr) Value: 24
  misc_feature: MA Experiment 20001451 PARAMETER Experiment Name: At_Far-red-induction_P Parameter: Tissue Value: Whole Plant
  misc_feature: MA Experiment ID: 20001554 Result: Down-regulated in Transcription
  misc_feature: MA Experiment 20001554 PARAMETER Experiment Name: At_Drought_Soil_Dry_P Parameter: Age (day) Value: 21
  misc_feature: MA Experiment 20001554 PARAMETER Experiment Name: At_Drought_Soil_Dry_P Parameter: Organism Value: A. thaliana
  misc_feature: MA Experiment 20001554 PARAMETER Experiment Name: At_Drought_Soil_Dry_P Parameter: Plant Line Value: WS
  misc_feature: MA Experiment 20001554 PARAMETER Experiment Name: At_Drought_Soil_Dry_P Parameter: Post Timepoint (hr) Value: None
  misc_feature: MA Experiment 20001554 PARAMETER Experiment Name: At_Drought_Soil_Dry_P Parameter: Post-Treatment Value: None
  misc_feature: MA Experiment 20001554 PARAMETER Experiment Name: At_Drought_Soil_Dry_P Parameter: Timepoint (day) Value: 7
  misc_feature: MA Experiment 20001554 PARAMETER Experiment Name: At_Drought_Soil_Dry_P Parameter: Treatment Value: Drought vs. No Drought
  misc_feature: MA Experiment ID: 20001555 Result: Down-regulated in Transcription
  misc_feature: MA Experiment 20001555 PARAMETER Experiment Name: At_Drought_Soil_Dry_P Parameter: Age (day) Value: 24
  misc_feature: MA Experiment 20001555 PARAMETER Experiment Name: At_Drought_Soil_Dry_P Parameter: Organism Value: A. thaliana
  misc_feature: MA Experiment 20001555 PARAMETER Experiment Name: At_Drought_Soil_Dry_P Parameter: Plant Line Value: WS
  misc_feature: MA Experiment 20001555 PARAMETER Experiment Name: At_Drought_Soil_Dry_P Parameter: Post Timepoint (hr) Value: None
  misc_feature: MA Experiment 20001555 PARAMETER Experiment Name: At_Drought_Soil_Dry_P Parameter: Post-Treatment Value: None
  misc_feature: MA Experiment 20001555 PARAMETER Experiment Name: At_Drought_Soil_Dry_P Parameter: Timepoint (day) Value: 10
  misc_feature: MA Experiment 20001555 PARAMETER Experiment Name: At_Drought_Soil_Dry_P Parameter: Treatment Value: Drought vs. No Drought
  misc_feature: MA Experiment ID: 20001556 Result: Down-regulated in Transcription
  misc_feature: MA Experiment 20001556 PARAMETER Experiment Name: At_Drought_Soil_Dry_P Parameter: Age (day) Value: 26
  misc_feature: MA Experiment 20001556 PARAMETER Experiment Name: At_Drought_Soil_Dry_P Parameter: Organism Value: A. thaliana
  misc_feature: MA Experiment 20001556 PARAMETER Experiment Name: At_Drought_Soil_Dry_P Parameter: Plant Line Value: WS
  misc_feature: MA Experiment 20001556 PARAMETER Experiment Name: At_Drought_Soil_Dry_P Parameter: Post Timepoint (hr) Value: None
  misc_feature: MA Experiment 20001556 PARAMETER Experiment Name: At_Drought_Soil_Dry_P Parameter: Post-Treatment Value: None
  misc_feature: MA Experiment 20001556 PARAMETER Experiment Name: At_Drought_Soil_Dry_P Parameter: Timepoint (day) Value: 12
  misc_feature: MA Experiment 20001556 PARAMETER Experiment Name: At_Drought_Soil_Dry_P Parameter: Treatment Value: Drought vs. No Drought
  misc_feature: MA Experiment ID: 20001558 Result: Down-regulated in Transcription
  misc_feature: MA Experiment 20001558 PARAMETER Experiment Name: At_Drought_Soil_Dry_P Parameter: Age (day) Value: 27
  misc_feature: MA Experiment 20001558 PARAMETER Experiment Name: At_Drought_Soil_Dry_P Parameter: Organism Value: A. thaliana
  misc_feature: MA Experiment 20001558 PARAMETER Experiment Name: At_Drought_Soil_Dry_P Parameter: Plant Line Value: WS
  misc_feature: MA Experiment 20001558 PARAMETER Experiment Name: At_Drought_Soil_Dry_P Parameter: Post Timepoint (hr) Value: 6
  misc_feature: MA Experiment 20001558 PARAMETER Experiment Name: At_Drought_Soil_Dry_P Parameter: Post-Treatment Value: Re-Water vs. No Drought
  misc_feature: MA Experiment 20001558 PARAMETER Experiment Name: At_Drought_Soil_Dry_P Parameter: Timepoint (day) Value: 13
  misc_feature: MA Experiment 20001558 PARAMETER Experiment Name: At_Drought_Soil_Dry_P Parameter: Treatment Value: Drought vs. No Drought
  misc_feature: MA Experiment ID: 20001559 Result: Down-regulated in Transcription
  misc_feature: MA Experiment 20001559 PARAMETER Experiment Name: At_Drought_Soil_Dry_P Parameter: Age (day) Value: 28
  misc_feature: MA Experiment 20001559 PARAMETER Experiment Name: At_Drought_Soil_Dry_P Parameter: Organism Value: A. thaliana
  misc_feature: MA Experiment 20001559 PARAMETER Experiment Name: At_Drought_Soil_Dry_P Parameter: Plant Line Value: WS
  misc_feature: MA Experiment 20001559 PARAMETER Experiment Name: At_Drought_Soil_Dry_P Parameter: Post Timepoint (hr) Value: 29
  misc_feature: MA Experiment 20001559 PARAMETER Experiment Name: At_Drought_Soil_Dry_P Parameter: Post-Treatment Value: Re-Water vs. No Drought
  misc_feature: MA Experiment 20001559 PARAMETER Experiment Name: At_Drought_Soil_Dry_P Parameter: Timepoint (day) Value: 14
  misc_feature: MA Experiment 20001559 PARAMETER Experiment Name: At_Drought_Soil_Dry_P Parameter: Treatment Value: Drought vs. No Drought
  misc_feature: MA Experiment ID: 20001560 Result: Down-regulated in Transcription
  misc_feature: MA Experiment 20001560 PARAMETER Experiment Name: At_Drought_Soil_Dry_P Parameter: Age (day) Value: 28
  misc_feature: MA Experiment 20001560 PARAMETER Experiment Name: At_Drought_Soil_Dry_P Parameter: Organism Value: A. thaliana
  misc_feature: MA Experiment 20001560 PARAMETER Experiment Name: At_Drought_Soil_Dry_P Parameter: Plant Line Value: WS
  misc_feature: MA Experiment 20001560 PARAMETER Experiment Name: At_Drought_Soil_Dry_P Parameter: Post Timepoint (hr) Value: None
  misc_feature: MA Experiment 20001560 PARAMETER Experiment Name: At_Drought_Soil_Dry_P Parameter: Post-Treatment Value: None
  misc_feature: MA Experiment 20001560 PARAMETER Experiment Name: At_Drought_Soil_Dry_P Parameter: Timepoint (day) Value: 14
  misc_feature: MA Experiment 20001560 PARAMETER Experiment Name: At_Drought_Soil_Dry_P Parameter: Treatment Value: Drought vs. No Drought
  misc_feature: MA Experiment ID: 20001755 Result: Down-regulated in Transcription
  misc_feature: MA Experiment 20001755 PARAMETER Experiment Name: At_50mM_NH4NO3_L-to-H_P Parameter: Timepoint (hr) Value: 2
  misc_feature: MA Experiment 20001755 PARAMETER Experiment Name: At_50mM_NH4NO3_L-to-H_P Parameter: Tissue Value: Leaf
  misc_feature: MA Experiment 20001755 PARAMETER Experiment Name: At_50mM_NH4NO3_L-to-H_P Parameter: Treatment Value: 50mM NH4NO3 vs 100mM Mannitol
  misc_feature: MA Experiment ID: 20001757 Result: Up-regulated in Transcription
  misc_feature: MA Experiment 20001757 PARAMETER Experiment Name: At_50mM_NH4NO3_L-to-H_P Parameter: Timepoint (hr) Value: 6
  misc_feature: MA Experiment 20001757 PARAMETER Experiment Name: At_50mM_NH4NO3_L-to-H_P Parameter: Tissue Value: Leaf
  misc_feature: MA Experiment 20001757 PARAMETER Experiment Name: At_50mM_NH4NO3_L-to-H_P Parameter: Treatment Value: 50mM NH4NO3 vs 100mM Mannitol
  misc_feature: MA Experiment ID: 20001904 Result: Down-regulated in Transcription
  misc_feature: MA Experiment 20001904 PARAMETER Experiment Name: At_Drought_Reproduction_P Parameter: Age (day) Value: 37
  misc_feature: MA Experiment 20001904 PARAMETER Experiment Name: At_Drought_Reproduction_P Parameter: Organism Value: A. thaliana
  misc_feature: MA Experiment 20001904 PARAMETER Experiment Name: At_Drought_Reproduction_P Parameter: Plant Line Value: WS
  misc_feature: MA Experiment 20001904 PARAMETER Experiment Name: At_Drought_Reproduction_P Parameter: Timepoint (day) Value: 7
  misc_feature: MA Experiment 20001904 PARAMETER Experiment Name: At_Drought_Reproduction_P Parameter: Tissue Value: Rosettes
  misc_feature: MA Experiment 20001904 PARAMETER Experiment Name: At_Drought_Reproduction_P Parameter: Treatment Value: Drought vs. No Drought
  misc_feature: MA Experiment ID: 20001905 Result: Down-regulated in Transcription
  misc_feature: MA Experiment 20001905 PARAMETER Experiment Name: At_Drought_Reproduction_P Parameter: Age (day) Value: 40
  misc_feature: MA Experiment 20001905 PARAMETER Experiment Name: At_Drought_Reproduction_P Parameter: Organism Value: A. thaliana
  misc_feature: MA Experiment 20001905 PARAMETER Experiment Name: At_Drought_Reproduction_P Parameter: Plant Line Value: WS
  misc_feature: MA Experiment 20001905 PARAMETER Experiment Name: At_Drought_Reproduction_P Parameter: Timepoint (day) Value: 10
  misc_feature: MA Experiment 20001905 PARAMETER Experiment Name: At_Drought_Reproduction_P Parameter: Tissue Value: Rosettes
  misc_feature: MA Experiment 20001905 PARAMETER Experiment Name: At_Drought_Reproduction_P Parameter: Treatment Value: Drought vs. No Drought
  misc_feature: MA Experiment ID: 20001906 Result: Down-regulated in Transcription
  misc_feature: MA Experiment 20001906 PARAMETER Experiment Name: At_Drought_Reproduction_P Parameter: Age (day) Value: 35
  misc_feature: MA Experiment 20001906 PARAMETER Experiment Name: At_Drought_Reproduction_P Parameter: Organism Value: A. thaliana
  misc_feature: MA Experiment 20001906 PARAMETER Experiment Name: At_Drought_Reproduction_P Parameter: Plant Line Value: WS
  misc_feature: MA Experiment 20001906 PARAMETER Experiment Name: At_Drought_Reproduction_P Parameter: Timepoint (day) Value: 5
  misc_feature: MA Experiment 20001906 PARAMETER Experiment Name: At_Drought_Reproduction_P Parameter: Tissue Value: Siliques
  misc_feature: MA Experiment 20001906 PARAMETER Experiment Name: At_Drought_Reproduction_P Parameter: Treatment Value: Drought vs. No Drought
  misc_feature: MA Experiment ID: 20001907 Result: Down-regulated in Transcription
  misc_feature: MA Experiment 20001907 PARAMETER Experiment Name: At_Drought_Reproduction_P Parameter: Age (day) Value: 37
  misc_feature: MA Experiment 20001907 PARAMETER Experiment Name: At_Drought_Reproduction_P Parameter: Organism Value: A. thaliana
  misc_feature: MA Experiment 20001907 PARAMETER Experiment Name: At_Drought_Reproduction_P Parameter: Plant Line Value: WS
  misc_feature: MA Experiment 20001907 PARAMETER Experiment Name: At_Drought_Reproduction_P Parameter: Timepoint (day) Value: 7
  misc_feature: MA Experiment 20001907 PARAMETER Experiment Name: At_Drought_Reproduction_P Parameter: Tissue Value: Siliques
  misc_feature: MA Experiment 20001907 PARAMETER Experiment Name: At_Drought_Reproduction_P Parameter: Treatment Value: Drought vs. No Drought
  misc_feature: MA Experiment ID: 20001908 Result: Down-regulated in Transcription
  misc_feature: MA Experiment 20001908 PARAMETER Experiment Name: At_Drought_Reproduction_P Parameter: Age (day) Value: 40
  misc_feature: MA Experiment 20001908 PARAMETER Experiment Name: At_Drought_Reproduction_P Parameter: Organism Value: A. thaliana
  misc_feature: MA Experiment 20001908 PARAMETER Experiment Name: At_Drought_Reproduction_P Parameter: Plant Line Value: WS
  misc_feature: MA Experiment 20001908 PARAMETER Experiment Name: At_Drought_Reproduction_P Parameter: Timepoint (day) Value: 10
  misc_feature: MA Experiment 20001908 PARAMETER Experiment Name: At_Drought_Reproduction_P Parameter: Tissue Value: Siliques
  misc_feature: MA Experiment 20001908 PARAMETER Experiment Name: At_Drought_Reproduction_P Parameter: Treatment Value: Drought vs. No Drought
  misc_feature: MA Experiment ID: 20001911 Result: Down-regulated in Transcription
  misc_feature: MA Experiment 20001911 PARAMETER Experiment Name: At_Drought_Reproduction_P Parameter: Age (day) Value: 40
  misc_feature: MA Experiment 20001911 PARAMETER Experiment Name: At_Drought_Reproduction_P Parameter: Organism Value: A. thaliana
  misc_feature: MA Experiment 20001911 PARAMETER Experiment Name: At_Drought_Reproduction_P Parameter: Plant Line Value: WS
  misc_feature: MA Experiment 20001911 PARAMETER Experiment Name: At_Drought_Reproduction_P Parameter: Timepoint (day) Value: 10
  misc_feature: MA Experiment 20001911 PARAMETER Experiment Name: At_Drought_Reproduction_P Parameter: Tissue Value: Flowers
  misc_feature: MA Experiment 20001911 PARAMETER Experiment Name: At_Drought_Reproduction_P Parameter: Treatment Value: Drought vs. No Drought
atctaatatctctttctcaatttcggttccactttcctttcgtttgcaaaaacccatcccatcaaaaataaacaagagggcctaaagaagaatcctaaagactttacgggtcttgtttaggataaaagaaatgcctgccggtggattcgtcgtcggggatggccaaaaggcttatcccggcaaactcactccctttgttctcttcacttgcgttgttgctgccatgggcggtctcatcttcggatacgatatcggaatctccggtggtgtgacgtctatgccgtctttcctcaagcgattcttcccgtcggtgtatcggaaacaacaagaggacgcgtcaacgaaccagtactgtcagtacgatagcccgacgctaacgatgttcacatcgtctctatatctagcggcgctaatttcgtcgctggtggcttccaccgtgacaagaaagttcggacggcggctctcgatgctcttcggcggcatactcttctgcgccggagctctcatcaatggtttcgccaaacatgtttggatgctcatcgtcggtcgtatcttgcttggtttcggtatcggtttcgctaatcaggctgtgccactgtacctctctgagatggctccatacaaatacagaggagctttaaacattggtttccagctctcaattacaatcggaatcctcgtcgccgaagtgctaaactacttcttcgccaagatcaaaggcggttggggatggcggctcagtctcggaggcgcggtggttcctgccttgatcataaccatcggctccctcgtcctccctgacactcccaattcaatgatcgagcgtggccaacacgaagaagccaaaaccaagctcagacgaatccgtggtgtcgatgacgtcagccaagagtttgacgatttggtcgccgctagtaaagagtcgcagtcgatagagcacccgtggagaaacctcctccgccgcaagtaccgaccacatctcacaatggccgttatgattccgttctttcaacagctaaccggaatcaatgtgattatgttttacgctccggttttgttcaacaccattggtttcacgaccgatgcttctctcatgtccgctgtggtcactggctcggttaacgtggccgctacgcttgtttctatctacggtgttgacagatggggacgtcggtttctctttcttgaaggtggtacacaaatgcttatatgccaggctgtggttgcagcttgcataggggccaagtttggggtagacgggacccctggtgagctaccaaagtggtatgctatagtggttgtaacgttcatttgcatctatgtggcgggttttgcgtggtcgtggggcccactagggtggttagtaccgagtgaaatcttcccgttggagataaggtcggcggcgcagagtatcaccgtgtccgtgaacatgatcttcacgttcattatcgcgcaaatcttcttgacgatgctttgtcatttgaagtttgggttattccttgttttcgcctttttcgtggtggtgatgtcgatctttgtatacattttcttgccggagacgaaagggattccgatagaggagatgggtcaagtgtggaggtcacactggtattggtcaaggtttgtggaggatggtgagtatgggaatgcgcttgagatgggcaagaacagtaaccaagctggaacgaagcatgtttgatttatcattgtttttaatgagagttttaagaaagaaagaaaaaagatttgtaatttctaatgtcgtaaaggaaaaagtgtattagcctagatatttattggtgtttatataattcaataccacatgaagaaattatgcatatgattcttcgttaattgtctgtaattgttatactctttacttaaaccaagtgttttctctttg

SEQ ID NO: 85270 - protein, 522 aa, Arabidopsis thaliana; identical to SEQ ID NO: 22534
  peptide (1)..(522): Ceres Seq. ID no. 12679923
  misc_feature (26)..(489): Pfam Name: Sugar (and other) transporter Pfam Description: Sugar (and other) transporter
  misc_feature (1)..(522): Homolog of NCBI NO: 15220330 NR Description: glucose transporter; protein id: At1g11260.1, by cDNA: 33727., supported by cDNA: gi_15809961, supported by gi_16604672 [Arabidopsis thaliana]
  misc_feature (1)..(522): Homolog of NCBI NO: 81619 NR Description: glucose transport protein STP1 - Arabidopsis >gi|16520|emb|CAA39037.1| glucose transporter [Arabidopsis
  misc_feature (1)..(522): Homolog of NCBI NO: 21618276 NR Description: glucose transporter [Arabidopsis thaliana]
  misc_feature (1)..(516): Homolog of NCBI NO: 30349804 NR Description: monosaccharide-H+ symporter [Datisca glomerata]
  misc_feature (1)..(514): Homolog of NCBI NO: 4138724 NR Description: hexose transporter [Vitis vinifera]
  misc_feature (1)..(512): Homolog of NCBI NO: 3915039 NR Description: Sugar carrier protein C >gi|7446731|pir||T10122
  misc_feature (1)..(514): Homolog of NCBI NO: 4138722 NR Description: hexose transporter [Vitis vinifera]
  misc_feature (1)..(514): Homolog of NCBI NO: 1353516 NR Description: sugar transporter
  misc_feature (1)..(522): Homolog of NCBI NO: 7446727 NR Description: monosaccharid transport protein - fava bean
  misc_feature (3)..(522): Homolog of NCBI NO: 100347 NR Description: monosaccharide transport protein MST1 - common >gi|19885|emb|CAA47324.1| monosaccharid transporter [Nicotiana

SEQ ID NO: 85271 - protein, 491 aa, Arabidopsis thaliana; identical to SEQ ID NO: 22535
  peptide (1)..(491): Ceres Seq. ID no. 12679924
  misc_feature (1)..(458): Pfam Name: Sugar (and other) transporter Pfam Description: Sugar (and other) transporter
  misc_feature (1)..(491): Homolog of NCBI NO: 15220330 NR Description: glucose transporter; protein id: At1g11260.1, by cDNA: 33727., supported by cDNA: gi_15809961, supported by gi_16604672 [Arabidopsis thaliana]
  misc_feature (1)..(491): Homolog of NCBI NO: 81619 NR Description: glucose transport protein STP1 - Arabidopsis >gi|16520|emb|CAA39037.1| glucose transporter [Arabidopsis
  misc_feature (1)..(491): Homolog of NCBI NO: 21618276 NR Description: glucose transporter [Arabidopsis thaliana]
  misc_feature (1)..(485): Homolog of NCBI NO: 30349804 NR Description: monosaccharide-H+ symporter [Datisca glomerata]
  misc_feature (1)..(483): Homolog of NCBI NO: 4138724 NR Description: hexose transporter [Vitis vinifera]
  misc_feature (1)..(481): Homolog of NCBI NO: 3915039 NR Description: Sugar carrier protein C >gi|7446731|pir||T10122
  misc_feature (1)..(483): Homolog of NCBI NO: 4138722 NR Description: hexose transporter [Vitis vinifera]
  misc_feature (1)..(483): Homolog of NCBI NO: 1353516 NR Description: sugar transporter
  misc_feature (1)..(491): Homolog of NCBI NO: 7446727 NR Description: monosaccharid transport protein - fava bean
  misc_feature (1)..(491): Homolog of NCBI NO: 100347 NR Description: monosaccharide transport protein MST1 - common >gi|19885|emb|CAA47324.1| monosaccharid transporter [Nicotiana

SEQ ID NO: 85272 - protein, 473 aa, Arabidopsis thaliana; identical to SEQ ID NO: 22536
  peptide (1)..(473): Ceres Seq. ID no. 12679925
  misc_feature (1)..(440): Pfam Name: Sugar (and other) transporter Pfam Description: Sugar (and other) transporter
  misc_feature (1)..(473): Homolog of NCBI NO: 15220330 NR Description: glucose transporter; protein id: At1g11260.1, by cDNA: 33727., supported by cDNA: gi_15809961, supported by gi_16604672 [Arabidopsis thaliana]
  misc_feature (1)..(473): Homolog of NCBI NO: 81619 NR Description: glucose transport protein STP1 - Arabidopsis >gi|16520|emb|CAA39037.1| glucose transporter [Arabidopsis
  misc_feature (1)..(473): Homolog of NCBI NO: 21618276 NR Description: glucose transporter [Arabidopsis thaliana]
  misc_feature (1)..(467): Homolog of NCBI NO: 30349804 NR Description: monosaccharide-H+ symporter [Datisca glomerata]
  misc_feature (1)..(465): Homolog of NCBI NO: 4138724 NR Description: hexose transporter [Vitis vinifera]
  misc_feature (1)..(463): Homolog of NCBI NO: 3915039 NR Description: Sugar carrier protein C >gi|7446731|pir||T10122
  misc_feature (1)..(465): Homolog of NCBI NO: 4138722 NR Description: hexose transporter [Vitis vinifera]
  misc_feature (1)..(465): Homolog of NCBI NO: 1353516 NR Description: sugar transporter
  misc_feature (1)..(473): Homolog of NCBI NO: 7446727 NR Description: monosaccharid transport protein - fava bean
  misc_feature (1)..(473): Homolog of NCBI NO: 100347 NR Description: monosaccharide transport protein MST1 - common >gi|19885|emb|CAA47324.1| monosaccharid transporter [Nicotiana

SEQ ID NO: 85273 - DNA, 2526 bp, Arabidopsis thaliana
  misc_feature (1)..(2526): Ceres Seq. ID no. 12679926
  misc_feature: MA Experiment ID: 20000179 Result: Down-regulated in Transcription
  misc_feature: MA Experiment 20000179 PARAMETER Experiment Name: At_Germinating_Seeds_P Parameter: Age (hr) Value: 6 vs. 0
  misc_feature: MA Experiment 20000179 PARAMETER Experiment Name: At_Germinating_Seeds_P Parameter: Tissue Value: Germinating Seeds
  misc_feature: MA Experiment ID: 20000180 Result: Down-regulated in Transcription
  misc_feature: MA Experiment 20000180 PARAMETER Experiment Name: At_Germinating_Seeds_P Parameter: Age (hr) Value: 24 vs. 0
  misc_feature: MA Experiment 20000180 PARAMETER Experiment Name: At_Germinating_Seeds_P Parameter: Tissue Value: Germinating Seeds
  misc_feature: MA Experiment ID: 20000235 Result: Down-regulated in Transcription
  misc_feature: MA Experiment 20000235 PARAMETER Experiment Name: At_Siliques_P Parameter: Age (day) Value: 21
  misc_feature: MA Experiment 20000235 PARAMETER Experiment Name: At_Siliques_P Parameter: Organism Value: A. thaliana
  misc_feature: MA Experiment 20000235 PARAMETER Experiment Name: At_Siliques_P Parameter: Plant Line Value: WS
  misc_feature: MA Experiment 20000235 PARAMETER Experiment Name: At_Siliques_P Parameter: Tissue Value: 5-10mm Siliques vs. Whole Plant
  misc_feature: MA Experiment ID: 20000265 Result: Down-regulated in Transcription
  misc_feature: MA Experiment 20000265 PARAMETER Experiment Name: At_Open_Flower_P Parameter: Age (day) Value: 21
  misc_feature: MA Experiment 20000265 PARAMETER Experiment Name: At_Open_Flower_P Parameter: Plant Line Value: WS
  misc_feature: MA Experiment 20000265 PARAMETER Experiment Name: At_Open_Flower_P Parameter: Tissue Value: Closed Flower vs. Whole Plant
  misc_feature: MA Experiment ID: 20000794 Result: Down-regulated in Transcription
  misc_feature: MA Experiment 20000794 PARAMETER Experiment Name: At_Petals_P Parameter: Age (day) Value: 23-25 days
  misc_feature: MA Experiment 20000794 PARAMETER Experiment Name: At_Petals_P Parameter: Plant Line Value: WS
  misc_feature: MA Experiment 20000794 PARAMETER Experiment Name: At_Petals_P Parameter: Tissue Value: Petals vs. Whole plant
atggtttttcaaaacaaaattttattcatacattcagatctgaaggagaactcttttgaacacatgggaatacacttgggagagattggtattgttctctttccttggtttctgtggttaagtttattcctaagttgtggctatgcagctataactatttcaagtcctttgacattgggacaaactctgagttcccctggtggattttatgagttaggattcttcagtcctaacaactctcagaatcagtatgtagggatctggttcaagaaaattacaccacgggtggttgtgtgggtggctaacagagaaaagccgatcacaacccctgtggcaaatcttactatcagcagaaatggtagtcttattttgctagacagtagtaaaaatgttgtttggtcaaccagaagaccttccatatctaataagtgtcatgcaaagctcttagatacaggaaatcttgtcatagtagatgatgtttcagaaaatcttttgtggcaaagttttgagaatcctggtgatactatgctgccttactcatcgctgatgtacaaccttgccactggggagaagcgagtattatcttcgtggaaaagccacactgatccatcccctggtgatttcgtagttcgactaacaccacaagtgccagcacagatcgttactatgagaggctcatcggtttataagagaagcggtccatgggctaagaccggtttcactggcgtaccactaatggatgaatcatacacaagtcctttcagcctttcccaagatgtaggaaatggaacagggctcttctcttatttacagagaagttctgaacttacacgagttatcataacatcagagggatatctaaagacttttcggtacaatgggacaggctgggttctggactttatcactccagcaaatttatgtgatttgtatggtgcatgtggaccttttgggctgtgtgtgacgtccaatcccacaaagtgtaaatgcatgaaagggtttgtaccaaaatacaaggaggagtggaagcgcgggaacatgacttctggatgtatgcgacgtacagaattatcttgtcaggcaaacttatctacaaagacacaaggaaaaggtgtagacgtcttctatcgtctggccaatgtaaagcctccggatctctacgaatatgcaagctttgtggatgcagatcaatgccaccagggttgtctcagcaattgctcttgctctgcttttgcgtatattactggaattggttgtttgctttggaatcatgagctaatagacacaattagatattccgttggaggagagtttctttccattcgtcttgcaagttcagaactggctggaagcaggaggaccaagattattgttggtagtatcagcctttccatttttgtgattttggcctttggctcatataagtactggagatacagagcaaaacaaaatgttgggccaacttgggcattcttcaacaattcacaagattcatggaaaaatggtttggaaccacaagaaatctcaggtttaacattctttgagatgaataccatacgagctgctaccaataacttcaatgtctcaaacaaactcggtcaaggtggatttggtccagtttataagggaacactgtcagacaagaaggatatagccgttaaacgcctttctagcagctctgggcagggtacagaagagttcatgaacgaaataaaactcatctcaaaattacaacacagaaacttggttcgacttttgggatgctgcattgatggagaagaaaaactactaatttatgagtttctagtgaacaaaagcctcgacacttttctctttgatttgacgctaaagcttcagattgattggcctaagaggttcaacatcattcaaggtgtttcacgtgggcttctctatctccatcgtgactcttgcatgagggtcatacatcgagatctgaaggtcagcaacattctcttggacgacaaaatgaacccaaaaatatcagatttcggattggctcggatgtttcaaggaacccaacatcaagacaacactcgtaaggttgttggaactctaggatacatgtctcctgagtatgcatggacaggaatgttctcagagaagtccgacatatatgcttttggagttctcctgttagaaatcataagtgggaagaagatttcaagcttttgctgtggagaggaaggcaaaacccttcttggacatgcatgggaatgttggctcgagaccggtggagtggatctattggatgaagatattagcagctcgtgttctccagttgaagttgaagtcgctcgatgtgttcagattggtctactctgcatccaacagcaagctgttgacagaccaaacatagcacaagtagtgaccatgatgacaagtgcaacagatcttccgagaccaaaacaaccactctttgcattgcagattcaagatcaagagagtgttgtgtcagtctcaaagtctgtgaatcatgttacacaaactgagatatatgggcgataa

SEQ ID NO: 85274 - protein, 841 aa, Arabidopsis thaliana
  peptide (1)..(841): Ceres Seq. ID no. 12679927
  misc_feature (94)..(204): Pfam Name: D-mannose binding lectin Pfam Description: D-mannose binding lectin
  misc_feature (29)..(841): Homolog of NCBI NO: 18407151 NR Description: expressed protein; protein id: At1g61380.1, by cDNA: 13461., supported by cDNA: gi_19699074 [Arabidopsis >gi|3056592|gb|AAC13903.1|AAC13903 T1F9.13 [Arabidopsis thaliana]
  misc_feature (29)..(841): Homolog of NCBI NO: 21537374 NR Description: receptor kinase, putative [Arabidopsis thaliana]
  misc_feature (24)..(841): Homolog of NCBI NO: 15219917 NR Description: receptor kinase, putative; protein id: At1g61390.1
  misc_feature (26)..(841): Homolog of NCBI NO: 15219933 NR Description: receptor protein kinase (IRK1), putative; protein
  misc_feature (26)..(841): Homolog of NCBI NO: 15219914 NR Description: receptor protein kinase (IRK1), putative; protein
  misc_feature (26)..(841): Homolog of NCBI NO: 15219935 NR Description: receptor kinase, putative; protein id: [Arabidopsis thaliana] >gi|3056580|gb|AAC13891.1|AAC13891 T1F9.1
  misc_feature (272)..(715): Homolog of NCBI NO: 30696575 NR Description: S-locus protein kinase, putative [Arabidopsis
  misc_feature (718)..(841): Homolog of NCBI NO: 30696575 NR Description: S-locus protein kinase, putative [Arabidopsis
  misc_feature (176)..(264): Homolog of NCBI NO: 30696575 NR Description: S-locus protein kinase, putative [Arabidopsis
  misc_feature (58)..(834): Homolog of NCBI NO: 25956275 NR Description: unnamed protein product [Lotus japonicus]
MVFQNKILFIHSDLKENSFEHMGIHLGEIGIVLFPWFLWLSLFLSCGYAAITISSPLTLGQTLSSPGGFYELGFFSPNNSQNQYVGIWFKKITPRVVVWVANREKPITTPVANLTISRNGSLILLDSSKNVVWSTRRPSISNKCHAKLLDTGNLVIVDDVSENLLWQSFENPGDTMLPYSSLMYNLATGEKRVLSSWKSHTDPSPGDFVVRLTPQVPAQIVTMRGSSVYKRSGPWAKTGFTGVPLMDESYTSPFSLSQDVGNGTGLFSYLQRSSELTRVIITSEGYLKTFRYNGTGWVLDFITPANLCDLYGACGPFGLCVTSNPTKCKCMKGFVPKYKEEWKRGNMTSGCMRRTELSCQANLSTKTQGKGVDVFYRLANVKPPDLYEYASFVDADQCHQGCLSNCSCSAFAYITGIGCLLWNHELIDTIRYSVGGEFLSIRLASSELAGSRRTKIIVGSISLSIFVILAFGSYKYWRYRAKQNVGPTWAFFNNSQDSWKNGLEPQEISGLTFFEMNTIRAATNNFNVSNKLGQGGFGPVYKGTLSDKKDIAVKRLSSSSGQGTEEFMNEIKLISKLQHRNLVRLLGCCIDGEEKLLIYEFLVNKSLDTFLFDLTLKLQIDWPKRFNIIQGVSRGLLYLHRDSCMRVIHRDLKVSNILLDDKMNPKISDFGLARMFQGTQHQDNTRKVVGTLGYMSPEYAWTGMFSEKSDIYAFGVLLLEIISGKKISSFCCGEEGKTLLGHAWECWLETGGVDLLDEDISSSCSPVEVEVARCVQIGLLCIQQQAVDRPNIAQVVTMMTSATDLPRPKQPLFALQIQDQESVVSVSKSVNHVTQTEIYGR

SEQ ID NO: 85275 - protein, 820 aa, Arabidopsis thaliana; identical to SEQ ID NO: 77556
  peptide (1)..(820): Ceres Seq. ID no. 12679928
  misc_feature (73)..(183): Pfam Name: D-mannose binding lectin Pfam Description: D-mannose binding lectin
  misc_feature (8)..(820): Homolog of NCBI NO: 18407151 NR Description: expressed protein; protein id: At1g61380.1, by cDNA: 13461., supported by cDNA: gi_19699074 [Arabidopsis >gi|3056592|gb|AAC13903.1|AAC13903 T1F9.13 [Arabidopsis thaliana]
  misc_feature (8)..(820): Homolog of NCBI NO: 21537374 NR Description: receptor kinase, putative [Arabidopsis thaliana]
  misc_feature (3)..(820): Homolog of NCBI NO: 15219917 NR Description: receptor kinase, putative; protein id: At1g61390.1
  misc_feature (5)..(820): Homolog of NCBI NO: 15219933 NR Description: receptor protein kinase (IRK1), putative; protein
  misc_feature (5)..(820): Homolog of NCBI NO: 15219914 NR Description: receptor protein kinase (IRK1), putative; protein
  misc_feature (5)..(820): Homolog of NCBI NO: 15219935 NR Description: receptor kinase, putative; protein id: [Arabidopsis thaliana] >gi|3056580|gb|AAC13891.1|AAC13891 T1F9.1
  misc_feature (251)..(694): Homolog of NCBI NO: 30696575 NR Description: S-locus protein kinase, putative [Arabidopsis
  misc_feature (697)..(820): Homolog of NCBI NO: 30696575 NR Description: S-locus protein kinase, putative [Arabidopsis
  misc_feature (155)..(243): Homolog of NCBI NO: 30696575 NR Description: S-locus protein kinase, putative [Arabidopsis
  misc_feature (37)..(813): Homolog of NCBI NO: 25956275 NR Description: unnamed protein product [Lotus japonicus]

SEQ ID NO: 85276 - protein, 666 aa, Arabidopsis thaliana
  peptide (1)..(666): Ceres Seq. ID no. 12679929
  misc_feature (1)..(666): Homolog of NCBI NO: 18407151 NR Description: expressed protein; protein id: At1g61380.1, by cDNA: 13461., supported by cDNA: gi_19699074 [Arabidopsis >gi|3056592|gb|AAC13903.1|AAC13903 T1F9.13 [Arabidopsis thaliana]
  misc_feature (1)..(666): Homolog of NCBI NO: 21537374 NR Description: receptor kinase, putative [Arabidopsis thaliana]
  misc_feature (1)..(666): Homolog of NCBI NO: 15219917 NR Description: receptor kinase, putative; protein id: At1g61390.1
  misc_feature (1)..(666): Homolog of NCBI NO: 15219933 NR Description: receptor protein kinase (IRK1), putative; protein
  misc_feature (1)..(666): Homolog of NCBI NO: 15219914 NR Description: receptor protein kinase (IRK1), putative; protein
  misc_feature (1)..(666): Homolog of NCBI NO: 15219935 NR Description: receptor kinase, putative; protein id: [Arabidopsis thaliana] >gi|3056580|gb|AAC13891.1|AAC13891 T1F9.1
  misc_feature (97)..(540): Homolog of NCBI NO: 30696575 NR Description: S-locus protein kinase, putative [Arabidopsis
  misc_feature (543)..(666): Homolog of NCBI NO: 30696575 NR Description: S-locus protein kinase, putative [Arabidopsis
  misc_feature (1)..(89): Homolog of NCBI NO: 30696575 NR Description: S-locus protein kinase, putative [Arabidopsis
  misc_feature (1)..(659): Homolog of NCBI NO: 25956275 NR Description: unnamed protein product [Lotus japonicus]
MLPYSSLMYNLATGEKRVLSSWKSHTDPSPGDFVVRLTPQVPAQIVTMRGSSVYKRSGPWAKTGFTGVPLMDESYTSPFSLSQDVGNGTGLFSYLQRSSELTRVIITSEGYLKTFRYNGTGWVLDFITPANLCDLYGACGPFGLCVTSNPTKCKCMKGFVPKYKEEWKRGNMTSGCMRRTELSCQANLSTKTQGKGVDVFYRLANVKPPDLYEYASFVDADQCHQGCLSNCSCSAFAYITGIGCLLWNHELIDTIRYSVGGEFLSIRLASSELAGSRRTKIIVGSISLSIFVILAFGSYKYWRYRAKQNVGPTWAFFNNSQDSWKNGLEPQEISGLTFFEMNTIRAATNNFNVSNKLGQGGFGPVYKGTLSDKKDIAVKRLSSSSGQGTEEFMNEIKLISKLQHRNLVRLLGCCIDGEEKLLIYEFLVNKSLDTFLFDLTLKLQIDWPKRFNIIQGVSRGLLYLHRDSCMRVIHRDLKVSNILLDDKMNPKISDFGLARMFQGTQHQDNTRKVVGTLGYMSPEYAWTGMFSEKSDIYAFGVLLLEIISGKKISSFCCGEEGKTLLGHAWECWLETGGVDLLDEDISSSCSPVEVEVARCVQIGLLCIQQQAVDRPNIAQVVTMMTSATDLPRPKQPLFALQIQDQESVVSVSKSVNHVTQTEIYGR

SEQ ID NO: 85277 - DNA, 4092 bp, Arabidopsis thaliana
  misc_feature (1)..(4092): Ceres Seq. ID no. 12679930
  misc_feature: MA Experiment ID: 20000173 Result: Down-regulated in Transcription
  misc_feature: MA Experiment 20000173 PARAMETER Experiment Name: At_42deg_Heat_P Parameter: Age (day) Value: 14
  misc_feature: MA Experiment 20000173 PARAMETER Experiment Name: At_42deg_Heat_P Parameter: Organism Value: A. thaliana
  misc_feature: MA Experiment 20000173 PARAMETER Experiment Name: At_42deg_Heat_P Parameter: Plant Line Value: WS
  misc_feature: MA Experiment 20000173 PARAMETER Experiment Name: At_42deg_Heat_P Parameter: Temperature (deg C) Value: 42 vs. 22
  misc_feature: MA Experiment 20000173 PARAMETER Experiment Name: At_42deg_Heat_P Parameter: Timepoint (hr) Value: 6
  misc_feature: MA Experiment 20000173 PARAMETER Experiment Name: At_42deg_Heat_P Parameter: Tissue Value: Aerial
  misc_feature: MA Experiment ID: 20000180 Result: Down-regulated in Transcription
  misc_feature: MA Experiment 20000180 PARAMETER Experiment Name: At_Germinating_Seeds_P Parameter: Age (hr) Value: 24 vs. 0
  misc_feature: MA Experiment 20000180 PARAMETER Experiment Name: At_Germinating_Seeds_P Parameter: Tissue Value: Germinating Seeds
  misc_feature: MA Experiment ID: 20000265 Result: Up-regulated in Transcription
  misc_feature: MA Experiment 20000265 PARAMETER Experiment Name: At_Open_Flower_P Parameter: Age (day) Value: 21
  misc_feature: MA Experiment 20000265 PARAMETER Experiment Name: At_Open_Flower_P Parameter: Plant Line Value: WS
  misc_feature: MA Experiment 20000265 PARAMETER Experiment Name: At_Open_Flower_P Parameter: Tissue Value: Closed Flower vs. Whole Plant
  misc_feature: MA Experiment ID: 20000286 Result: Up-regulated in Transcription
  misc_feature: MA Experiment 20000286 PARAMETER Experiment Name: At_Open_Flower_P Parameter: Age (day) Value: 21
  misc_feature: MA Experiment 20000286 PARAMETER Experiment Name: At_Open_Flower_P Parameter: Plant Line Value: WS
  misc_feature: MA Experiment 20000286 PARAMETER Experiment Name: At_Open_Flower_P Parameter: Tissue Value: Half Open vs. Whole Plant
  misc_feature: MA Experiment ID: 20000438 Result: Up-regulated in Transcription
  misc_feature: MA Experiment 20000438 PARAMETER Experiment Name: At_Shoots__P Parameter: Age (day) Value: 14
  misc_feature: MA Experiment 20000438 PARAMETER Experiment Name: At_Shoots__P Parameter: Tissue Value: Shoots vs. Whole Plant
  misc_feature: MA Experiment ID: 20001554 Result: Down-regulated in Transcription
  misc_feature: MA Experiment 20001554 PARAMETER Experiment Name: At_Drought_Soil_Dry_P Parameter: Age (day) Value: 21
  misc_feature: MA Experiment 20001554 PARAMETER Experiment Name: At_Drought_Soil_Dry_P Parameter: Organism Value: A. thaliana
  misc_feature: MA Experiment 20001554 PARAMETER Experiment Name: At_Drought_Soil_Dry_P Parameter: Plant Line Value: WS
  misc_feature: MA Experiment 20001554 PARAMETER Experiment Name: At_Drought_Soil_Dry_P Parameter: Post Timepoint (hr) Value: None
  misc_feature: MA Experiment 20001554 PARAMETER Experiment Name: At_Drought_Soil_Dry_P Parameter: Post-Treatment Value: None
  misc_feature: MA Experiment 20001554 PARAMETER Experiment Name: At_Drought_Soil_Dry_P Parameter: Timepoint (day) Value: 7
  misc_feature: MA Experiment 20001554 PARAMETER Experiment Name: At_Drought_Soil_Dry_P Parameter: Treatment Value: Drought vs. No Drought
  misc_feature: MA Experiment ID: 20001555 Result: Down-regulated in Transcription
  misc_feature: MA Experiment 20001555 PARAMETER Experiment Name: At_Drought_Soil_Dry_P Parameter: Age (day) Value: 24
  misc_feature: MA Experiment 20001555 PARAMETER Experiment Name: At_Drought_Soil_Dry_P Parameter: Organism Value: A. thaliana
  misc_feature: MA Experiment 20001555 PARAMETER Experiment Name: At_Drought_Soil_Dry_P Parameter: Plant Line Value: WS
  misc_feature: MA Experiment 20001555 PARAMETER Experiment Name: At_Drought_Soil_Dry_P Parameter: Post Timepoint (hr) Value: None
  misc_feature: MA Experiment 20001555 PARAMETER Experiment Name: At_Drought_Soil_Dry_P Parameter: Post-Treatment Value: None
  misc_feature: MA Experiment 20001555 PARAMETER Experiment Name: At_Drought_Soil_Dry_P Parameter: Timepoint (day) Value: 10
  misc_feature: MA Experiment 20001555 PARAMETER Experiment Name: At_Drought_Soil_Dry_P Parameter: Treatment Value: Drought vs. No Drought
  misc_feature: MA Experiment ID: 20001557 Result: Down-regulated in Transcription
  misc_feature: MA Experiment 20001557 PARAMETER Experiment Name: At_Drought_Soil_Dry_P Parameter: Age (day) Value: 27
  misc_feature: MA Experiment 20001557 PARAMETER Experiment Name: At_Drought_Soil_Dry_P Parameter: Organism Value: A. thaliana
  misc_feature: MA Experiment 20001557 PARAMETER Experiment Name: At_Drought_Soil_Dry_P Parameter: Plant Line Value: WS
  misc_feature: MA Experiment 20001557 PARAMETER Experiment Name: At_Drought_Soil_Dry_P Parameter: Post Timepoint (hr) Value: 3
  misc_feature: MA Experiment 20001557 PARAMETER Experiment Name: At_Drought_Soil_Dry_P Parameter: Post-Treatment Value: Re-Water vs. No Drought
  misc_feature: MA Experiment 20001557 PARAMETER Experiment Name: At_Drought_Soil_Dry_P Parameter: Timepoint (day) Value: 13
  misc_feature: MA Experiment 20001557 PARAMETER Experiment Name: At_Drought_Soil_Dry_P Parameter: Treatment Value: Drought vs. No Drought
atgagacttcatgagagctcgagtccttttgtttgtattcttgtactgtcttgcttcttcttgagcgtgtctctggctcaggaaagagctttcttttctggcaagctcaatgattccgagacgattgtctctagctttcggacattcaggttcggtttcttcagccctgttaattccacaagtcgatatgctggtatatggtataacagtgtttctgtacaaactgtgatatgggttgctaacaaagataagccgatcaatgattcctctggagttatttcggtttctcaagatggaaatcttgtagttacggatggacagaggcgtgttctatggtcaactaacgtctctactcaagccagtgccaattctactgtcgctgagcttcttgattccgggaatctggtgctaaaagaggcgagtagtgacgcgtatctttgggagagcttcaagtatcctactgattcttggttgccaaatatgttggttgggacaaacgcaagaattggaggaggaaacgtcacgataacttcttggaaatccccttcggatccttcgcctgggagctacactgctgcactcgttcttgctgcatatccagagctcttcattatgaacaataataataataacagtacggtgtggcgaagtggcccgtggaatggccagatgtttaatggtttaccagatgtttatgcgggtgtttttctttatagattcatagttaatgatgacaccaatggatctgtcaccatgtcatatgctaatgattcaaccttgagatacttctacatggattatagaggatctgtgatccgaagagattggagtgagactaggagaaactggacggtcgggttacaagttccagcaaccgagtgtgacaactacaggcgatgtggcgaattcgctacttgcaatccacggaaaaacccgctttgttcttgcattagagggtttaggccaaggaacctaatagagtggaacaatggaaactggagtggtggatgcacaagaagggttcctttgcagtgtgaaagacagaacaataatgggagtgctgatgggtttttgaggctgcggcgaatgaaactgcctgactttgcaagaagatccgaagcaagcgaaccagaatgcttaaggacttgtttgcagacatgttcttgtatagctgctgctcatggcttaggatatggctgcatgatttggaatggaagcttagttgattcgcaggagttgtctgctagtggattggatctttatatccgtcttgcacattcagaaatcagcgcttgtgttcttctggcacgacgaattgtcatgaagaaaagagcgaaaaagaaaggaagagatgcagagcagatttttgagagagtggaagccttagctggtggtaataaaggaaagttgaaagagctaccattgtttgagtttcaagtgctagcagcagcaactaataatttctcgctgagaaataagcttggacaaggtggctttggtcctgtttacaaagggaagttgcaagaggggcaagagattgctgtgaagaggctgtcacgagcatcaggacaagggcttgaggagcttgttaacgaagtggttgtaatttctaagttgcagcatcggaatctggtgaaattacttggttgttgcattgcaggagaagagaggatgttagtctatgagttcatgcccaagaaaagcttagactattatctctttgactcaaggagggcaaaacttcttgattggaagacccggaccttccgaacgttcaggttcggtttcttcagccctgttaattccaccaaccgatatgctggtatatggtataacagcattcctgtacaaactgtgatatgggttgctaacaaagatacgccgatcaatgactcctctggagtgatttcaatatctgaagatggaaatctggtagttactgatggtcagaggcgtgttttgtggtcaactaacgtttctactcgagccagtgccaattctactgtcgctgagcttttggagtccgggaacctcgtgctaaaagatgccaataccgatgcatatctttgggagagcttcaagtatcctactgattcttggttgccaaatatgttggttgggacaaacgcaagaaccggaggaggaaacatcacaataacttcttggacaaacccttcggatccttcgccggggagctacactgctgcactcgttcttgctccatatccagagctttttattttcaacaataatgacaacaatgctacggtgtggcgcagtggcccttggaacggactgatgtttaacggtttaccagatgtatatccggggctctttctttatagatttaaagttaatgatgacaccaatggttcagccaccatgtcatatgctaatgattcaactttgagacacctctacttggattatagaggatttgctatccggagagattggagtgaggctaggagaaactggacgttagggtcacaagttccggcaaccgagtgtgacatttacagccgatgtggtcaatacactacctgcaatcctcggaaaaacccgcattgttcttgcattaaagggtttaggccaaggaaccttatagagtggaacaatggaaactggagtggtggatgcataagaaagctccctttgcagtgtgaaagacagaacaataaggggagtgctgataggtttttgaagctgcagcgaatgaaaatgcctgactttgcaagaagatccgaagccagcgaaccagaatgctttatgacttgtttgcagtcatgttcttgtatagcttttgctcatggattaggatatggctgcatgatttggaatagaagcttagttgattcacaagtgttgtctgctagtggaatggatctttctatccgtcttgcacattcagaattcaaaacacaggacaggcgacctattttgatcggtacatcattggcaggaggcatttttgttgtggcgacttgtgtccttctggcacgacgtattgtcatgaagaaaagagctaaaaagaaaggaacagatgcagagcaaatttttaagagagtagaagctttagctggtggtagtagagaaaagttgaaagagctacctttgtttgagtttcaagtgttagctactgcaaccgataacttctctcttagcaataagctcggacaaggcggttttggtccggtttacaaggggatgttgctagaaggtcaagagattgctgtgaagagactgtcacaagcatcaggacaagggcttgaggaacttgtcactgaagtggttgtgatttctaagttgcaacatcgaaatctggtgaaattatttggttgctgcattgcaggggaagaaaggatgttagtctatgagttcatgcccaagaaaagcttagacttttatatatttgatccaagggaagcaaaacttcttgactggaacacgcggtttgaaataatcaatggaatatgtagaggtctcctgtaccttcacagagattctaggctgagaatcattcacagagatctgaaagcaagcaacatcttgctagatgagaatctgattccgaaaatatctgattttgggttggccaggatattcccggggaatgaagatgaagcaaacaccagaagggtcgttggaacatatggctatatggcacctgaatatgcaatgggaggactgttttcagagaaatctgatgttttcagcttaggagtgatactcttagagattatcagtggaagaagaaactcacattcaactcttttggctcatgtgtggtcaatctggaacgaaggggagattaatggtatggtagatcctgagatttttgaccaactttttgagaaagaaatacgaaaatgcgttcacattgcgcttttgtgtgtgcaagacgctgctaatgataggccaagtgtttctacagtgtgtatgatgcttagcagtgaggttgcagacattccagaaccgaaacagcctgcttttatgcctagaaacgttggtttagaagctgagttctctgagagcattgctcttaaagcctctatcaacaatgtcaccatcactgatgtctcaggacgttaa

SEQ ID NO: 85278 - protein, 1363 aa, Arabidopsis thaliana
  peptide (1)..(1363): Ceres Seq. ID no. 12679931
  misc_feature (616)..(729): Pfam Name: D-mannose binding lectin Pfam Description: D-mannose binding lectin
  misc_feature (1)..(428): Homolog of NCBI NO: 15220338 NR Description: serine/threonine kinase, putative; protein id:
  misc_feature (1)..(428): Homolog of NCBI NO: 25287697 NR Description: hypothetical protein [imported] - Arabidopsis
  misc_feature (429)..(587): Homolog of NCBI NO: 15220338 NR Description: serine/threonine kinase, putative; protein id:
  misc_feature (429)..(587): Homolog of NCBI NO: 25287697 NR Description: hypothetical protein [imported] - Arabidopsis
  misc_feature (592)..(1363): Homolog of NCBI NO: 6686398 NR Description: F1E22.15 [Arabidopsis thaliana]
  misc_feature (4)..(429): Homolog of NCBI NO: 6686398 NR Description: F1E22.15 [Arabidopsis thaliana]
  misc_feature (467)..(587): Homolog of NCBI NO: 6686398 NR Description: F1E22.15 [Arabidopsis thaliana]
  misc_feature (534)..(1363): Homolog of NCBI NO: 15220348 NR Description: receptor-like protein kinase, putative; protein
  misc_feature (591)..(1363): Homolog of NCBI NO: 15220353 NR Description: serine/threonine kinase, putative; protein id:
  misc_feature (591)..(1363): Homolog of NCBI NO: 4008010 NR Description: receptor-like protein kinase [Arabidopsis
MRLHESSSPFVCILVLSCFFLSVSLAQERAFFSGKLNDSETIVSSFRTFRFGFFSPVNSTSRYAGIWYNSVSVQTVIWVANKDKPINDSSGVISVSQDGNLVVTDGQRRVLWSTNVSTQASANSTVAELLDSGNLVLKEASSDAYLWESFKYPTDSWLPNMLVGTNARIGGGNVTITSWKSPSDPSPGSYTAALVLAAYPELFIMNNNNNNSTVWRSGPWNGQMFNGLPDVYAGVFLYRFIVNDDTNGSVTMSYANDSTLRYFYMDYRGSVIRRDWSETRRNWTVGLQVPATECDNYRRCGEFATCNPRKNPLCSCIRGFRPRNLIEWNNGNWSGGCTRRVPLQCERQNNNGSADGFLRLRRMKLPDFARRSEASEPECLRTCLQTCSCIAAAHGLGYGCMIWNGSLVDSQELSASGLDLYIRLAHSEISACVLLARRIVMKKRAKKKGRDAEQIFERVEALAGGNKGKLKELPLFEFQVLAAATNNFSLRNKLGQGGFGPVYKGKLQEGQEIAVKRLSRASGQGLEELVNEVVVISKLQHRNLVKLLGCCIAGEERMLVYEFMPKKSLDYYLFDSRRAKLLDWKTRTFRTFRFGFFSPVNSTNRYAGIWYNSIPVQTVIWVANKDTPINDSSGVISISEDGNLVVTDGQRRVLWSTNVSTRASANSTVAELLESGNLVLKDANTDAYLWESFKYPTDSWLPNMLVGTNARTGGGNITITSWTNPSDPSPGSYTAALVLAPYPELFIFNNNDNNATVWRSGPWNGLMFNGLPDVYPGLFLYRFKVNDDTNGSATMSYANDSTLRHLYLDYRGFAIRRDWSEARRNWTLGSQVPATECDIYSRCGQYTTCNPRKNPHCSCIKGFRPRNLIEWNNGNWSGGCIRKLPLQCERQNNKGSADRFLKLQRMKMPDFARRSEASEPECFMTCLQSCSCIAFAHGLGYGCMIWNRSLVDSQVLSASGMDLSIRLAHSEFKTQDRRPILIGTSLAGGIFVVATCVLLARRIVMKKRAKKKGTDAEQIFKRVEALAGGSREKLKELPLFEFQVLATATDNFSLSNKLGQGGFGPVYKGMLLEGQEIAVKRLSQASGQGLEELVTEVVVISKLQHRNLVKLFGCCIAGEERMLVYEFMPKKSLDFYIFDPREAKLLDWNTRFEIINGICRGLLYLHRDSRLRIIHRDLKASNILLDENLIPKISDFGLARIFPGNEDEANTRRVVGTYGYMAPEYAMGGLFSEKSDVFSLGVILLEIISGRRNSHSTLLAHVWSIWNEGEINGMVDPEIFDQLFEKEIRKCVHIALLCVQDAANDRPSVSTVCMMLSSEVADIPEPKQPAFMPRNVGLEAEFSESIALKASINNVTITDVSGR

SEQ ID NO: 85279 - protein, 1203 aa, Arabidopsis thaliana
  peptide (1)..(1203): Ceres Seq. ID no. 12679932
  misc_feature (456)..(569): Pfam Name: D-mannose binding lectin Pfam Description: D-mannose binding lectin
  misc_feature (1)..(268): Homolog of NCBI NO: 15220338 NR Description: serine/threonine kinase, putative; protein id:
  misc_feature (1)..(268): Homolog of NCBI NO: 25287697 NR Description: hypothetical protein [imported] - Arabidopsis
  misc_feature (269)..(427): Homolog of NCBI NO: 15220338 NR Description: serine/threonine kinase, putative; protein id:
  misc_feature (269)..(427): Homolog of NCBI NO: 25287697 NR Description: hypothetical protein [imported] - Arabidopsis
  misc_feature (432)..(1203): Homolog of NCBI NO: 6686398 NR Description: F1E22.15 [Arabidopsis thaliana]
  misc_feature (1)..(269): Homolog of NCBI NO: 6686398 NR Description: F1E22.15 [Arabidopsis thaliana]
  misc_feature (307)..(427): Homolog of NCBI NO: 6686398 NR Description: F1E22.15 [Arabidopsis thaliana]
  misc_feature (374)..(1203): Homolog of NCBI NO: 15220348 NR Description: receptor-like protein kinase, putative; protein
  misc_feature (431)..(1203): Homolog of NCBI NO: 15220353 NR Description: serine/threonine kinase, putative; protein id:
  misc_feature (431)..(1203): Homolog of NCBI NO: 4008010 NR Description: receptor-like protein kinase [Arabidopsis
MLVGTNARIGGGNVTITSWKSPSDPSPGSYTAALVLAAYPELFIMNNNNNNSTVWRSGPWNGQMFNGLPDVYAGVFLYRFIVNDDTNGSVTMSYANDSTLRYFYMDYRGSVIRRDWSETRRNWTVGLQVPATECDNYRRCGEFATCNPRKNPLCSCIRGFRPRNLIEWNNGNWSGGCTRRVPLQCERQNNNGSADGFLRLRRMKLPDFARRSEASEPECLRTCLQTCSCIAAAHGLGYGCMIWNGSLVDSQELSASGLDLYIRLAHSEISACVLLARRIVMKKRAKKKGRDAEQIFERVEALAGGNKGKLKELPLFEFQVLAAATNNFSLRNKLGQGGFGPVYKGKLQEGQEIAVKRLSRASGQGLEELVNEVVVISKLQHRNLVKLLGCCIAGEERMLVYEFMPKKSLDYYLFDSRRAKLLDWKTRTFRTFRFGFFSPVNSTNRYAGIWYNSIPVQTVIWVANKDTPINDSSGVISISEDGNLVVTDGQRRVLWSTNVSTRASANSTVAELLESGNLVLKDANTDAYLWESFKYPTDSWLPNMLVGTNARTGGGNITITSWTNPSDPSPGSYTAALVLAPYPELFIFNNNDNNATVWRSGPWNGLMFNGLPDVYPGLFLYRFKVNDDTNGSATMSYANDSTLRHLYLDYRGFAIRRDWSEARRNWTLGSQVPATECDIYSRCGQYTTCNPRKNPHCSCIKGFRPRNLIEWNNGNWSGGCIRKLPLQCERQNNKGSADRFLKLQRMKMPDFARRSEASEPECFMTCLQSCSCIAFAHGLGYGCMIWNRSLVDSQVLSASGMDLSIRLAHSEFKTQDRRPILIGTSLAGGIFVVATCVLLARRIVMKKRAKKKGTDAEQIFKRVEALAGGSREKLKELPLFEFQVLATATDNFSLSNKLGQGGFGPVYKGMLLEGQEIAVKRLSQASGQGLEELVTEVVVISKLQHRNLVKLFGCCIAGEERMLVYEFMPKKSLDFYIFDPREAKLLDWNTRFEIINGICRGLLYLHRDSRLRIIHRDLKASNILLDENLIPKISDFGLARIFPGNEDEANTRRVVGTYGYMAPEYAMGGLFSEKSDVFSLGVILLEIISGRRNSHSTLLAHVWSIWNEGEINGMVDPEIFDQLFEKEIRKCVHIALLCVQDAANDRPSVSTVCMMLSSEVADIPEPKQPAFMPRNVGLEAEFSESIALKASINNVTITDVSGR

SEQ ID NO: 85280 - protein, 1159 aa, Arabidopsis thaliana
  peptide (1)..(1159): Ceres Seq. ID no. 12679933
  misc_feature (412)..(525): Pfam Name: D-mannose binding lectin Pfam Description: D-mannose binding lectin
  misc_feature (1)..(224): Homolog of NCBI NO: 15220338 NR Description: serine/threonine kinase, putative; protein id:
  misc_feature (1)..(224): Homolog of NCBI NO: 25287697 NR Description: hypothetical protein [imported] - Arabidopsis
  misc_feature (225)..(383): Homolog of NCBI NO: 15220338 NR Description: serine/threonine kinase, putative; protein id:
  misc_feature (225)..(383): Homolog of NCBI NO: 25287697 NR Description: hypothetical protein [imported] - Arabidopsis
  misc_feature (388)..(1159): Homolog of NCBI NO: 6686398 NR Description: F1E22.15 [Arabidopsis thaliana]
  misc_feature (1)..(225): Homolog of NCBI NO: 6686398 NR Description: F1E22.15 [Arabidopsis thaliana]
  misc_feature (263)..(383): Homolog of NCBI NO: 6686398 NR Description: F1E22.15 [Arabidopsis thaliana]
  misc_feature (330)..(1159): Homolog of NCBI NO: 15220348 NR Description: receptor-like protein kinase, putative; protein
  misc_feature (387)..(1159): Homolog of NCBI NO: 15220353 NR Description: serine/threonine kinase, putative; protein id:
  misc_feature (387)..(1159): Homolog of NCBI NO: 4008010 NR Description: receptor-like protein kinase [Arabidopsis
MNNNNNNSTVWRSGPWNGQMFNGLPDVYAGVFLYRFIVNDDTNGSVTMSYANDSTLRYFYMDYRGSVIRRDWSETRRNWTVGLQVPATECDNYRRCGEFATCNPRKNPLCSCIRGFRPRNLIEWNNGNWSGGCTRRVPLQCERQNNNGSADGFLRLRRMKLPDFARRSEASEPECLRTCLQTCSCIAAAHGLGYGCMIWNGSLVDSQELSASGLDLYIRLAHSEISACVLLARRIVMKKRAKKKGRDAEQIFERVEALAGGNKGKLKELPLFEFQVLAAATNNFSLRNKLGQGGFGPVYKGKLQEGQEIAVKRLSRASGQGLEELVNEVVVISKLQHRNLVKLLGCCIAGEERMLVYEFMPKKSLDYYLFDSRRAKLLDWKTRTFRTFRFGFFSPVNSTNRYAGIWYNSIPVQTVIWVANKDTPINDSSGVISISEDGNLVVTDGQRRVLWSTNVSTRASANSTVAELLESGNLVLKDANTDAYLWESFKYPTDSWLPNMLVGTNARTGGGNITITSWTNPSDPSPGSYTAALVLAPYPELFIFNNNDNNATVWRSGPWNGLMFNGLPDVYPGLFLYRFKVNDDTNGSATMSYANDSTLRHLYLDYRGFAIRRDWSEARRNWTLGSQVPATECDIYSRCGQYTTCNPRKNPHCSCIKGFRPRNLIEWNNGNWSGGCIRKLPLQCERQNNKGSADRFLKLQRMKMPDFARRSEASEPECFMTCLQSCSCIAFAHGLGYGCMIWNRSLVDSQVLSASGMDLSIRLAHSEFKTQDRRPILIGTSLAGGIFVVATCVLLARRIVMKKRAKKKGTDAEQIFKRVEALAGGSREKLKELPLFEFQVLATATDNFSLSNKLGQGGFGPVYKGMLLEGQEIAVKRLSQASGQGLEELVTEVVVISKLQHRNLVKLFGCCIAGEERMLVYEFMPKKSLDFYIFDPREAKLLDWNTRFEIINGICRGLLYLHRDSRLRIIHRDLKASNILLDENLIPKISDFGLARIFPGNEDEANTRRVVGTYGYMAPEYAMGGLFSEKSDVFSLGVILLEIISGRRNSHSTLLAHVWSIWNEGEINGMVDPEIFDQLFEKEIRKCVHIALLCVQDAANDRPSVSTVCMMLSSEVADIPEPKQPAFMPRNVGLEAEFSESIALKASINNVTITDVSGR

SEQ ID NO: 85281 - DNA, 2451 bp, Arabidopsis thaliana
  misc_feature (1)..(2451): Ceres Seq. ID no. 12679938
  misc_feature: MA Experiment ID: 20000166 Result: Down-regulated in Transcription
  misc_feature: MA Experiment 20000166 PARAMETER Experiment Name: At_100uM_ABA_P Parameter: Age (day) Value: 14
  misc_feature: MA Experiment 20000166 PARAMETER Experiment Name: At_100uM_ABA_P Parameter: Organism Value: A. thaliana
  misc_feature: MA Experiment 20000166 PARAMETER Experiment Name: At_100uM_ABA_P Parameter: Plant Line Value: WS
  misc_feature: MA Experiment 20000166 PARAMETER Experiment Name: At_100uM_ABA_P Parameter: Timepoint (hr) Value: 1
  misc_feature: MA Experiment 20000166 PARAMETER Experiment Name: At_100uM_ABA_P Parameter: Tissue Value: Aerial
  misc_feature: MA Experiment 20000166 PARAMETER Experiment Name: At_100uM_ABA_P Parameter: Treatment Value: 100uM ABA vs. No Treatment
  misc_feature: MA Experiment ID: 20000436 Result: Down-regulated in Transcription
  misc_feature: MA Experiment 20000436 PARAMETER Experiment Name: At_Drought_P Parameter: Age (day) Value: 7
  misc_feature: MA Experiment 20000436 PARAMETER Experiment Name: At_Drought_P Parameter: Organism Value: A. thaliana
  misc_feature: MA Experiment 20000436 PARAMETER Experiment Name: At_Drought_P Parameter: Plant Line Value: WS
  misc_feature: MA Experiment 20000436 PARAMETER Experiment Name: At_Drought_P Parameter: Timepoint (hr) Value: 12
  misc_feature: MA Experiment 20000436 PARAMETER Experiment Name: At_Drought_P Parameter: Tissue Value: Whole Plant
  misc_feature: MA Experiment 20000436 PARAMETER Experiment Name: At_Drought_P Parameter: Treatment Value: Drought vs. No Drought
  misc_feature: MA Experiment ID: 20000438 Result: Up-regulated in Transcription
  misc_feature: MA Experiment 20000438 PARAMETER Experiment Name: At_Shoots__P Parameter: Age (day) Value: 14
  misc_feature: MA Experiment 20000438 PARAMETER Experiment Name: At_Shoots__P Parameter: Tissue Value: Shoots vs. Whole Plant
  misc_feature: MA Experiment ID: 20000453 Result: Down-regulated in Transcription
  misc_feature: MA Experiment 20000453 PARAMETER Experiment Name: At_100uM_ABA_P Parameter: Age (day) Value: 15
  misc_feature: MA Experiment 20000453 PARAMETER Experiment Name: At_100uM_ABA_P Parameter: Organism Value: A. thaliana
  misc_feature: MA Experiment 20000453 PARAMETER Experiment Name: At_100uM_ABA_P Parameter: Plant Line Value: WS
  misc_feature: MA Experiment 20000453 PARAMETER Experiment Name: At_100uM_ABA_P Parameter: Timepoint (hr) Value: 24
  misc_feature: MA Experiment 20000453 PARAMETER Experiment Name: At_100uM_ABA_P Parameter: Tissue Value: Aerial
  misc_feature: MA Experiment 20000453 PARAMETER Experiment Name: At_100uM_ABA_P Parameter: Treatment Value: 100uM ABA vs. No Treatment
atgattattgttggtgttcttttagttagtttcacacttttaagtcacatgaatcagttcttacatctttttgaaagtccaacctttgagatatatccggaactggggcgtgactcacagttaatgactgatccacttggttttcaatacttacacagcatttatacattttcactaaatccttgctctgaaacaaacacaaatatgaaggttgtcttcgttatcttctttttcttcctcttccaattttgtatctctgtggatacaattatgagaagacagtccttgagagatggtgaggttatactctccgcagggaagagattcgcgtttggattcttcagtcttggggattcagagctccggtatgttgggatttggtatgctcaaatctctcaacagactattgtttgggttgcaaacagagaccatcctattaatgacacctctgggatggtaaagttcagcaacagaggcaatctctctgtctatgcatctgacaatgaaacagagcttatctggtcaacaaatgtttcagatagtatgttggaaccaactttagttgctacactctctgatttaggcaaccttgttctgtttgatccagtcacagggagaagtttctgggagagctttgatcaccctacagacacgtttcttccgtttatgagattgggattcacacgaaaagacggtttggatcgctctctaacatcatggaagtctcatggtgaccctggttctggagacttaatactgcggatggaacgtagagggtttccacagttgattctgtacaaaggtgtaaccccatggtggcgtatggggtcatggaccgggcataggtggagcggggtgcctgaaatgccaatagggtacatcttcaataactcatttgtgaataatgaggacgaagtatccttcacttacggtgtgacagatgcttcggtcataacaagaaccatggtgaacgagactggaaccatgcaccggtttacatggattgcgagggacaagagatggaatgatttctggtcagttcctaaagagcagtgcgataactacgctcattgtggccctaacggttactgtgattcccctagctcaaaaacgtttgagtgcacatgcctacctggttttgagcccaagtttccccggcattggttcttgagggactcttctggcgggtgtacaaagaaaaagagagcttcaatatgcagtgagaaagacgggtttgtgaagttaaagcgcatgaagattcccgacacatcagatgcaagtgtggatatgaacataacattgaaggagtgcaaacagaggtgcttgaagaactgctcttgtgtcgcttacgcaagtgcttaccacgagagtaaaagaggagcaataggatgcttgaaatggcatggtggtatgttggatgcaaggacatacttgaactcgggacaagatttctacatacgtgtagacaaggaagagttagcaacaaataacttctcttcccaaaacaagcttggagcaggtggtttcggacctgtttataagggcgtgttacaaaaccgtatggagatagcggtgaagaggttgtcgagaaactcgggacaaggaatggaagagttcaagaacgaggtcaagctgatatcaaagttgcagcatcgaaatctcgtgaggatcttaggatgttgcgttgaattggaagagaagatgttggtatacgagtatttaccaaacaagagcctagactatttcatattccatgaagagcagagagcagagttggattggccaaaaagaatggagatagtccgagggattgctcgtggaatcttatatcttcatcaagattcaagactgagaatcatccacagagatctcaaggccagcaatatacttcttgacagtgaaatgatcccaaagatttcagatttcggcatggctagaatctttgggggcaaccaaatggaaggatgcacaagtagggtcgtcggaacattcggatatatggcaccggagtatgcaatggagggacagttctccattaaatccgacgtctatagctttggagtattgatgttagagatcataaccggaaagaaaaacagtgctttccacgaggaatcatctaacttagtcggacatatttgggatctatgggaaaacggtgaagcaacagagatcatagacaatttaatggaccaagagacttatgatgagagagaagtgatgaagtgcatacaaattgggttgctctgtgtgcaagaaaacgcttcggacagagtagacatgtcctctgttgtcatcatgttgggtcataacgccactaatcttccgaatccaaagcatcctgcgtttacttccgcgagaaggagaggcggtgaaaatggtgcttgtcttaagggacaaaccggtatttctgttaatgacgttaccttcagcgacattcaaggtcgttaa

SEQ ID NO: 85282 - protein, 816 aa, Arabidopsis thaliana
  peptide (1)..(816): Ceres Seq. ID no. 12679939
  misc_feature (133)..(247): Pfam Name: D-mannose binding lectin Pfam Description: D-mannose binding lectin
  misc_feature (66)..(497): Homolog of NCBI NO: 6554181 NR Description: T23J18.8 [Arabidopsis thaliana]
  misc_feature (583)..(816): Homolog of NCBI NO: 6554181 NR Description: T23J18.8 [Arabidopsis thaliana]
  misc_feature (494)..(588): Homolog of NCBI NO: 6554181 NR Description: T23J18.8 [Arabidopsis thaliana]
  misc_feature (1)..(493): Homolog of NCBI NO: 6554177 NR Description: T23J18.1 [Arabidopsis thaliana]
  misc_feature (73)..(506): Homolog of NCBI NO: 15234427 NR Description: receptor-like serine/threonine protein kinase
  misc_feature (493)..(816): Homolog of NCBI NO: 15234427 NR Description: receptor-like serine/threonine protein kinase
  misc_feature (73)..(506): Homolog of NCBI NO: 913141 NR Description: ARK3 product/receptor-like serine/threonine
  misc_feature (493)..(816): Homolog of NCBI NO: 913141 NR Description: ARK3 product/receptor-like serine/threonine
  misc_feature (73)..(512): Homolog of NCBI NO: 7434408 NR Description: S-receptor kinase (EC 2.7.1.-) 1 - turnip
  misc_feature (492)..(816): Homolog of NCBI NO: 7434408 NR Description: S-receptor kinase (EC 2.7.1.-) 1 - turnip
MIIVGVLLVSFTLLSHMNQFLHLFESPTFEIYPELGRDSQLMTDPLGFQYLHSIYTFSLNPCSETNTNMKVVFVIFFFFLFQFCISVDTIMRRQSLRDGEVILSAGKRFAFGFFSLGDSELRYVGIWYAQISQQTIVWVANRDHPINDTSGMVKFSNRGNLSVYASDNETELIWSTNVSDSMLEPTLVATLSDLGNLVLFDPVTGRSFWESFDHPTDTFLPFMRLGFTRKDGLDRSLTSWKSHGDPGSGDLILRMERRGFPQLILYKGVTPWWRMGSWTGHRWSGVPEMPIGYIFNNSFVNNEDEVSFTYGVTDASVITRTMVNETGTMHRFTWIARDKRWNDFWSVPKEQCDNYAHCGPNGYCDSPSSKTFECTCLPGFEPKFPRHWFLRDSSGGCTKKKRASICSEKDGFVKLKRMKIPDTSDASVDMNITLKECKQRCLKNCSCVAYASAYHESKRGAIGCLKWHGGMLDARTYLNSGQDFYIRVDKEELATNNFSSQNKLGAGGFGPVYKGVLQNRMEIAVKRLSRNSGQGMEEFKNEVKLISKLQHRNLVRILGCCVELEEKMLVYEYLPNKSLDYFIFHEEQRAELDWPKRMEIVRGIARGILYLHQDSRLRIIHRDLKASNILLDSEMIPKISDFGMARIFGGNQMEGCTSRVVGTFGYMAPEYAMEGQFSIKSDVYSFGVLMLEIITGKKNSAFHEESSNLVGHIWDLWENGEATEIIDNLMDQETYDEREVMKCIQIGLLCVQENASDRVDMSSVVIMLGHNATNLPNPKHPAFTSARRRGGENGACLKGQTGISVNDVTFSDIQGR

SEQ ID NO: 85283 - protein, 800 aa, Arabidopsis thaliana
  peptide (1)..(800): Ceres Seq. ID no. 12679940
  misc_feature (117)..(231): Pfam Name: D-mannose binding lectin Pfam Description: D-mannose binding lectin
  misc_feature (50)..(481): Homolog of NCBI NO: 6554181 NR Description: T23J18.8 [Arabidopsis thaliana]
  misc_feature (567)..(800): Homolog of NCBI NO: 6554181 NR Description: T23J18.8 [Arabidopsis thaliana]
  misc_feature (478)..(572): Homolog of NCBI NO: 6554181 NR Description: T23J18.8 [Arabidopsis thaliana]
  misc_feature (1)..(477): Homolog of NCBI NO: 6554177 NR Description: T23J18.1 [Arabidopsis thaliana]
  misc_feature (57)..(490): Homolog of NCBI NO: 15234427 NR Description: receptor-like serine/threonine protein kinase
  misc_feature (477)..(800): Homolog of NCBI NO: 15234427 NR Description: receptor-like serine/threonine protein kinase
  misc_feature (57)..(490): Homolog of NCBI NO: 913141 NR Description: ARK3 product/receptor-like serine/threonine
  misc_feature (477)..(800): Homolog of NCBI NO: 913141 NR Description: ARK3 product/receptor-like serine/threonine
  misc_feature (57)..(496): Homolog of NCBI NO: 7434408 NR Description: S-receptor kinase (EC 2.7.1.-) 1 - turnip
  misc_feature (476)..(800): Homolog of NCBI NO: 7434408 NR Description: S-receptor kinase (EC 2.7.1.-) 1 - turnip
MNQFLHLFESPTFEIYPELGRDSQLMTDPLGFQYLHSIYTFSLNPCSETNTNMKVVFVIFFFFLFQFCISVDTIMRRQSLRDGEVILSAGKRFAFGFFSLGDSELRYVGIWYAQISQQTIVWVANRDHPINDTSGMVKFSNRGNLSVYASDNETELIWSTNVSDSMLEPTLVATLSDLGNLVLFDPVTGRSFWESFDHPTDTFLPFMRLGFTRKDGLDRSLTSWKSHGDPGSGDLILRMERRGFPQLILYKGVTPWWRMGSWTGHRWSGVPEMPIGYIFNNSFVNNEDEVSFTYGVTDASVITRTMVNETGTMHRFTWIARDKRWNDFWSVPKEQCDNYAHCGPNGYCDSPSSKTFECTCLPGFEPKFPRHWFLRDSSGGCTKKKRASICSEKDGFVKLKRMKIPDTSDASVDMNITLKECKQRCLKNCSCVAYASAYHESKRGAIGCLKWHGGMLDARTYLNSGQDFYIRVDKEELATNNFSSQNKLGAGGFGPVYKGVLQNRMEIAVKRLSRNSGQGMEEFKNEVKLISKLQHRNLVRILGCCVELEEKMLVYEYLPNKSLDYFIFHEEQRAELDWPKRMEIVRGIARGILYLHQDSRLRIIHRDLKASNILLDSEMIPKISDFGMARIFGGNQMEGCTSRVVGTFGYMAPEYAMEGQFSIKSDVYSFGVLMLEIITGKKNSAFHEESSNLVGHIWDLWENGEATEIIDNLMDQETYDEREVMKCIQIGLLCVQENASDRVDMSSVVIMLGHNATNLPNPKHPAFTSARRRGGENGACLKGQTGISVNDVTFSDIQGR

SEQ ID NO: 85284 - protein, 775 aa, Arabidopsis thaliana
  peptide (1)..(775): Ceres Seq. ID no. 12679941
  misc_feature (92)..(206): Pfam Name: D-mannose binding lectin Pfam Description: D-mannose binding lectin
  misc_feature (25)..(456): Homolog of NCBI NO: 6554181 NR Description: T23J18.8 [Arabidopsis thaliana]
  misc_feature (542)..(775): Homolog of NCBI NO: 6554181 NR Description: T23J18.8 [Arabidopsis thaliana]
  misc_feature (453)..(547): Homolog of NCBI NO: 6554181 NR Description: T23J18.8 [Arabidopsis thaliana]
  misc_feature (1)..(452): Homolog of NCBI NO: 6554177 NR Description: T23J18.1 [Arabidopsis thaliana]
  misc_feature (32)..(465): Homolog of NCBI NO: 15234427 NR Description: receptor-like serine/threonine protein kinase
  misc_feature (452)..(775): Homolog of NCBI NO: 15234427 NR Description: receptor-like serine/threonine protein kinase
  misc_feature (32)..(465): Homolog of NCBI NO: 913141 NR Description: ARK3 product/receptor-like serine/threonine
  misc_feature (452)..(775): Homolog of NCBI NO: 913141 NR Description: ARK3 product/receptor-like serine/threonine
  misc_feature (32)..(471): Homolog of NCBI NO: 7434408 NR Description: S-receptor kinase (EC 2.7.1.-) 1 - turnip
  misc_feature (451)..(775): Homolog of NCBI NO: 7434408 NR Description: S-receptor kinase (EC 2.7.1.-) 1 - turnip
MTDPLGFQYLHSIYTFSLNPCSETNTNMKVVFVIFFFFLFQFCISVDTIMRRQSLRDGEVILSAGKRFAFGFFSLGDSELRYVGIWYAQISQQTIVWVANRDHPINDTSGMVKFSNRGNLSVYASDNETELIWSTNVSDSMLEPTLVATLSDLGNLVLFDPVTGRSFWESFDHPTDTFLPFMRLGFTRKDGLDRSLTSWKSHGDPGSGDLILRMERRGFPQLILYKGVTPWWRMGSWTGHRWSGVPEMPIGYIFNNSFVNNEDEVSFTYGVTDASVITRTMVNETGTMHRFTWIARDKRWNDFWSVPKEQCDNYAHCGPNGYCDSPSSKTFECTCLPGFEPKFPRHWFLRDSSGGCTKKKRASICSEKDGFVKLKRMKIPDTSDASVDMNITLKECKQRCLKNCSCVAYASAYHESKRGAIGCLKWHGGMLDARTYLNSGQDFYIRVDKEELATNNFSSQNKLGAGGFGPVYKGVLQNRMEIAVKRLSRNSGQGMEEFKNEVKLISKLQHRNLVRILGCCVELEEKMLVYEYLPNKSLDYFIFHEEQRAELDWPKRMEIVRGIARGILYLHQDSRLRIIHRDLKASNILLDSEMIPKISDFGMARIFGGNQMEGCTSRVVGTFGYMAPEYAMEGQFSIKSDVYSFGVLMLEIITGKKNSAFHEESSNLVGHIWDLWENGEATEIIDNLMDQETYDEREVMKCIQIGLLCVQENASDRVDMSSVVIMLGHNATNLPNPKHPAFTSARRRGGENGACLKGQTGISVNDVTFSDIQGR

SEQ ID NO: 85285 - DNA, 2613 bp, Arabidopsis thaliana
  misc_feature (1)..(2613): Ceres Seq. ID no. 12679942
  misc_feature: MA Experiment ID: 20000179 Result: Up-regulated in Transcription
  misc_feature: MA Experiment 20000179 PARAMETER Experiment Name: At_Germinating_Seeds_P Parameter: Age (hr) Value: 6 vs. 0
  misc_feature: MA Experiment 20000179 PARAMETER Experiment Name: At_Germinating_Seeds_P Parameter: Tissue Value: Germinating Seeds
  misc_feature: MA Experiment ID: 20000180 Result: Up-regulated in Transcription
  misc_feature: MA Experiment 20000180 PARAMETER Experiment Name: At_Germinating_Seeds_P Parameter: Age (hr) Value: 24 vs. 0
  misc_feature: MA Experiment 20000180 PARAMETER Experiment Name: At_Germinating_Seeds_P Parameter: Tissue Value: Germinating Seeds
  misc_feature: MA Experiment ID: 20000234 Result: Down-regulated in Transcription
  misc_feature: MA Experiment 20000234 PARAMETER Experiment Name: At_Siliques_P Parameter: Age (day) Value: 21
  misc_feature: MA Experiment 20000234 PARAMETER Experiment Name: At_Siliques_P Parameter: Organism Value: A. thaliana
  misc_feature: MA Experiment 20000234 PARAMETER Experiment Name: At_Siliques_P Parameter: Plant Line Value: WS
  misc_feature: MA Experiment 20000234 PARAMETER Experiment Name: At_Siliques_P Parameter: Tissue Value: Less Than 5mm Siliques vs. Whole Plant
  misc_feature: MA Experiment ID: 20000235 Result: Down-regulated in Transcription
  misc_feature: MA Experiment 20000235 PARAMETER Experiment Name: At_Siliques_P Parameter: Age (day) Value: 21
  misc_feature: MA Experiment 20000235 PARAMETER Experiment Name: At_Siliques_P Parameter: Organism Value: A. thaliana
  misc_feature: MA Experiment 20000235 PARAMETER Experiment Name: At_Siliques_P Parameter: Plant Line Value: WS
  misc_feature: MA Experiment 20000235 PARAMETER Experiment Name: At_Siliques_P Parameter: Tissue Value: 5-10mm Siliques vs. Whole Plant
  misc_feature: MA Experiment ID: 20000264 Result: Down-regulated in Transcription
  misc_feature: MA Experiment 20000264 PARAMETER Experiment Name: At_Open_Flower_P Parameter: Age (day) Value: 21
  misc_feature: MA Experiment 20000264 PARAMETER Experiment Name: At_Open_Flower_P Parameter: Plant Line Value: WS
  misc_feature: MA Experiment 20000264 PARAMETER Experiment Name: At_Open_Flower_P Parameter: Tissue Value: Open Flower vs. Whole Plant
  misc_feature: MA Experiment ID: 20000265 Result: Down-regulated in Transcription
  misc_feature: MA Experiment 20000265 PARAMETER Experiment Name: At_Open_Flower_P Parameter: Age (day) Value: 21
  misc_feature: MA Experiment 20000265 PARAMETER Experiment Name: At_Open_Flower_P Parameter: Plant Line Value: WS
  misc_feature: MA Experiment 20000265 PARAMETER Experiment Name: At_Open_Flower_P Parameter: Tissue Value: Closed Flower vs. Whole Plant
  misc_feature: MA Experiment ID: 20000286 Result: Down-regulated in Transcription
  misc_feature: MA Experiment 20000286 PARAMETER Experiment Name: At_Open_Flower_P Parameter: Age (day) Value: 21
  misc_feature: MA Experiment 20000286 PARAMETER Experiment Name: At_Open_Flower_P Parameter: Plant Line Value: WS
  misc_feature: MA Experiment 20000286 PARAMETER Experiment Name: At_Open_Flower_P Parameter: Tissue Value: Half Open vs. Whole Plant
  misc_feature: MA Experiment ID: 20000439 Result: Down-regulated in Transcription
  misc_feature: MA Experiment 20000439 PARAMETER Experiment Name: At_Roots__P Parameter: Age (day) Value: 14 vs. 21
  misc_feature: MA Experiment 20000439 PARAMETER Experiment Name: At_Roots__P Parameter: Organism Value: A. thaliana
  misc_feature: MA Experiment 20000439 PARAMETER Experiment Name: At_Roots__P Parameter: Tissue Value: Roots vs. Whole Plant
  misc_feature: MA Experiment ID: 20000794 Result: Down-regulated in Transcription
  misc_feature: MA Experiment 20000794 PARAMETER Experiment Name: At_Petals_P Parameter: Age (day) Value: 23-25 days
  misc_feature: MA Experiment 20000794 PARAMETER Experiment Name: At_Petals_P Parameter: Plant Line Value: WS
  misc_feature: MA Experiment 20000794 PARAMETER Experiment Name: At_Petals_P Parameter: Tissue Value: Petals vs. Whole plant
  misc_feature: MA Experiment ID: 20001248 Result: Up-regulated in Transcription
  misc_feature: MA Experiment 20001248 PARAMETER Experiment Name: At_Far-red-induction_P Parameter: Age (day) Value: 7
  misc_feature: MA Experiment 20001248 PARAMETER Experiment Name: At_Far-red-induction_P Parameter: Light Value: Far-red vs. White
  misc_feature: MA Experiment 20001248 PARAMETER Experiment Name: At_Far-red-induction_P Parameter: Organism Value: A. thaliana
  misc_feature: MA Experiment 20001248 PARAMETER Experiment Name: At_Far-red-induction_P Parameter: Plant Line Value: Columbia
  misc_feature: MA Experiment 20001248 PARAMETER Experiment Name: At_Far-red-induction_P Parameter: Timepoint (hr) Value: 4
  misc_feature: MA Experiment 20001248 PARAMETER Experiment Name: At_Far-red-induction_P Parameter: Tissue Value: Whole Plant
atggcgatgaccagtaccatgcagctcttagtattgagttttctcgtaatagcctcactgtttcttggggcaacggtggctcctccagcaagtttgatctccacgcccgatcaggcattgaaggataaagccgacttgattgtcgccaaggatggcagcggcaacttcaccacggtgaatgaagcggttgcagcagctccagagaatggtgtgaagccttttgtcatctacatcaaagaagggttatacaaggaagttattcgtatcgggaagaagaaaactaacttaaccctcgttggcgacggcagagacttgacggtcctcagcggcgatttgaacggcgttgatggcatcaagactttcgactccgcaacacttgctgtagatgagagtggatttatggctcaagatttgtgtattcggaacacagctgggccagagaagcggcaggccgtggctctccgtattagcactgatatgacgatcatttatcgttgcaggatcgacgcgtatcaagacaccctttatgcatattcgggtagacaattctaccgagattgttatattacgggaaccgtcgatttcattttcggacgggcagctgcggtatttcaatattgccaaatcgaggcacgtaaaccggggataggacaaaccaacatcttgactgctcaatctcgcgaggaagatactgcaacttcgggattttcgttccagaaatgcaacatcagtgcaagttctgacctcactccaattaaaggaactgtaaagacgtttctgggacgtccgtggcgtgcattctcgagagtagtattcatggagtcgtttatagacgatgtcatcgatcgagcgggagcagatacaagtaaaagagtcggttggaaaggatatcacacaatcacccttaatgaagctacaagttttacagtggaaaaacttctacagggacatttgtggattaacgctatattctttcttgtttttgttgtttcagcatctgcaagatttagcacggaggttacaaaaagcgaaatcaacagtatctgcacacatacagatgtcgatgcttcattgtgctttgagttcttgaactcatctcctcaaattgcagcactggatttttatggccttaccaaatatttaattacttatgaatctcgaaaattttcagatatgttgaaacaattccagtcactcgtaaacagcactacggatcctagtgctaaaggttcctatcatgtatgcgtaggaacgtttgacaaaggtactggttgttttgatgacgccttcagacatttggcatccaaggactatatcactttggaatggagtgttgaatgtacgtttgacatggcagctggttttttttttcttgtttttgttgtttcatcatctgcaagatttagtacggagattacaaaaagtgaaatcaacagtatctgcacacatacagaagccaataccaatgcttcattgtgctttgagttcctgaactcatcccctgaaattgcatcactggatttctatggccttaccaaatatatacttacttataattctcgaaaaacttcagatatgctgaaacaattccaggcactcgtaagaagcacaacggatcccaacgctaaaggttcctaccatgtatgtgcagaaatgttcgacaaagctactgattgttttgatgacgccttcacaactttggcatccaaggactatatcactttagaacaaagggttgtttgtacgtttgacatgggggatgggtgtaaagaagagctgttaactttcactcctagcccacaactcttcaaagatgtttctattgtcaaaaatctttcttctatgagtcaattgaagaaaccgagagagagagtgagcggaatcatgacttctccgggaaaatctccgagatccgaccggaaatcaccgacggttgtcaccgtccagccgtcttctcccagattcccgatcagcacacctactgctggagctcaacgtaagatcgggatcgctgtcgatctaagcgacgagagtgcgtacgcagttcaatgggctgttcagaactatctccgatcaggtgacgccgttgttctccttcatgttcaaccgacgagtgtactttacggcgccgattggggcgctatggatttgtcgccgcagtgggatccaaataacgaagagtcgcagaggaagcttgaggacgatttcgacattgtcactaataagaaagcgagcgacgttgctcagcctttggttgaggcggatattccgtttaagatccatatcgtcaaggatcacgatatgaaggagaggctttgtttggaggtggagaggttagggctaagtactttgattatgggtagtagaggatttggtgctacgaagaggagtagtaaagggagattagggagtgtcagtgattactcagttcaccattgtgcttgtccggtggttgttgttagatttcctgatgataaggatggagaagatgagaaatccggcgacagtggtggggagaatctgatggacagtgataaacttcatacagtgcctgaggtggctgaagaagagggagataaggatgagtaccatgatgcttcggataagcagtag

SEQ ID NO: 85286 - protein, 870 aa, Arabidopsis thaliana
  peptide (1)..(870): Ceres Seq. ID no. 12679943
  misc_feature (45)..(317): Pfam Name: Pectinesterase Pfam Description: Pectinesterase
  misc_feature (1)..(285): Homolog of NCBI NO: 15220357 NR Description: pectinesterase family; protein id: At1g11370.1
  misc_feature (629)..(870): Homolog of NCBI NO: 30682187 NR Description: expressed protein [Arabidopsis thaliana]
  misc_feature (44)..(285): Homolog of NCBI NO: 7489090 NR Description: pectinesterase (EC 3.1.1.11) isoform 2 - tobacco (fragment) >gi|1279598|emb|CAA96434.1| pectin
  misc_feature (285)..(322): Homolog of NCBI NO: 7489090 NR Description: pectinesterase (EC 3.1.1.11) isoform 2 - tobacco (fragment) >gi|1279598|emb|CAA96434.1| pectin
  misc_feature (44)..(285): Homolog of NCBI NO: 7489091 NR Description: pectinesterase (EC 3.1.1.11) isoform 3 - tobacco (fragment) >gi|1279600|emb|CAA96435.1| pectin
  misc_feature (285)..(322): Homolog of NCBI NO: 7489091 NR Description: pectinesterase (EC 3.1.1.11) isoform 3 - tobacco (fragment) >gi|1279600|emb|CAA96435.1| pectin
  misc_feature (43)..(285): Homolog of NCBI NO: 7447367 NR Description: pectinesterase (EC 3.1.1.11) precursor - mung (fragment) >gi|1149556|emb|CAA64217.1| pectinmethylesterase
  misc_feature (264)..(320): Homolog of NCBI NO: 7447367 NR Description: pectinesterase (EC 3.1.1.11) precursor - mung (fragment) >gi|1149556|emb|CAA64217.1| pectinmethylesterase
  misc_feature (15)..(285): Homolog of NCBI NO: 14334992 NR Description: At1g11580/T23J18_33 [Arabidopsis thaliana]
  misc_feature (15)..(285): Homolog of NCBI NO: 15220424 NR Description: pectin methylesterase, putative; protein id:
MAMTSTMQLLVLSFLVIASLFLGATVAPPASLISTPDQALKDKADLIVAKDGSGNFTTVNEAVAAAPENGVKPFVIYIKEGLYKEVIRIGKKKTNLTLVGDGRDLTVLSGDLNGVDGIKTFDSATLAVDESGFMAQDLCIRNTAGPEKRQAVALRISTDMTIIYRCRIDAYQDTLYAYSGRQFYRDCYITGTVDFIFGRAAAVFQYCQIEARKPGIGQTNILTAQSREEDTATSGFSFQKCNISASSDLTPIKGTVKTFLGRPWRAFSRVVFMESFIDDVIDRAGADTSKRVGWKGYHTITLNEATSFTVEKLLQGHLWINAIFFLVFVVSASARFSTEVTKSEINSICTHTDVDASLCFEFLNSSPQIAALDFYGLTKYLITYESRKFSDMLKQFQSLVNSTTDPSAKGSYHVCVGTFDKGTGCFDDAFRHLASKDYITLEWSVECTFDMAAGFFFLVFVVSSSARFSTEITKSEINSICTHTEANTNASLCFEFLNSSPEIASLDFYGLTKYILTYNSRKTSDMLKQFQALVRSTTDPNAKGSYHVCAEMFDKATDCFDDAFTTLASKDYITLEQRVVCTFDMGDGCKEELLTFTPSPQLFKDVSIVKNLSSMSQLKKPRERVSGIMTSPGKSPRSDRKSPTVVTVQPSSPRFPISTPTAGAQRKIGIAVDLSDESAYAVQWAVQNYLRSGDAVVLLHVQPTSVLYGADWGAMDLSPQWDPNNEESQRKLEDDFDIVTNKKASDVAQPLVEADIPFKIHIVKDHDMKERLCLEVERLGLSTLIMGSRGFGATKRSSKGRLGSVSDYSVHHCACPVVVVRFPDDKDGEDEKSGDSGGENLMDSDKLHTVPEVAEEEGDKDEYHDASDKQ

SEQ ID NO: 85287 - protein, 868 aa, Arabidopsis thaliana
  peptide (1)..(868): Ceres Seq. ID no. 12679944
  misc_feature (43)..(315): Pfam Name: Pectinesterase Pfam Description: Pectinesterase
  misc_feature (1)..(283): Homolog of NCBI NO: 15220357 NR Description: pectinesterase family; protein id: At1g11370.1
  misc_feature (627)..(868): Homolog of NCBI NO: 30682187 NR Description: expressed protein [Arabidopsis thaliana]
  misc_feature (42)..(283): Homolog of NCBI NO: 7489090 NR Description: pectinesterase (EC 3.1.1.11) isoform 2 - tobacco (fragment) >gi|1279598|emb|CAA96434.1| pectin
  misc_feature (283)..(320): Homolog of NCBI NO: 7489090 NR Description: pectinesterase (EC 3.1.1.11) isoform 2 - tobacco (fragment) >gi|1279598|emb|CAA96434.1| pectin
  misc_feature (42)..(283): Homolog of NCBI NO: 7489091 NR Description: pectinesterase (EC 3.1.1.11) isoform 3 - tobacco (fragment) >gi|1279600|emb|CAA96435.1| pectin
  misc_feature (283)..(320): Homolog of NCBI NO: 7489091 NR Description: pectinesterase (EC 3.1.1.11) isoform 3 - tobacco (fragment) >gi|1279600|emb|CAA96435.1| pectin
  misc_feature (41)..(283): Homolog of NCBI NO: 7447367 NR Description: pectinesterase (EC 3.1.1.11) precursor - mung (fragment) >gi|1149556|emb|CAA64217.1| pectinmethylesterase
  misc_feature (262)..(318): Homolog of NCBI NO: 7447367 NR Description: pectinesterase (EC 3.1.1.11) precursor - mung (fragment) >gi|1149556|emb|CAA64217.1| pectinmethylesterase
  misc_feature (13)..(283): Homolog of NCBI NO: 14334992 NR Description: At1g11580/T23J18_33 [Arabidopsis thaliana]
  misc_feature (13)..(283): Homolog of NCBI NO: 15220424 NR Description: pectin methylesterase, putative; protein id:
MTSTMQLLVLSFLVIASLFLGATVAPPASLISTPDQALKDKADLIVAKDGSGNFTTVNEAVAAAPENGVKPFVIYIKEGLYKEVIRIGKKKTNLTLVGDGRDLTVLSGDLNGVDGIKTFDSATLAVDESGFMAQDLCIRNTAGPEKRQAVALRISTDMTIIYRCRIDAYQDTLYAYSGRQFYRDCYITGTVDFIFGRAAAVFQYCQIEARKPGIGQTNILTAQSREEDTATSGFSFQKCNISASSDLTPIKGTVKTFLGRPWRAFSRVVFMESFIDDVIDRAGADTSKRVGWKGYHTITLNEATSFTVEKLLQGHLWINAIFFLVFVVSASARFSTEVTKSEINSICTHTDVDASLCFEFLNSSPQIAALDFYGLTKYLITYESRKFSDMLKQFQSLVNSTTDPSAKGSYHVCVGTFDKGTGCFDDAFRHLASKDYITLEWSVECTFDMAAGFFFLVFVVSSSARFSTEITKSEINSICTHTEANTNASLCFEFLNSSPEIASLDFYGLTKYILTYNSRKTSDMLKQFQALVRSTTDPNAKGSYHVCAEMFDKATDCFDDAFTTLASKDYITLEQRVVCTFDMGDGCKEELLTFTPSPQLFKDVSIVKNLSSMSQLKKPRERVSGIMTSPGKSPRSDRKSPTVVTVQPSSPRFPISTPTAGAQRKIGIAVDLSDESAYAVQWAVQNYLRSGDAVVLLHVQPTSVLYGADWGAMDLSPQWDPNNEESQRKLEDDFDIVTNKKASDVAQPLVEADIPFKIHIVKDHDMKERLCLEVERLGLSTLIMGSRGFGATKRSSKGRLGSVSDYSVHHCACPVVVVRFPDDKDGEDEKSGDSGGENLMDSDKLHTVPEVAEEEGDKDEYHDASDKQ

SEQ ID NO: 85288 - protein, 864 aa, Arabidopsis thaliana
  peptide (1)..(864): Ceres Seq. ID no. 12679945
  misc_feature (39)..(311): Pfam Name: Pectinesterase Pfam Description: Pectinesterase
  misc_feature (1)..(279): Homolog of NCBI NO: 15220357 NR Description: pectinesterase family; protein id: At1g11370.1
  misc_feature (623)..(864): Homolog of NCBI NO: 30682187 NR Description: expressed protein [Arabidopsis thaliana]
  misc_feature (38)..(279): Homolog of NCBI NO: 7489090 NR Description: pectinesterase (EC 3.1.1.11) isoform 2 - tobacco (fragment) >gi|1279598|emb|CAA96434.1| pectin
  misc_feature (279)..(316): Homolog of NCBI NO: 7489090 NR Description: pectinesterase (EC 3.1.1.11) isoform 2 - tobacco (fragment) >gi|1279598|emb|CAA96434.1| pectin
  misc_feature (38)..(279): Homolog of NCBI NO: 7489091 NR Description: pectinesterase (EC 3.1.1.11) isoform 3 - tobacco (fragment) >gi|1279600|emb|CAA96435.1| pectin
  misc_feature (279)..(316): Homolog of NCBI NO: 7489091 NR Description: pectinesterase (EC 3.1.1.11) isoform 3 - tobacco (fragment) >gi|1279600|emb|CAA96435.1| pectin
  misc_feature (37)..(279): Homolog of NCBI NO: 7447367 NR Description: pectinesterase (EC 3.1.1.11) precursor - mung (fragment) >gi|1149556|emb|CAA64217.1| pectinmethylesterase
  misc_feature (258)..(314): Homolog of NCBI NO: 7447367 NR Description: pectinesterase (EC 3.1.1.11) precursor - mung (fragment) >gi|1149556|emb|CAA64217.1| pectinmethylesterase
  misc_feature (9)..(279): Homolog of NCBI NO: 14334992 NR Description: At1g11580/T23J18_33 [Arabidopsis thaliana]
  misc_feature (9)..(279): Homolog of NCBI NO: 15220424 NR Description: pectin methylesterase, putative; protein id:
MQLLVLSFLVIASLFLGATVAPPASLISTPDQALKDKADLIVAKDGSGNFTTVNEAVAAAPENGVKPFVIYIKEGLYKEVIRIGKKKTNLTLVGDGRDLTVLSGDLNGVDGIKTFDSATLAVDESGFMAQDLCIRNTAGPEKRQAVALRISTDMTIIYRCRIDAYQDTLYAYSGRQFYRDCYITGTVDFIFGRAAAVFQYCQIEARKPGIGQTNILTAQSREEDTATSGFSFQKCNISASSDLTPIKGTVKTFLGRPWRAFSRVVFMESFIDDVIDRAGADTSKRVGWKGYHTITLNEATSFTVEKLLQGHLWINAIFFLVFVVSASARFSTEVTKSEINSICTHTDVDASLCFEFLNSSPQIAALDFYGLTKYLITYESRKFSDMLKQFQSLVNSTTDPSAKGSYHVCVGTFDKGTGCFDDAFRHLASKDYITLEWSVECTFDMAAGFFFLVFVVSSSARFSTEITKSEINSICTHTEANTNASLCFEFLNSSPEIASLDFYGLTKYILTYNSRKTSDMLKQFQALVRSTTDPNAKGSYHVCAEMFDKATDCFDDAFTTLASKDYITLEQRVVCTFDMGDGCKEELLTFTPSPQLFKDVSIVKNLSSMSQLKKPRERVSGIMTSPGKSPRSDRKSPTVVTVQPSSPRFPISTPTAGAQRKIGIAVDLSDESAYAVQWAVQNYLRSGDAVVLLHVQPTSVLYGADWGAMDLSPQWDPNNEESQRKLEDDFDIVTNKKASDVAQPLVEADIPFKIHIVKDHDMKERLCLEVERLGLSTLIMGSRGFGATKRSSKGRLGSVSDYSVHHCACPVVVVRFPDDKDGEDEKSGDSGGENLMDSDKLHTVPEVAEEEGDKDEYHDASDKQ

SEQ ID NO: 85289 - DNA, 1287 bp, Arabidopsis thaliana
  misc_feature (1)..(1287): Ceres Seq. ID no. 12679946
  misc_feature: MA Experiment ID: 20000437 Result: Up-regulated in Transcription
  misc_feature: MA Experiment 20000437 PARAMETER Experiment Name: At_Drought_P Parameter: Age (day) Value: 8
  misc_feature: MA Experiment 20000437 PARAMETER Experiment Name: At_Drought_P Parameter: Organism Value: A. thaliana
  misc_feature: MA Experiment 20000437 PARAMETER Experiment Name: At_Drought_P Parameter: Plant Line Value: WS
  misc_feature: MA Experiment 20000437 PARAMETER Experiment Name: At_Drought_P Parameter: Timepoint (hr) Value: 24
  misc_feature: MA Experiment 20000437 PARAMETER Experiment Name: At_Drought_P Parameter: Tissue Value: Whole Plant
  misc_feature: MA Experiment 20000437 PARAMETER Experiment Name: At_Drought_P Parameter: Treatment Value: Drought vs. No Drought
  misc_feature: MA Experiment ID: 20000439 Result: Up-regulated in Transcription
  misc_feature: MA Experiment 20000439 PARAMETER Experiment Name: At_Roots__P Parameter: Age (day) Value: 14 vs. 21
  misc_feature: MA Experiment 20000439 PARAMETER Experiment Name: At_Roots__P Parameter: Organism Value: A. thaliana
  misc_feature: MA Experiment 20000439 PARAMETER Experiment Name: At_Roots__P Parameter: Tissue Value: Roots vs. Whole Plant
  misc_feature: MA Experiment ID: 20001451 Result: Down-regulated in Transcription
  misc_feature: MA Experiment 20001451 PARAMETER Experiment Name: At_Far-red-induction_P Parameter: Age (day) Value: 7
  misc_feature: MA Experiment 20001451 PARAMETER Experiment Name: At_Far-red-induction_P Parameter: Light Value: Far-red vs. White
  misc_feature: MA Experiment 20001451 PARAMETER Experiment Name: At_Far-red-induction_P Parameter: Organism Value: A. thaliana
  misc_feature: MA Experiment 20001451 PARAMETER Experiment Name: At_Far-red-induction_P Parameter: Plant Line Value: Columbia
  misc_feature: MA Experiment 20001451 PARAMETER Experiment Name: At_Far-red-induction_P Parameter: Timepoint (hr) Value: 24
  misc_feature: MA Experiment 20001451 PARAMETER Experiment Name: At_Far-red-induction_P Parameter: Tissue Value: Whole Plant
  misc_feature: MA Experiment ID: 20001558 Result: Up-regulated in Transcription
  misc_feature: MA Experiment 20001558 PARAMETER Experiment Name: At_Drought_Soil_Dry_P Parameter: Age (day) Value: 27
  misc_feature: MA Experiment 20001558 PARAMETER Experiment Name: At_Drought_Soil_Dry_P Parameter: Organism Value: A. thaliana
  misc_feature: MA Experiment 20001558 PARAMETER Experiment Name: At_Drought_Soil_Dry_P Parameter: Plant Line Value: WS
  misc_feature: MA Experiment 20001558 PARAMETER Experiment Name: At_Drought_Soil_Dry_P Parameter: Post Timepoint (hr) Value: 6
  misc_feature: MA Experiment 20001558 PARAMETER Experiment Name: At_Drought_Soil_Dry_P Parameter: Post-Treatment Value: Re-Water vs. No Drought
  misc_feature: MA Experiment 20001558 PARAMETER Experiment Name: At_Drought_Soil_Dry_P Parameter: Timepoint (day) Value: 13
  misc_feature: MA Experiment 20001558 PARAMETER Experiment Name: At_Drought_Soil_Dry_P Parameter: Treatment Value: Drought vs. No Drought
atggggctggttgtggaatcatgtgggcctcgttttaggaaaatatggcttgagatggtccatcgaactctggaaagagcaggtcctgcttttatcaaatggggtcaatgggcagccacgcgacctgatctattccccaaggatttgtgttcacagctctcaaagcttcacagtaatgctcctgagcatagcttcgcctacactaagaaaactatcgagaaggcatttggtcgtaaactttctgagatatttgaggagtttgatgaggtgccagtggcatctgggagtattgcccaagtacatagagcttctttaaggtttcagtatccaggacaaaagtccaagtcttcgctggttgcggttaaagttagacatccgggtgttggtgaatcgattaggagagattttgtgataattaatttggtggcaaagatatcgactttaattccagctttgaaatggttgagattggacgagagtgtgcaacagtttggtgtcttcatgttgtctcaagttgatctcgcgagggaagcttcacatttgagtcggttcatatataacttccgtagatggaaggatgtctctttccctaaacctgtgtatcctcttgtacatcctgctgttttggtggagacatatgagcatggagaaagtgtggcacgttatgttgatggaatggaaggacatgaatggattaagactagattggctcacatcgggacccatgccctcttgaagatgctcttggttgataactttattcacgctgacatgcatccgggaaatatccttgtccggaaaaaggcttcccgtggaggccttttcaaaacgaagaagcctcacattgttttccttgatgtgggaatgactgcagaacttgcaaagaatgaccgagagaacttacttgactttttcaaggcggttgcgcgtagagatggccggactgctgctgaacgaacacttaaattatcaagaaagcagaattgtcccaatccagaggcttttatcgaggaagtagaggaagcattcaaattctggggaacccctgagggagatttagtacatccagcagattgtatgcacgaattacttgagaaagtaagacgtcatagagtaaatattgatgggaatgtgtgcactgttatggtgacaacattagttctcgagggttggcaacggaaacttgacccaggatatgatgtgatgcacacgttgcaaacaatggtgttgaaaaccgactgggctaagtctctttcttatacggtggatggtctgatggcgccgtag

SEQ ID NO: 85290 - protein, 428 aa, Arabidopsis thaliana
  peptide (1)..(428): Ceres Seq. ID no. 12679947
  misc_feature (74)..(200): Pfam Name: ABC1 family Pfam Description: ABC1 family
  misc_feature (1)..(428): Homolog of NCBI NO: 30682208 NR Description: hypethetical 62.8 KD protein in SSE1-CAR1
  misc_feature (1)..(428): Homolog of NCBI NO: 25404331 NR Description: hypothetical protein T25B24.1 [imported] - thaliana >gi|4585871|gb|AAD25544.1|AC005850_1 Unknown protein
  misc_feature (1)..(428): Homolog of NCBI NO: 30696591 NR Description: expressed protein [Arabidopsis thaliana] unknown protein [Arabidopsis thaliana]
  misc_feature (1)..(428): Homolog of NCBI NO: 19387282 NR Description: putative 62.8 kDa protein [Oryza sativa (japonica
  misc_feature (12)..(413): Homolog of NCBI NO: 34394005 NR Description: putative ubiquinone biosynthesis protein AarF
  misc_feature (108)..(266): Homolog of NCBI NO: 34855563 NR Description: similar to f15402 -related like (3G472) [Rattus
  misc_feature (282)..(411): Homolog of NCBI NO: 34855563 NR Description: similar to f15402 -related like (3G472) [Rattus
  misc_feature (10)..(103): Homolog of NCBI NO: 34855563 NR Description: similar to f15402 -related like (3G472) [Rattus
  misc_feature (119)..(266): Homolog of NCBI NO: 30725855 NR Description: EST AA408112 [Mus musculus] unnamed protein product [Mus musculus]
  misc_feature (282)..(411): Homolog of NCBI NO: 30725855 NR Description: EST AA408112 [Mus musculus] unnamed protein product [Mus musculus]
MGLVVESCGPRFRKIWLEMVHRTLERAGPAFIKWGQWAATRPDLFPKDLCSQLSKLHSNAPEHSFAYTKKTIEKAFGRKLSEIFEEFDEVPVASGSIAQVHRASLRFQYPGQKSKSSLVAVKVRHPGVGESIRRDFVIINLVAKISTLIPALKWLRLDESVQQFGVFMLSQVDLAREASHLSRFIYNFRRWKDVSFPKPVYPLVHPAVLVETYEHGESVARYVDGMEGHEWIKTRLAHIGTHALLKMLLVDNFIHADMHPGNILVRKKASRGGLFKTKKPHIVFLDVGMTAELAKNDRENLLDFFKAVARRDGRTAAERTLKLSRKQNCPNPEAFIEEVEEAFKFWGTPEGDLVHPADCMHELLEKVRRHRVNIDGNVCTVMVTTLVLEGWQRKLDPGYDVMHTLQTMVLKTDWAKSLSYTVDGLMAP

SEQ ID NO: 85291 - protein, 410 aa, Arabidopsis thaliana
  peptide (1)..(410): Ceres Seq. ID no. 12679948
  misc_feature (56)..(182): Pfam Name: ABC1 family Pfam Description: ABC1 family
  misc_feature (1)..(410): Homolog of NCBI NO: 30682208 NR Description: hypethetical 62.8 KD protein in SSE1-CAR1
  misc_feature (1)..(410): Homolog of NCBI NO: 25404331 NR Description: hypothetical protein T25B24.1 [imported] - thaliana >gi|4585871|gb|AAD25544.1|AC005850_1 Unknown protein
  misc_feature (1)..(410): Homolog of NCBI NO: 30696591 NR Description: expressed protein [Arabidopsis thaliana] unknown protein [Arabidopsis thaliana]
  misc_feature (1)..(410): Homolog of NCBI NO: 19387282 NR Description: putative 62.8 kDa protein [Oryza sativa (japonica
  misc_feature (1)..(395): Homolog of NCBI NO: 34394005 NR Description: putative ubiquinone biosynthesis protein AarF
  misc_feature (90)..(248): Homolog of NCBI NO: 34855563 NR Description: similar to f15402 -related like (3G472) [Rattus
  misc_feature (264)..(393): Homolog of NCBI NO: 34855563 NR Description: similar to f15402 -related like (3G472) [Rattus
  misc_feature (1)..(85): Homolog of NCBI NO: 34855563 NR Description: similar to f15402 -related like (3G472) [Rattus
  misc_feature (101)..(248): Homolog of NCBI NO: 30725855 NR Description: EST AA408112 [Mus musculus] unnamed protein product [Mus musculus]
  misc_feature (264)..(393): Homolog of NCBI NO: 30725855 NR Description: EST AA408112 [Mus musculus] unnamed protein product [Mus musculus]
MVHRTLERAGPAFIKWGQWAATRPDLFPKDLCSQLSKLHSNAPEHSFAYTKKTIEKAFGRKLSEIFEEFDEVPVASGSIAQVHRASLRFQYPGQKSKSSLVAVKVRHPGVGESIRRDFVIINLVAKISTLIPALKWLRLDESVQQFGVFMLSQVDLAREASHLSRFIYNFRRWKDVSFPKPVYPLVHPAVLVETYEHGESVARYVDGMEGHEWIKTRLAHIGTHALLKMLLVDNFIHADMHPGNILVRKKASRGGLFKTKKPHIVFLDVGMTAELAKNDRENLLDFFKAVARRDGRTAAERTLKLSRKQNCPNPEAFIEEVEEAFKFWGTPEGDLVHPADCMHELLEKVRRHRVNIDGNVCTVMVTTLVLEGWQRKLDPGYDVMHTLQTMVLKTDWAKSLSYTVDGLMAP

SEQ ID NO: 85292 - protein, 261 aa, Arabidopsis thaliana
  peptide (1)..(261): Ceres Seq. ID no. 12679949
  misc_feature (1)..(261): Homolog of NCBI NO: 30682208 NR Description: hypethetical 62.8 KD protein in SSE1-CAR1
  misc_feature (1)..(261): Homolog of NCBI NO: 25404331 NR Description: hypothetical protein T25B24.1 [imported] - thaliana >gi|4585871|gb|AAD25544.1|AC005850_1 Unknown protein
  misc_feature (1)..(261): Homolog of NCBI NO: 30696591 NR Description: expressed protein [Arabidopsis thaliana] unknown protein [Arabidopsis thaliana]
  misc_feature (1)..(261): Homolog of NCBI NO: 19387282 NR Description: putative 62.8 kDa protein [Oryza sativa (japonica
  misc_feature (1)..(246): Homolog of NCBI NO: 34394005 NR Description: putative ubiquinone biosynthesis protein AarF
  misc_feature (1)..(99): Homolog of NCBI NO: 34855563 NR Description: similar to f15402 -related like (3G472) [Rattus
  misc_feature (115)..(244): Homolog of NCBI NO: 34855563 NR Description: similar to f15402 -related like (3G472) [Rattus
  misc_feature (1)..(99): Homolog of NCBI NO: 30725855 NR Description: EST AA408112 [Mus musculus] unnamed protein product [Mus musculus]
  misc_feature (115)..(244): Homolog of NCBI NO: 30725855 NR Description: EST AA408112 [Mus musculus] unnamed protein product [Mus musculus]
  misc_feature (1)..(238): Homolog of NCBI NO: 40742452 NR Description: hypothetical protein AN6996.2 [Aspergillus
MLSQVDLAREASHLSRFIYNFRRWKDVSFPKPVYPLVHPAVLVETYEHGESVARYVDGMEGHEWIKTRLAHIGTHALLKMLLVDNFIHADMHPGNILVRKKASRGGLFKTKKPHIVFLDVGMTAELAKNDRENLLDFFKAVARRDGRTAAERTLKLSRKQNCPNPEAFIEEVEEAFKFWGTPEGDLVHPADCMHELLEKVRRHRVNIDGNVCTVMVTTLVLEGWQRKLDPGYDVMHTLQTMVLKTDWAKSLSYTVDGLMAP

SEQ ID NO: 85293 - DNA, 2349 bp, Arabidopsis thaliana
  misc_feature (1)..(2349): Ceres Seq. ID no. 12679950
  misc_feature: MA Experiment ID: 20000314 Result: Down-regulated in Transcription
  misc_feature: MA Experiment 20000314 PARAMETER Experiment Name: At_14day_Shoots-Roots_Sub_P Parameter: Age (day) Value: 14
  misc_feature: MA Experiment 20000314 PARAMETER Experiment Name: At_14day_Shoots-Roots_Sub_P Parameter: Organism Value: A. thaliana
  misc_feature: MA Experiment 20000314 PARAMETER Experiment Name: At_14day_Shoots-Roots_Sub_P Parameter: Plant Line Value: WS
  misc_feature: MA Experiment 20000314 PARAMETER Experiment Name: At_14day_Shoots-Roots_Sub_P Parameter: Tissue Value: Roots vs. Whole Plant
  misc_feature: MA Experiment ID: 20000355 Result: Up-regulated in Transcription
  misc_feature: MA Experiment 20000355 PARAMETER Experiment Name: At_Siliques_Sub_P Parameter: Age (day) Value: 21
  misc_feature: MA Experiment 20000355 PARAMETER Experiment Name: At_Siliques_Sub_P Parameter: Organism Value: A. thaliana
  misc_feature: MA Experiment 20000355 PARAMETER Experiment Name: At_Siliques_Sub_P Parameter: Plant Line Value: WS
  misc_feature: MA Experiment 20000355 PARAMETER Experiment Name: At_Siliques_Sub_P Parameter: Tissue Value: Less Than 5mm Siliques vs. Whole Plant
  misc_feature: MA Experiment ID: 20000440 Result: Up-regulated in Transcription
  misc_feature: MA Experiment 20000440 PARAMETER Experiment Name: At_Closed-Flower__Sub_P Parameter: Tissue Value: Closed Flower vs. Whole Plant
atgaagttcttctttatctttttcattttcttgttctccttcttgattcaatcttgttactctgacaacacaatcttgagaagtcagtctttgaaagatggtgatgttatatactctgaaggaaagagatttgcttttggattcttcagcttggggaattcaaagctcaggtatgttgggatttggtatgctcaagtctctgagcagactattgtatgggttgcaaatagagatcatcctattaatgacacatctggtctgataaagttcagtaccagagggaatctttgtgtgtatgcatctggcaatggaacagagcctatttggtctactgatgttattgatatgatccaagaacctgctttagttgcgaagctatctgatttaggcaaccttgttctacttgatcctgtcacagggaaaagtttctgggagagctttaatcatcctacaaacactttgcttccctttatgaagtttggattcactcgtcaaagcggtgtggatcgtattatgacgtcttggagatctcctggtgacccgggttctggaaacattacataccggatagaacgtagagggtttccgcagatgatgatgtacaagggtctgactctttggtggcgtactgggtcatggacagggcaaagatggagtggtgtgcctgaaatgacaaacaagtttatcttcaatatctcgtttgtgaataatccagatgaagtatcaatcacttatggagtgttagatgcttcggttacaacaagaatggtgctaaacgagacaggaactctgcaacggtttcgctggaacgggagagataagaaatggatcgggttctggtcagctcccgaagataagtgtgacatctacaaccactgtggctttaacggttactgtgattccaccagtacagagaagtttgagtgctcttgcttaccggggtacgagcctaagacacctcgagattggttcttgagagatgcttcggatgggtgcacgaggataaaagcagattcgatatgtaatgggaaagaagggtttgcaaagttgaagcgagtgaagattcccaatacatcagctgttaatgtggatatgaacataacactgaaggaatgtgaacagaggtgcttgaagaactgctcatgtgttgcttatgcgagtgcttaccacgagagtcaagatggagctaaagggtgcttgacatggcacggcaatatgttggatactaggacatacttgagctcaggacaggatttctatttacgcgtagataagtcagagttagactcattcatacttgaagagcttgaggacaaatcaagaagccgggagttgcctctctttgagcttagcacgattgctacagcaacgaataattttgcttttcaaaacaagcttggagcaggtggttttggacctgtttataaaggtgtgttacaaaatggtatggaaatagcagtgaagaggttgtcaaaaagctcaggtcaaggaatggaagagttcaagaacgaggtcaagttgatatcgaagctgcagcatcgaaatctcgtgaggatcttaggatgttgtgttgaatttgaagagaagatgttggtatacgagtatttaccaaacaagagcctagactatttcatattccatgaagagcaaagagcagagttggattggccaaaaagaatggggataatccgcgggattggtcgtggaatcttataccttcatcaagattcaaggctgaggatcatccacagagaccttaaggccagcaatgtacttcttgacaatgaaatgataccgaagattgcggatttcggcctggctagaatcttcggaggcaaccaaatcgaaggaagcacaaatcgagtcgtcggaacatatggatacatgtcaccagagtatgcaatggacggccagttctctattaaatccgatgtatacagctttggagtattgatcttagagatcataaccggaaagagaaacagtgctttttatgaggaatctttgaatctagtcaaacatatttgggatcgatgggaaaatggtgaagctatagagatcatagacaaattaatgggtgaagagacgtatgatgagggcgaagtaatgaagtgcttacacattgggttactttgcgtgcaagaaaactcttcagacagaccagacatgtcctctgttgtcttcatgttaggtcataacgccattgatcttccatctccgaagcatcctgcatttacggcgggaaggaggagaaacaccaaaactggcggcagctcagataattggcccagcggagaaaccagcagtactattaacgacgttactctcaccgatgttcaaggtcgttaa

SEQ ID NO: 85294 - protein, 782 aa, Arabidopsis thaliana
  peptide (1)..(782): Ceres Seq. ID no. 12679951
  misc_feature (68)..(182): Pfam Name: D-mannose binding lectin Pfam Description: D-mannose binding lectin
  misc_feature (1)..(441): Homolog of NCBI NO: 25287699 NR Description: receptor-like protein kinase [imported] -
  misc_feature (547)..(782): Homolog of NCBI NO: 25287699 NR Description: receptor-like protein kinase [imported] -
  misc_feature (429)..(513): Homolog of NCBI NO: 25287699 NR Description: receptor-like protein kinase [imported] -
  misc_feature (11)..(429): Homolog of NCBI NO: 16040952 NR Description: receptor kinase 5 [Brassica rapa]
  misc_feature (437)..(782): Homolog of NCBI NO: 16040952 NR Description: receptor kinase 5 [Brassica rapa]
  misc_feature (11)..(429): Homolog of NCBI NO: 2181188 NR Description: serine /threonine kinase [Brassica oleracea]
  misc_feature (11)..(429): Homolog of NCBI NO: 7434413 NR Description: receptor-like kinase (EC 2.7.1.-) SFR2 - wild
  misc_feature (437)..(782): Homolog of NCBI NO: 2181188 NR Description: serine /threonine kinase [Brassica oleracea]
  misc_feature (437)..(782): Homolog of NCBI NO: 7434413 NR Description: receptor-like kinase (EC 2.7.1.-) SFR2 - wild
  misc_feature (3)..(429): Homolog of NCBI NO: 15234427 NR Description: receptor-like serine/threonine protein kinase
MKFFFIFFIFLFSFLIQSCYSDNTILRSQSLKDGDVIYSEGKRFAFGFFSLGNSKLRYVGIWYAQVSEQTIVWVANRDHPINDTSGLIKFSTRGNLCVYASGNGTEPIWSTDVIDMIQEPALVAKLSDLGNLVLLDPVTGKSFWESFNHPTNTLLPFMKFGFTRQSGVDRIMTSWRSPGDPGSGNITYRIERRGFPQMMMYKGLTLWWRTGSWTGQRWSGVPEMTNKFIFNISFVNNPDEVSITYGVLDASVTTRMVLNETGTLQRFRWNGRDKKWIGFWSAPEDKCDIYNHCGFNGYCDSTSTEKFECSCLPGYEPKTPRDWFLRDASDGCTRIKADSICNGKEGFAKLKRVKIPNTSAVNVDMNITLKECEQRCLKNCSCVAYASAYHESQDGAKGCLTWHGNMLDTRTYLSSGQDFYLRVDKSELDSFILEELEDKSRSRELPLFELSTIATATNNFAFQNKLGAGGFGPVYKGVLQNGMEIAVKRLSKSSGQGMEEFKNEVKLISKLQHRNLVRILGCCVEFEEKMLVYEYLPNKSLDYFIFHEEQRAELDWPKRMGIIRGIGRGILYLHQDSRLRIIHRDLKASNVLLDNEMIPKIADFGLARIFGGNQIEGSTNRVVGTYGYMSPEYAMDGQFSIKSDVYSFGVLILEIITGKRNSAFYEESLNLVKHIWDRWENGEAIEIIDKLMGEETYDEGEVMKCLHIGLLCVQENSSDRPDMSSVVFMLGHNAIDLPSPKHPAFTAGRRRNTKTGGSSDNWPSGETSSTINDVTLTDVQGR

SEQ ID NO: 85295 - protein, 667 aa, Arabidopsis thaliana
  peptide (1)..(667): Ceres Seq. ID no. 12679952
  misc_feature (1)..(67): Pfam Name: D-mannose binding lectin Pfam Description: D-mannose binding lectin
  misc_feature (1)..(326): Homolog of NCBI NO: 25287699 NR Description: receptor-like protein kinase [imported] -
  misc_feature (432)..(667): Homolog of NCBI NO: 25287699 NR Description: receptor-like protein kinase [imported] -
  misc_feature (314)..(398): Homolog of NCBI NO: 25287699 NR Description: receptor-like protein kinase [imported] -
  misc_feature (1)..(314): Homolog of NCBI NO: 16040952 NR Description: receptor kinase 5 [Brassica rapa]
  misc_feature (322)..(667): Homolog of NCBI NO: 16040952 NR Description: receptor kinase 5 [Brassica rapa]
  misc_feature (1)..(314): Homolog of NCBI NO: 2181188 NR Description: serine /threonine kinase [Brassica oleracea]
  misc_feature (1)..(314): Homolog of NCBI NO: 7434413 NR Description: receptor-like kinase (EC 2.7.1.-) SFR2 - wild
  misc_feature (322)..(667): Homolog of NCBI NO: 2181188 NR Description: serine /threonine kinase [Brassica oleracea]
  misc_feature (322)..(667): Homolog of NCBI NO: 7434413 NR Description: receptor-like kinase (EC 2.7.1.-) SFR2 - wild
  misc_feature (1)..(314): Homolog of NCBI NO: 15234427 NR Description: receptor-like serine/threonine protein kinase
MIQEPALVAKLSDLGNLVLLDPVTGKSFWESFNHPTNTLLPFMKFGFTRQSGVDRIMTSWRSPGDPGSGNITYRIERRGFPQMMMYKGLTLWWRTGSWTGQRWSGVPEMTNKFIFNISFVNNPDEVSITYGVLDASVTTRMVLNETGTLQRFRWNGRDKKWIGFWSAPEDKCDIYNHCGFNGYCDSTSTEKFECSCLPGYEPKTPRDWFLRDASDGCTRIKADSICNGKEGFAKLKRVKIPNTSAVNVDMNITLKECEQRCLKNCSCVAYASAYHESQDGAKGCLTWHGNMLDTRTYLSSGQDFYLRVDKSELDSFILEELEDKSRSRELPLFELSTIATATNNFAFQNKLGAGGFGPVYKGVLQNGMEIAVKRLSKSSGQGMEEFKNEVKLISKLQHRNLVRILGCCVEFEEKMLVYEYLPNKSLDYFIFHEEQRAELDWPKRMGIIRGIGRGILYLHQDSRLRIIHRDLKASNVLLDNEMIPKIADFGLARIFGGNQIEGSTNRVVGTYGYMSPEYAMDGQFSIKSDVYSFGVLILEIITGKRNSAFYEESLNLVKHIWDRWENGEAIEIIDKLMGEETYDEGEVMKCLHIGLLCVQENSSDRPDMSSVVFMLGHNAIDLPSPKHPAFTAGRRRNTKTGGSSDNWPSGETSSTINDVTLTDVQGR

SEQ ID NO: 85296 - protein, 625 aa, Arabidopsis thaliana
  peptide (1)..(625): Ceres Seq. ID no. 12679953
  misc_feature (1)..(284): Homolog of NCBI NO: 25287699 NR Description: receptor-like protein kinase [imported] -
  misc_feature (390)..(625): Homolog of NCBI NO: 25287699 NR Description: receptor-like protein kinase [imported] -
  misc_feature (272)..(356): Homolog of NCBI NO: 25287699 NR Description: receptor-like protein kinase [imported] -
  misc_feature (1)..(272): Homolog of NCBI NO: 16040952 NR Description: receptor kinase 5 [Brassica rapa]
  misc_feature (280)..(625): Homolog of NCBI NO: 16040952 NR Description: receptor kinase 5 [Brassica rapa]
  misc_feature (1)..(272): Homolog of NCBI NO: 2181188 NR Description: serine /threonine kinase [Brassica oleracea]
  misc_feature (1)..(272): Homolog of NCBI NO: 7434413 NR Description: receptor-like kinase (EC 2.7.1.-) SFR2 - wild
  misc_feature (280)..(625): Homolog of NCBI NO: 2181188 NR Description: serine /threonine kinase [Brassica oleracea]
  misc_feature (280)..(625): Homolog of NCBI NO: 7434413 NR Description: receptor-like kinase (EC 2.7.1.-) SFR2 - wild
  misc_feature (1)..(272): Homolog of NCBI NO: 15234427 NR Description: receptor-like serine/threonine protein kinase
MKFGFTRQSGVDRIMTSWRSPGDPGSGNITYRIERRGFPQMMMYKGLTLWWRTGSWTGQRWSGVPEMTNKFIFNISFVNNPDEVSITYGVLDASVTTRMVLNETGTLQRFRWNGRDKKWIGFWSAPEDKCDIYNHCGFNGYCDSTSTEKFECSCLPGYEPKTPRDWFLRDASDGCTRIKADSICNGKEGFAKLKRVKIPNTSAVNVDMNITLKECEQRCLKNCSCVAYASAYHESQDGAKGCLTWHGNMLDTRTYLSSGQDFYLRVDKSELDSFILEELEDKSRSRELPLFELSTIATATNNFAFQNKLGAGGFGPVYKGVLQNGMEIAVKRLSKSSGQGMEEFKNEVKLISKLQHRNLVRILGCCVEFEEKMLVYEYLPNKSLDYFIFHEEQRAELDWPKRMGIIRGIGRGILYLHQDSRLRIIHRDLKASNVLLDNEMIPKIADFGLARIFGGNQIEGSTNRVVGTYGYMSPEYAMDGQFSIKSDVYSFGVLILEIITGKRNSAFYEESLNLVKHIWDRWENGEAIEIIDKLMGEETYDEGEVMKCLHIGLLCVQENSSDRPDMSSVVFMLGHNAIDLPSPKHPAFTAGRRRNTKTGGSSDNWPSGETSSTINDVTLTDVQGR

SEQ ID NO: 85297 - DNA, 1385 bp, Arabidopsis thaliana
  misc_feature (1)..(1385): Ceres Seq. ID no. 12679981
  misc_feature: MA Experiment ID: 108434 Result: Down-regulated in Transcription
  misc_feature: MA Experiment 108434 PARAMETER Experiment Name: At_Root_Tips_cDNA_P Parameter: Tissue Value: Root Tips
  misc_feature: MA Experiment ID: 108463 Result: Up-regulated in Transcription
  misc_feature: MA Experiment 108463 PARAMETER Experiment Name: At_Germinating_Seeds_cDNA_P Parameter: Age (day) Value: 3 vs. 0
  misc_feature: MA Experiment 108463 PARAMETER Experiment Name: At_Germinating_Seeds_cDNA_P Parameter: Tissue Value: Germinating Seeds
  misc_feature: MA Experiment ID: 20000348 Result: Down-regulated in Transcription
  misc_feature: MA Experiment 20000348 PARAMETER Experiment Name: At_100uM_ABA_Sub_P Parameter: Age (day) Value: 14
  misc_feature: MA Experiment 20000348 PARAMETER Experiment Name: At_100uM_ABA_Sub_P Parameter: Organism Value: A. thaliana
  misc_feature: MA Experiment 20000348 PARAMETER Experiment Name: At_100uM_ABA_Sub_P Parameter: Plant Line Value: WS
  misc_feature: MA Experiment 20000348 PARAMETER Experiment Name: At_100uM_ABA_Sub_P Parameter: Timepoint (hr) Value: 1
  misc_feature: MA Experiment 20000348 PARAMETER Experiment Name: At_100uM_ABA_Sub_P Parameter: Tissue Value: Aerial
  misc_feature: MA Experiment 20000348 PARAMETER Experiment Name: At_100uM_ABA_Sub_P Parameter: Treatment Value: 100uM ABA vs. No Treatment
  misc_feature: MA Experiment ID: 20000355 Result: Down-regulated in Transcription
  misc_feature: MA Experiment 20000355 PARAMETER Experiment Name: At_Siliques_Sub_P Parameter: Age (day) Value: 21
  misc_feature: MA Experiment 20000355 PARAMETER Experiment Name: At_Siliques_Sub_P Parameter: Organism Value: A. thaliana
  misc_feature: MA Experiment 20000355 PARAMETER Experiment Name: At_Siliques_Sub_P Parameter: Plant Line Value: WS
  misc_feature: MA Experiment 20000355 PARAMETER Experiment Name: At_Siliques_Sub_P Parameter: Tissue Value: Less Than 5mm Siliques vs. Whole Plant
  misc_feature: MA Experiment ID: 20000440 Result: Down-regulated in Transcription
  misc_feature: MA Experiment 20000440 PARAMETER Experiment Name: At_Closed-Flower__Sub_P Parameter: Tissue Value: Closed Flower vs. Whole Plant
atgacgatcaatttagtccctcttctcctctccctaatcaccatcttcaccatcttcaatccatccgcccttgcagaccagagtcaaatccgcagcacaacaagccaatggctccatttctcggaggacctcagccaatcaactattgaagtctccatccccaccataatcgccgccgttctctcgttcttcgccgcctctatctccagcgccggaggaatcggcggcggtggactcttcctctcgataatgacaatcatcgccggtctcgaaatgaaaacagcttcaagcttctcagcgttcatggtaaccggcgtctctttcgctaacgtgggatgcaatcttttcctgagaaaccctaaatcaagagacaaaaccctaatcgacttcgatttagctcttactattcagccatgtctacttctcggagtaagtattggtgtgatctgtaaccgtatgttcccaaattggcttgtgttgtttctcttcgctgtgttcctcgcctggtcaacgatgaagacttgtaaaaagggagtttcttactggaatttggagtcggaaagagcgaagattaagagtccaagagacgttgatggcatcgaggtagcgagatcgccgcttctgagtgaagaaagagaagatgtgagacagagagggatgattaggtttccatggatgaagcttggagttttagtgatcatttggttattgttcttctctattaatcttttccgcggaaacaaatacggtcagggaatcatatcgatcaagccatgtggagctctctactggttcctctcctcgcttcaaatacctctcactatcttctttactctctgcatttacttcagtgacaatgttcaaagcaaccacacatcgcatagtaaccaaaactctgaacaggagactggagttggaggaagacaaaacaagttgatgctccctgtaatggctctcttggctggagttttgggtggcctctttggtattggtggtggaatgctcattagtcctcttcttctccaaatcggtattgctccagaggtaactgcagctacatgttcgttcatggttttgttttcttcatcaatgtctgcaatccagtacctactactaggcatggaacatgctggaaccgctgcgatatttgctctggtctgtttcgtggcatcactggttggactaatggtggttaagaaggttatagccaagtatgggagggcttcgatcattgtgtttgcagttggtatcgtcatggcacttagcactgtactgatgacaacccatggagcttttaatgtttggaatgattttgtctctggtcgctacatgggtttcaaattaccctgttaagaaccaaaattaaataaatccagttcttgttt

SEQ ID NO: 85298 - protein, 450 aa, Arabidopsis thaliana
  peptide (1)..(450): Ceres Seq. ID no. 12679982
  misc_feature (1)..(450): Homolog of NCBI NO: 15220419 NR Description: hypothetical protein; protein id: At1g11540.1
  misc_feature (26)..(450): Homolog of NCBI NO: 6554197 NR Description: T23J18.20 [Arabidopsis thaliana]
  misc_feature (1)..(450): Homolog of NCBI NO: 15220600 NR Description: unknown protein; protein id: At1g61740.1, by cDNA: gi_13272464 [Arabidopsis thaliana]
  misc_feature (66)..(450): Homolog of NCBI NO: 11358507 NR Description: membrane protein [imported] - Arabidopsis (fragment) >gi|4079632|emb|CAA10487.1| hypothetical protein
  misc_feature (5)..(380): Homolog of NCBI NO: 15233579 NR Description: hypothetical protein; protein id: At4g21250.1
  misc_feature (400)..(450): Homolog of NCBI NO: 15233579 NR Description: hypothetical protein; protein id: At4g21250.1
  misc_feature (8)..(450): Homolog of NCBI NO: 34908754 NR Description: P0415A04.10 [Oryza sativa (japonica
  misc_feature (46)..(431): Homolog of NCBI NO: 34908752 NR Description: P0415A04.9 [Oryza sativa (japonica
  misc_feature (321)..(450): Homolog of NCBI NO: 15233581 NR Description: hypothetical protein; protein id: At4g21260.1
  misc_feature (82)..(204): Homolog of NCBI NO: 15233581 NR Description: hypothetical protein; protein id: At4g21260.1
MTINLVPLLLSLITIFTIFNPSALADQSQIRSTTSQWLHFSEDLSQSTIEVSIPTIIAAVLSFFAASISSAGGIGGGGLFLSIMTIIAGLEMKTASSFSAFMVTGVSFANVGCNLFLRNPKSRDKTLIDFDLALTIQPCLLLGVSIGVICNRMFPNWLVLFLFAVFLAWSTMKTCKKGVSYWNLESERAKIKSPRDVDGIEVARSPLLSEEREDVRQRGMIRFPWMKLGVLVIIWLLFFSINLFRGNKYGQGIISIKPCGALYWFLSSLQIPLTIFFTLCIYFSDNVQSNHTSHSNQNSEQETGVGGRQNKLMLPVMALLAGVLGGLFGIGGGMLISPLLLQIGIAPEVTAATCSFMVLFSSSMSAIQYLLLGMEHAGTAAIFALVCFVASLVGLMVVKKVIAKYGRASIIVFAVGIVMALSTVLMTTHGAFNVWNDFVSGRYMGFKLPC

SEQ ID NO: 85299 - protein, 367 aa, Arabidopsis thaliana; identical to SEQ ID NO: 35325
  peptide (1)..(367): Ceres Seq. ID no. 12679983
  misc_feature (1)..(367): Homolog of NCBI NO: 15220419 NR Description: hypothetical protein; protein id: At1g11540.1
  misc_feature (1)..(367): Homolog of NCBI NO: 6554197 NR Description: T23J18.20 [Arabidopsis thaliana]
  misc_feature (1)..(367): Homolog of NCBI NO: 15220600 NR Description: unknown protein; protein id: At1g61740.1, by cDNA: gi_13272464 [Arabidopsis thaliana]
  misc_feature (1)..(367): Homolog of NCBI NO: 11358507 NR Description: membrane protein [imported] - Arabidopsis (fragment) >gi|4079632|emb|CAA10487.1| hypothetical protein
  misc_feature (1)..(297): Homolog of NCBI NO: 15233579 NR Description: hypothetical protein; protein id: At4g21250.1
  misc_feature (317)..(367): Homolog of NCBI NO: 15233579 NR Description: hypothetical protein; protein id: At4g21250.1
  misc_feature (1)..(367): Homolog of NCBI NO: 34908754 NR Description: P0415A04.10 [Oryza sativa (japonica
  misc_feature (1)..(348): Homolog of NCBI NO: 34908752 NR Description: P0415A04.9 [Oryza sativa (japonica
  misc_feature (238)..(367): Homolog of NCBI NO: 15233581 NR Description: hypothetical protein; protein id: At4g21260.1
  misc_feature (1)..(121): Homolog of NCBI NO: 15233581 NR Description: hypothetical protein; protein id: At4g21260.1

SEQ ID NO: 85300 - protein, 359 aa, Arabidopsis thaliana; identical to SEQ ID NO: 35326
  peptide (1)..(359): Ceres Seq. ID no. 12679984
  misc_feature (1)..(359): Homolog of NCBI NO: 15220419 NR Description: hypothetical protein; protein id: At1g11540.1
  misc_feature (1)..(359): Homolog of NCBI NO: 6554197 NR Description: T23J18.20 [Arabidopsis thaliana]
  misc_feature (1)..(359): Homolog of NCBI NO: 15220600 NR Description: unknown protein; protein id: At1g61740.1, by cDNA: gi_13272464 [Arabidopsis thaliana]
  misc_feature (1)..(359): Homolog of NCBI NO: 11358507 NR Description: membrane protein [imported] - Arabidopsis (fragment) >gi|4079632|emb|CAA10487.1| hypothetical protein
  misc_feature (1)..(289): Homolog of NCBI NO: 15233579 NR Description: hypothetical protein; protein id: At4g21250.1
  misc_feature (309)..(359): Homolog of NCBI NO: 15233579 NR Description: hypothetical protein; protein id: At4g21250.1
  misc_feature (1)..(359): Homolog of NCBI NO: 34908754 NR Description: P0415A04.10 [Oryza sativa (japonica
  misc_feature (1)..(340): Homolog of NCBI NO: 34908752 NR Description: P0415A04.9 [Oryza sativa (japonica
  misc_feature (230)..(359): Homolog of NCBI NO: 15233581 NR Description: hypothetical protein; protein id: At4g21260.1
  misc_feature (1)..(113): Homolog of NCBI NO: 15233581 NR Description: hypothetical protein; protein id: At4g21260.1

SEQ ID NO: 85301 - DNA, 930 bp, Arabidopsis thaliana
  misc_feature (1)..(930): Ceres Seq. ID no. 12679985
  misc_feature: MA Experiment ID: 20000169 Result: Down-regulated in Transcription
  misc_feature: MA Experiment 20000169 PARAMETER Experiment Name: At_100uM_ABA_P Parameter: Age (day) Value: 14
  misc_feature: MA Experiment 20000169 PARAMETER Experiment Name: At_100uM_ABA_P Parameter: Organism Value: A. thaliana
  misc_feature: MA Experiment 20000169 PARAMETER Experiment Name: At_100uM_ABA_P Parameter: Plant Line Value: WS
  misc_feature: MA Experiment 20000169 PARAMETER Experiment Name: At_100uM_ABA_P Parameter: Timepoint (hr) Value: 6
  misc_feature: MA Experiment 20000169 PARAMETER Experiment Name: At_100uM_ABA_P Parameter: Tissue Value: Aerial
  misc_feature: MA Experiment 20000169 PARAMETER Experiment Name: At_100uM_ABA_P Parameter: Treatment Value: 100uM ABA vs. No Treatment
  misc_feature: MA Experiment ID: 20000171 Result: Down-regulated in Transcription
  misc_feature: MA Experiment 20000171 PARAMETER Experiment Name: At_42deg_Heat_P Parameter: Age (day) Value: 14
  misc_feature: MA Experiment 20000171 PARAMETER Experiment Name: At_42deg_Heat_P Parameter: Organism Value: A. thaliana
  misc_feature: MA Experiment 20000171 PARAMETER Experiment Name: At_42deg_Heat_P Parameter: Plant Line Value: WS
  misc_feature: MA Experiment 20000171 PARAMETER Experiment Name: At_42deg_Heat_P Parameter: Temperature (deg C) Value: 42 vs. 22
  misc_feature: MA Experiment 20000171 PARAMETER Experiment Name: At_42deg_Heat_P Parameter: Timepoint (hr) Value: 1
  misc_feature: MA Experiment 20000171 PARAMETER Experiment Name: At_42deg_Heat_P Parameter: Tissue Value: Aerial
  misc_feature: MA Experiment ID: 20000173 Result: Down-regulated in Transcription
  misc_feature: MA Experiment 20000173 PARAMETER Experiment Name: At_42deg_Heat_P Parameter: Age (day) Value: 14
  misc_feature: MA Experiment 20000173 PARAMETER Experiment Name: At_42deg_Heat_P Parameter: Organism Value: A. thaliana
  misc_feature: MA Experiment 20000173 PARAMETER Experiment Name: At_42deg_Heat_P Parameter: Plant Line Value: WS
  misc_feature: MA Experiment 20000173 PARAMETER Experiment Name: At_42deg_Heat_P Parameter: Temperature (deg C) Value: 42 vs. 22
  misc_feature: MA Experiment 20000173 PARAMETER Experiment Name: At_42deg_Heat_P Parameter: Timepoint (hr) Value: 6
  misc_feature: MA Experiment 20000173 PARAMETER Experiment Name: At_42deg_Heat_P Parameter: Tissue Value: Aerial
  misc_feature: MA Experiment ID: 20000180 Result: Up-regulated in Transcription
  misc_feature: MA Experiment 20000180 PARAMETER Experiment Name: At_Germinating_Seeds_P Parameter: Age (hr) Value: 24 vs. 0
  misc_feature: MA Experiment 20000180 PARAMETER Experiment Name: At_Germinating_Seeds_P Parameter: Tissue Value: Germinating Seeds
  misc_feature: MA Experiment ID: 20000182 Result: Down-regulated in Transcription
  misc_feature: MA Experiment 20000182 PARAMETER Experiment Name: At_2mM_SA_P Parameter: Age (day) Value: 14
  misc_feature: MA Experiment 20000182 PARAMETER Experiment Name: At_2mM_SA_P Parameter: Organism Value: A. thaliana
  misc_feature: MA Experiment 20000182 PARAMETER Experiment Name: At_2mM_SA_P Parameter: Plant Line Value: WS
  misc_feature: MA Experiment 20000182 PARAMETER Experiment Name: At_2mM_SA_P Parameter: Timepoint (hr) Value: 6
  misc_feature: MA Experiment 20000182 PARAMETER Experiment Name: At_2mM_SA_P Parameter: Tissue Value: Aerial
  misc_feature: MA Experiment 20000182 PARAMETER Experiment Name: At_2mM_SA_P Parameter: Treatment Value: 2mM SA vs. No Treatment
  misc_feature: MA Experiment ID: 20000184 Result: Up-regulated in Transcription
  misc_feature: MA Experiment 20000184 PARAMETER Experiment Name: At_Shoots__P Parameter: Age (day) Value: 7
  misc_feature: MA Experiment 20000184 PARAMETER Experiment Name: At_Shoots__P Parameter: Tissue Value: Shoots vs. Whole Plant
  misc_feature: MA Experiment ID: 20000185 Result: Up-regulated in Transcription
  misc_feature: MA Experiment 20000185 PARAMETER Experiment Name: At_Roots__P Parameter: Age (day) Value: 7 vs. 21
  misc_feature: MA Experiment 20000185 PARAMETER Experiment Name: At_Roots__P Parameter: Organism Value: A. thaliana
  misc_feature: MA Experiment 20000185 PARAMETER Experiment Name: At_Roots__P Parameter: Tissue Value: Roots vs. Whole Plant
  misc_feature: MA Experiment ID: 20000227 Result: Up-regulated in Transcription
  misc_feature: MA Experiment 20000227 PARAMETER Experiment Name: At_Root-Tips-vs-Tops_P Parameter: Tissue Value: Root Tips vs. Root Tops
  misc_feature: MA Experiment ID: 20000234 Result: Up-regulated in Transcription
  misc_feature: MA Experiment 20000234 PARAMETER Experiment Name: At_Siliques_P Parameter: Age (day) Value: 21
  misc_feature: MA Experiment 20000234 PARAMETER Experiment Name: At_Siliques_P Parameter: Organism Value: A. thaliana
  misc_feature: MA Experiment 20000234 PARAMETER Experiment Name: At_Siliques_P Parameter: Plant Line Value: WS
  misc_feature: MA Experiment 20000234 PARAMETER Experiment Name: At_Siliques_P Parameter: Tissue Value: Less Than 5mm Siliques vs. Whole Plant
  misc_feature: MA Experiment ID: 20000437 Result: Down-regulated in Transcription
  misc_feature: MA Experiment 20000437 PARAMETER Experiment Name: At_Drought_P Parameter: Age (day) Value: 8
  misc_feature: MA Experiment 20000437 PARAMETER Experiment Name: At_Drought_P Parameter: Organism Value: A. thaliana
  misc_feature: MA Experiment 20000437 PARAMETER Experiment Name: At_Drought_P Parameter: Plant Line Value: WS
  misc_feature: MA Experiment 20000437 PARAMETER Experiment Name: At_Drought_P Parameter: Timepoint (hr) Value: 24
  misc_feature: MA Experiment 20000437 PARAMETER Experiment Name: At_Drought_P Parameter: Tissue Value: Whole Plant
  misc_feature: MA Experiment 20000437 PARAMETER Experiment Name: At_Drought_P Parameter: Treatment Value: Drought vs. No Drought
  misc_feature: MA Experiment ID: 20000438 Result: Up-regulated in Transcription
  misc_feature: MA Experiment 20000438 PARAMETER Experiment Name: At_Shoots__P Parameter: Age (day) Value: 14
  misc_feature: MA Experiment 20000438 PARAMETER Experiment Name: At_Shoots__P Parameter: Tissue Value: Shoots vs. Whole Plant
  misc_feature: MA Experiment ID: 20000439 Result: Up-regulated in Transcription
  misc_feature: MA Experiment 20000439 PARAMETER Experiment Name: At_Roots__P Parameter: Age (day) Value: 14 vs. 21
  misc_feature: MA Experiment 20000439 PARAMETER Experiment Name: At_Roots__P Parameter: Organism Value: A. thaliana
  misc_feature: MA Experiment 20000439 PARAMETER Experiment Name: At_Roots__P Parameter: Tissue Value: Roots vs. Whole Plant
  misc_feature: MA Experiment ID: 20000441 Result: Down-regulated in Transcription
  misc_feature: MA Experiment 20000441 PARAMETER Experiment Name: At_1uM_BR-BRZ__P Parameter: Tissue Value: Shoot Apices
  misc_feature: MA Experiment 20000441 PARAMETER Experiment Name: At_1uM_BR-BRZ__P Parameter: Treatment Value: 1uM BR vs. No Treatment
  misc_feature: MA Experiment ID: 20000453 Result: Down-regulated in Transcription
  misc_feature: MA Experiment 20000453 PARAMETER Experiment Name: At_100uM_ABA_P Parameter: Age (day) Value: 15
  misc_feature: MA Experiment 20000453 PARAMETER Experiment Name: At_100uM_ABA_P Parameter: Organism Value: A. thaliana
  misc_feature: MA Experiment 20000453 PARAMETER Experiment Name: At_100uM_ABA_P Parameter: Plant Line Value: WS
  misc_feature: MA Experiment 20000453 PARAMETER Experiment Name: At_100uM_ABA_P Parameter: Timepoint (hr) Value: 24
  misc_feature: MA Experiment 20000453 PARAMETER Experiment Name: At_100uM_ABA_P Parameter: Tissue Value: Aerial
  misc_feature: MA Experiment 20000453 PARAMETER Experiment Name: At_100uM_ABA_P Parameter: Treatment Value: 100uM ABA vs. No Treatment
  misc_feature: MA Experiment ID: 20000794 Result: Down-regulated in Transcription
  misc_feature: MA Experiment 20000794 PARAMETER Experiment Name: At_Petals_P Parameter: Age (day) Value: 23-25 days
  misc_feature: MA Experiment 20000794 PARAMETER Experiment Name: At_Petals_P Parameter: Plant Line Value: WS
  misc_feature: MA Experiment 20000794 PARAMETER Experiment Name: At_Petals_P Parameter: Tissue Value: Petals vs. Whole plant
  misc_feature: MA Experiment ID: 20001248 Result: Up-regulated in Transcription
  misc_feature: MA Experiment 20001248 PARAMETER Experiment Name: At_Far-red-induction_P Parameter: Age (day) Value: 7
  misc_feature: MA Experiment 20001248 PARAMETER Experiment Name: At_Far-red-induction_P Parameter: Light Value: Far-red vs. White
  misc_feature: MA Experiment 20001248 PARAMETER Experiment Name: At_Far-red-induction_P Parameter: Organism Value: A. thaliana
  misc_feature: MA Experiment 20001248 PARAMETER Experiment Name: At_Far-red-induction_P Parameter: Plant Line Value: Columbia
  misc_feature: MA Experiment 20001248 PARAMETER Experiment Name: At_Far-red-induction_P Parameter: Timepoint (hr) Value: 4
  misc_feature: MA Experiment 20001248 PARAMETER Experiment Name: At_Far-red-induction_P Parameter: Tissue Value: Whole Plant
  misc_feature: MA Experiment ID: 20001450 Result: Up-regulated in Transcription
  misc_feature: MA Experiment 20001450 PARAMETER Experiment Name: At_Far-red-induction_P Parameter: Age (day) Value: 7
  misc_feature: MA Experiment 20001450 PARAMETER Experiment Name: At_Far-red-induction_P Parameter: Light Value: Far-red vs. White
  misc_feature: MA Experiment 20001450 PARAMETER Experiment Name: At_Far-red-induction_P Parameter: Organism Value: A. thaliana
  misc_feature: MA Experiment 20001450 PARAMETER Experiment Name: At_Far-red-induction_P Parameter: Plant Line Value: Columbia
  misc_feature: MA Experiment 20001450 PARAMETER Experiment Name: At_Far-red-induction_P Parameter: Timepoint (hr) Value: 8
  misc_feature: MA Experiment 20001450 PARAMETER Experiment Name: At_Far-red-induction_P Parameter: Tissue Value: Whole Plant
  misc_feature: MA Experiment ID: 20001554 Result: Down-regulated in Transcription
  misc_feature: MA Experiment 20001554 PARAMETER Experiment Name: At_Drought_Soil_Dry_P Parameter: Age (day) Value: 21
  misc_feature: MA Experiment 20001554 PARAMETER Experiment Name: At_Drought_Soil_Dry_P Parameter: Organism Value: A. thaliana
  misc_feature: MA Experiment 20001554 PARAMETER Experiment Name: At_Drought_Soil_Dry_P Parameter: Plant Line Value: WS
  misc_feature: MA Experiment 20001554 PARAMETER Experiment Name: At_Drought_Soil_Dry_P Parameter: Post Timepoint (hr) Value: None
  misc_feature: MA Experiment 20001554 PARAMETER Experiment Name: At_Drought_Soil_Dry_P Parameter: Post-Treatment Value: None
  misc_feature: MA Experiment 20001554 PARAMETER Experiment Name: At_Drought_Soil_Dry_P Parameter: Timepoint (day) Value: 7
  misc_feature: MA Experiment 20001554 PARAMETER Experiment Name: At_Drought_Soil_Dry_P Parameter: Treatment Value: Drought vs. No Drought
  misc_feature: MA Experiment ID: 20001555 Result: Down-regulated in Transcription
  misc_feature: MA Experiment 20001555 PARAMETER Experiment Name: At_Drought_Soil_Dry_P Parameter: Age (day) Value: 24
  misc_feature: MA Experiment 20001555 PARAMETER Experiment Name: At_Drought_Soil_Dry_P Parameter: Organism Value: A. thaliana
  misc_feature: MA Experiment 20001555 PARAMETER Experiment Name: At_Drought_Soil_Dry_P Parameter: Plant Line Value: WS
  misc_feature: MA Experiment 20001555 PARAMETER Experiment Name: At_Drought_Soil_Dry_P Parameter: Post Timepoint (hr) Value: None
  misc_feature: MA Experiment 20001555 PARAMETER Experiment Name: At_Drought_Soil_Dry_P Parameter: Post-Treatment Value: None
  misc_feature: MA Experiment 20001555 PARAMETER Experiment Name: At_Drought_Soil_Dry_P Parameter: Timepoint (day) Value: 10
  misc_feature: MA Experiment 20001555 PARAMETER Experiment Name: At_Drought_Soil_Dry_P Parameter: Treatment Value: Drought vs. No Drought
  misc_feature: MA Experiment ID: 20001556 Result: Down-regulated in Transcription
  misc_feature: MA Experiment 20001556 PARAMETER Experiment Name: At_Drought_Soil_Dry_P Parameter: Age (day) Value: 26
  misc_feature: MA Experiment 20001556 PARAMETER Experiment Name: At_Drought_Soil_Dry_P Parameter: Organism Value: A. thaliana
  misc_feature: MA Experiment 20001556 PARAMETER Experiment Name: At_Drought_Soil_Dry_P Parameter: Plant Line Value: WS
  misc_feature: MA Experiment 20001556 PARAMETER Experiment Name: At_Drought_Soil_Dry_P Parameter: Post Timepoint (hr) Value: None
  misc_feature: MA Experiment 20001556 PARAMETER Experiment Name: At_Drought_Soil_Dry_P Parameter: Post-Treatment Value: None
  misc_feature: MA Experiment 20001556 PARAMETER Experiment Name: At_Drought_Soil_Dry_P Parameter: Timepoint (day) Value: 12
  misc_feature: MA Experiment 20001556 PARAMETER Experiment Name: At_Drought_Soil_Dry_P Parameter: Treatment Value: Drought vs. No Drought
  misc_feature: MA Experiment ID: 20001558 Result: Up-regulated in Transcription
  misc_feature: MA Experiment 20001558 PARAMETER Experiment Name: At_Drought_Soil_Dry_P Parameter: Age (day) Value: 27
  misc_feature: MA Experiment 20001558 PARAMETER Experiment Name: At_Drought_Soil_Dry_P Parameter: Organism Value: A. thaliana
  misc_feature: MA Experiment 20001558 PARAMETER Experiment Name: At_Drought_Soil_Dry_P Parameter: Plant Line Value: WS
  misc_feature: MA Experiment 20001558 PARAMETER Experiment Name: At_Drought_Soil_Dry_P Parameter: Post Timepoint (hr) Value: 6
  misc_feature: MA Experiment 20001558 PARAMETER Experiment Name: At_Drought_Soil_Dry_P Parameter: Post-Treatment Value: Re-Water vs. No Drought
  misc_feature: MA Experiment 20001558 PARAMETER Experiment Name: At_Drought_Soil_Dry_P Parameter: Timepoint (day) Value: 13
  misc_feature: MA Experiment 20001558 PARAMETER Experiment Name: At_Drought_Soil_Dry_P Parameter: Treatment Value: Drought vs. No Drought
  misc_feature: MA Experiment ID: 20001560 Result: Up-regulated in Transcription
  misc_feature: MA Experiment 20001560 PARAMETER Experiment Name: At_Drought_Soil_Dry_P Parameter: Age (day) Value: 28
  misc_feature: MA Experiment 20001560 PARAMETER Experiment Name: At_Drought_Soil_Dry_P Parameter: Organism Value: A. thaliana
  misc_feature: MA Experiment 20001560 PARAMETER Experiment Name: At_Drought_Soil_Dry_P Parameter: Plant Line Value: WS
  misc_feature: MA Experiment 20001560 PARAMETER Experiment Name: At_Drought_Soil_Dry_P Parameter: Post Timepoint (hr) Value: None
  misc_feature: MA Experiment 20001560 PARAMETER Experiment Name: At_Drought_Soil_Dry_P Parameter: Post-Treatment Value: None
  misc_feature: MA Experiment 20001560 PARAMETER Experiment Name: At_Drought_Soil_Dry_P Parameter: Timepoint (day) Value: 14
  misc_feature: MA Experiment 20001560 PARAMETER Experiment Name: At_Drought_Soil_Dry_P Parameter: Treatment Value: Drought vs. No Drought
  misc_feature: MA Experiment ID: 20001770 Result: Up-regulated in Transcription
  misc_feature: MA Experiment 20001770 PARAMETER Experiment Name: At_Far-red-enriched-adult_P Parameter: Age (day) Value: 28
  misc_feature: MA Experiment 20001770 PARAMETER Experiment Name: At_Far-red-enriched-adult_P Parameter: Light Value: Far-red enriched vs. White
  misc_feature: MA Experiment 20001770 PARAMETER Experiment Name: At_Far-red-enriched-adult_P Parameter: Organism Value: A. thaliana
  misc_feature: MA Experiment 20001770 PARAMETER Experiment Name: At_Far-red-enriched-adult_P Parameter: Plant Line Value: Columbia
  misc_feature: MA Experiment 20001770 PARAMETER Experiment Name: At_Far-red-enriched-adult_P Parameter: Timepoint (hr) Value: 8
  misc_feature: MA Experiment 20001770 PARAMETER Experiment Name: At_Far-red-enriched-adult_P Parameter: Tissue Value: Aerial
  misc_feature: MA Experiment ID: 20001906 Result: Down-regulated in Transcription
  misc_feature: MA Experiment 20001906 PARAMETER Experiment Name: At_Drought_Reproduction_P Parameter: Age (day) Value: 35
  misc_feature: MA Experiment 20001906 PARAMETER Experiment Name: At_Drought_Reproduction_P Parameter: Organism Value: A. thaliana
  misc_feature: MA Experiment 20001906 PARAMETER Experiment Name: At_Drought_Reproduction_P Parameter: Plant Line Value: WS
  misc_feature: MA Experiment 20001906 PARAMETER Experiment Name: At_Drought_Reproduction_P Parameter: Timepoint (day) Value: 5
  misc_feature: MA Experiment 20001906 PARAMETER Experiment Name: At_Drought_Reproduction_P Parameter: Tissue Value: Siliques
  misc_feature: MA Experiment 20001906 PARAMETER Experiment Name: At_Drought_Reproduction_P Parameter: Treatment Value: Drought vs. No Drought
  misc_feature: MA Experiment ID: 20001907 Result: Down-regulated in Transcription
  misc_feature: MA Experiment 20001907 PARAMETER Experiment Name: At_Drought_Reproduction_P Parameter: Age (day) Value: 37
  misc_feature: MA Experiment 20001907 PARAMETER Experiment Name: At_Drought_Reproduction_P Parameter: Organism Value: A. thaliana
  misc_feature: MA Experiment 20001907 PARAMETER Experiment Name: At_Drought_Reproduction_P Parameter: Plant Line Value: WS
  misc_feature: MA Experiment 20001907 PARAMETER Experiment Name: At_Drought_Reproduction_P Parameter: Timepoint (day) Value: 7
  misc_feature: MA Experiment 20001907 PARAMETER Experiment Name: At_Drought_Reproduction_P Parameter: Tissue Value: Siliques
  misc_feature: MA Experiment 20001907 PARAMETER Experiment Name: At_Drought_Reproduction_P Parameter: Treatment Value: Drought vs. No Drought
  misc_feature: MA Experiment ID: 20001910 Result: Down-regulated in Transcription
  misc_feature: MA Experiment 20001910 PARAMETER Experiment Name: At_Drought_Reproduction_P Parameter: Age (day) Value: 37
  misc_feature: MA Experiment 20001910 PARAMETER Experiment Name: At_Drought_Reproduction_P Parameter: Organism Value: A. thaliana
  misc_feature: MA Experiment 20001910 PARAMETER Experiment Name: At_Drought_Reproduction_P Parameter: Plant Line Value: WS
  misc_feature: MA Experiment 20001910 PARAMETER Experiment Name: At_Drought_Reproduction_P Parameter: Timepoint (day) Value: 7
  misc_feature: MA Experiment 20001910 PARAMETER Experiment Name: At_Drought_Reproduction_P Parameter: Tissue Value: Flowers
  misc_feature: MA Experiment 20001910 PARAMETER Experiment Name: At_Drought_Reproduction_P Parameter: Treatment Value: Drought vs. No Drought
atggagacggaaaggaggatcataacgagctgttctgccatgacggctctgttcttgttcatgacggctctaatggcgtcgtcctctatcgcagcaacaccgacacaatcgtttgaagataatttcaacattatgtggtctgaaaatcacttcacgacttccgatgatggagagatctggaatctttccttagataacgacaccggtacgttcaaatccagtttgcttccgacaaagcacatgtatagattcggatggtttagtatgaagctaaagctcgtcggaggcgactccgccggcgtcgtcaccgcttactacatgtgttcggagaatggggcaggaccggagagagacgagatagatttcgaatttctagggaaccgaaccggacagccttacattattcagaccaatgtgtataagaacggaaccgggaatcgggagatgcgacattccctctggttcgacccgaccaaggattatcacacctactcaattctttggaataaccaccagcttgtgttcttcgtggatagggtaccaattcgagtatacaagaacagtgataaggtaccaaacaacgacttcttcccgaaccagaagccgatgtacttgttctccagcatttggaacgctgacgattgggctacacgtggtggtctggagaagactgactggaaaaaagctccattcgtctcttcttacaaggacttcgccgtcgaaggctgccgttggaaggatccattccctgcatgcgtctctaccacaacagagaattggtgggatcagtacgacgcgtggcatttgtccaagacacagaagatggattatgcgtgggtgcagcgtaatctcgtcgtatacgattattgcaaagacagtgagaggttccctactcttccttgggagtgttccattagcccttgggcttaa

SEQ ID NO: 85302 - protein, 309 aa, Arabidopsis thaliana
  peptide (1)..(309): Ceres Seq. ID no. 12679986
  misc_feature (38)..(228): Pfam Name: Glycosyl hydrolases family 16 Pfam Description: Glycosyl hydrolases family 16
  misc_feature (1)..(309): Homolog of NCBI NO: 25313538 NR Description: protein T23J18.21 [imported] - Arabidopsis >gi|6554196|gb|AAF16642.1|AC011661_20 T23J18.21 [Arabidopsis
  misc_feature (1)..(309): Homolog of NCBI NO: 18391291 NR Description: xyloglucan endotransglycosylase, putative;
  misc_feature (14)..(309): Homolog of NCBI NO: 38605338 NR Description: Probable xyloglucan
  misc_feature (14)..(303): Homolog of NCBI NO: 27261026 NR Description: putative xyloglucan endotransglycosylase [Oryza
  misc_feature (27)..(303): Homolog of NCBI NO: 7447418 NR Description: probable endo-xyloglucan transferase - upland
  misc_feature (17)..(303): Homolog of NCBI NO: 30841326 NR Description: xyloglucan endotransglycosylase [Gossypium
  misc_feature (21)..(303): Homolog of NCBI NO: 5070246 NR Description: xyloglucan endo-transglycosylase-like protein
  misc_feature (18)..(303): Homolog of NCBI NO: 7447416 NR Description: xyloglucan endo-1,4-beta-D-glucanase (EC 3.2.1.-) - common nasturtium >gi|1008904|gb|AAB39950.1| xyloglucan
  misc_feature (13)..(303): Homolog of NCBI NO: 1885310 NR Description: Endoxyloglucan transferase (EXT) [Hordeum vulgare
  misc_feature (24)..(303): Homolog of NCBI NO: 950299 NR Description: xyloglucan endotransglycosylase precursor
METERRIITSCSAMTALFLFMTALMASSSIAATPTQSFEDNFNIMWSENHFTTSDDGEIWNLSLDNDTGTFKSSLLPTKHMYRFGWFSMKLKLVGGDSAGVVTAYYMCSENGAGPERDEIDFEFLGNRTGQPYIIQTNVYKNGTGNREMRHSLWFDPTKDYHTYSILWNNHQLVFFVDRVPIRVYKNSDKVPNNDFFPNQKPMYLFSSIWNADDWATRGGLEKTDWKKAPFVSSYKDFAVEGCRWKDPFPACVSTTTENWWDQYDAWHLSKTQKMDYAWVQRNLVVYDYCKDSERFPTLPWECSISPWA

SEQ ID NO: 85303 - protein, 296 aa, Arabidopsis thaliana
  peptide (1)..(296): Ceres Seq. ID no. 12679987
  misc_feature (25)..(215): Pfam Name: Glycosyl hydrolases family 16 Pfam Description: Glycosyl hydrolases family 16
  misc_feature (1)..(296): Homolog of NCBI NO: 25313538 NR Description: protein T23J18.21 [imported] - Arabidopsis >gi|6554196|gb|AAF16642.1|AC011661_20 T23J18.21 [Arabidopsis
  misc_feature (1)..(296): Homolog of NCBI NO: 18391291 NR Description: xyloglucan endotransglycosylase, putative;
  misc_feature (1)..(296): Homolog of NCBI NO: 38605338 NR Description: Probable xyloglucan
  misc_feature (1)..(290): Homolog of NCBI NO: 27261026 NR Description: putative xyloglucan endotransglycosylase [Oryza
  misc_feature (14)..(290): Homolog of NCBI NO: 7447418 NR Description: probable endo-xyloglucan transferase - upland
  misc_feature (4)..(290): Homolog of NCBI NO: 30841326 NR Description: xyloglucan endotransglycosylase [Gossypium
  misc_feature (8)..(290): Homolog of NCBI NO: 5070246 NR Description: xyloglucan endo-transglycosylase-like protein
  misc_feature (5)..(290): Homolog of NCBI NO: 7447416 NR Description: xyloglucan endo-1,4-beta-D-glucanase (EC 3.2.1.-) - common nasturtium >gi|1008904|gb|AAB39950.1| xyloglucan
  misc_feature (1)..(290): Homolog of NCBI NO: 1885310 NR Description: Endoxyloglucan transferase (EXT) [Hordeum vulgare
  misc_feature (11)..(290): Homolog of NCBI NO: 950299 NR Description: xyloglucan endotransglycosylase precursor
MTALFLFMTALMASSSIAATPTQSFEDNFNIMWSENHFTTSDDGEIWNLSLDNDTGTFKSSLLPTKHMYRFGWFSMKLKLVGGDSAGVVTAYYMCSENGAGPERDEIDFEFLGNRTGQPYIIQTNVYKNGTGNREMRHSLWFDPTKDYHTYSILWNNHQLVFFVDRVPIRVYKNSDKVPNNDFFPNQKPMYLFSSIWNADDWATRGGLEKTDWKKAPFVSSYKDFAVEGCRWKDPFPACVSTTTENWWDQYDAWHLSKTQKMDYAWVQRNLVVYDYCKDSERFPTLPWECSISPWA

SEQ ID NO: 85304 - protein, 289 aa, Arabidopsis thaliana
  peptide (1)..(289): Ceres Seq. ID no. 12679988
  misc_feature (18)..(208): Pfam Name: Glycosyl hydrolases family 16 Pfam Description: Glycosyl hydrolases family 16
  misc_feature (1)..(289): Homolog of NCBI NO: 25313538 NR Description: protein T23J18.21 [imported] - Arabidopsis >gi|6554196|gb|AAF16642.1|AC011661_20 T23J18.21 [Arabidopsis
  misc_feature (1)..(289): Homolog of NCBI NO: 18391291 NR Description: xyloglucan endotransglycosylase, putative;
  misc_feature (1)..(289): Homolog of NCBI NO: 38605338 NR Description: Probable xyloglucan
  misc_feature (1)..(283): Homolog of NCBI NO: 27261026 NR Description: putative xyloglucan endotransglycosylase [Oryza
  misc_feature (7)..(283): Homolog of NCBI NO: 7447418 NR Description: probable endo-xyloglucan transferase - upland
  misc_feature (1)..(283): Homolog of NCBI NO: 30841326 NR Description: xyloglucan endotransglycosylase [Gossypium
  misc_feature (1)..(283): Homolog of NCBI NO: 5070246 NR Description: xyloglucan endo-transglycosylase-like protein
  misc_feature (1)..(283): Homolog of NCBI NO: 7447416 NR Description: xyloglucan endo-1,4-beta-D-glucanase (EC 3.2.1.-) - common nasturtium >gi|1008904|gb|AAB39950.1| xyloglucan
  misc_feature (1)..(283): Homolog of NCBI NO: 1885310 NR Description: Endoxyloglucan transferase (EXT) [Hordeum vulgare
  misc_feature (4)..(283): Homolog of NCBI NO: 950299 NR Description: xyloglucan endotransglycosylase precursor
MTALMASSSIAATPTQSFEDNFNIMWSENHFTTSDDGEIWNLSLDNDTGTFKSSLLPTKHMYRFGWFSMKLKLVGGDSAGVVTAYYMCSENGAGPERDEIDFEFLGNRTGQPYIIQTNVYKNGTGNREMRHSLWFDPTKDYHTYSILWNNHQLVFFVDRVPIRVYKNSDKVPNNDFFPNQKPMYLFSSIWNADDWATRGGLEKTDWKKAPFVSSYKDFAVEGCRWKDPFPACVSTTTENWWDQYDAWHLSKTQKMDYAWVQRNLVVYDYCKDSERFPTLPWECSISPWA

SEQ ID NO: 85305 - DNA, 1212 bp, Arabidopsis thaliana
  misc_feature (1)..(1212): Ceres Seq. ID no. 12680011
  misc_feature: MA Experiment ID: 108595 Result: Down-regulated in Transcription
  misc_feature: MA Experiment 108595 PARAMETER Experiment Name: At_Ler-pi_Ovule_cDNA_P Parameter: Plant Line Value: null
  misc_feature: MA Experiment ID: 20000087 Result: Down-regulated in Transcription
  misc_feature: MA Experiment 20000087 PARAMETER Experiment Name: At_100uM_ABA_Mutants_cDNA_P Parameter: Plant Line Value: WS
  misc_feature: MA Experiment 20000087 PARAMETER Experiment Name: At_100uM_ABA_Mutants_cDNA_P Parameter: Timepoint (hr) Value: 6
  misc_feature: MA Experiment 20000087 PARAMETER Experiment Name: At_100uM_ABA_Mutants_cDNA_P Parameter: Tissue Value: Aerial
  misc_feature: MA Experiment 20000087 PARAMETER Experiment Name: At_100uM_ABA_Mutants_cDNA_P Parameter: Treatment Value: 100uM ABA vs. No Treatment
  misc_feature: MA Experiment ID: 20000224 Result: Down-regulated in Transcription
atgcacaccaccacccggaggtatccttccacatcacgctcctcctccttctgcgcaacaacagtacggttaccaacaaccttacgggattgctggagctgctccaccaccaccacagatgtggaatcctcaagcggcggcgccgccatcagttcacctacgaccgctgacgagatccggactctttggatcggggacttacagtattggatggatgagaatttcctctacggttgctttgctcataccggagagatggtttctgctaaagtgattcgtaacaagcaaaccggtcaagttgaaggatacggtttcattgaattcgcatctcatgctgctgctgaaagagttctacaaacattcaacaacgctcctatcccgagctttcctgatcagctctttagactgaactgggcatcattgagttcaggagataaacgagacgattcaccggactacacgatatttgtcggtgatctggctgctgatgttacggattatatcttacttgagacgttcagagcctcttatccgtcagtgaagggtgcaaaggttgttattgacagagtcactggacgtacaaaaggatatgggtttgttaggttttctgatgaaagtgaacagatccgtgctatgacggagatgaatggcgttccttgttctactagacctatgagaattggtcccgctgctagcaagaaaggtgtaactggtcaaagagattcataccagagctctgctgcaggggtaacaactgataatgatccaaataacacaactgtttttgttggtggattagatgcatctgtcacggatgatcatctgaagaatgtctttagccaatatggtgagattgtgcatgtgaaaatacccgctggaaagcgctgtggattcgttcagttttccgagaagagctgtgcagaggaagctcttagaatgctgaatggagtgcaattaggcggaacaaccgtcaggctctcatggggccgaagtccttcgaacaaacagtcgggggatccgagccagttttactacggtgggtatggacaaggacaggagcagtatgggtacacgatgcctcaagaccctaatgcatattacggaggctactctggtggaggatacagcggtggttaccagcagacaccacaggcaggacagcaaccaccacaacagccaccacagcagcaacaagtcgggtttagctactaa

SEQ ID NO: 85306 - protein, 403 aa, Arabidopsis thaliana
  peptide (1)..(403): Ceres Seq. ID no. 12680012
  misc_feature (62)..(133): Pfam Name: RNA recognition motif. (a.k.a. RRM, RBD, or RNP domain) Pfam Description: RNA recognition motif. (a.k.a. RRM, RBD, or RNP
  misc_feature (53)..(403): Homolog of NCBI NO: 15221071 NR Description: RNA binding protein 45 (RBP45), putative; protein At1g11650.1, supported by cDNA: 30022., supported by cDNA: [Arabidopsis thaliana] >gi|25402676|pir||H86249 hypothetical
  misc_feature (53)..(403): Homolog of NCBI NO: 21592583 NR Description: putative DNA binding protein [Arabidopsis
  misc_feature (53)..(304): Homolog of NCBI NO: 30682335 NR Description: RNA binding protein 45 (RBP45), putative
  misc_feature (48)..(392): Homolog of NCBI NO: 40253807 NR Description: putative RNA Binding Protein 45 [Oryza sativa
  misc_feature (46)..(401): Homolog of NCBI NO: 7485342 NR Description: hypothetical protein F10M23.340 - Arabidopsis >gi|4455223|emb|CAB36546.1| putative DNA binding protein thaliana] >gi|7269553|emb|CAB79555.1| putative DNA binding
  misc_feature (46)..(392): Homolog of NCBI NO: 18416906 NR Description: RNA binding protein 45 (RBP45), putative; protein At4g27000.1, supported by cDNA: gi_13878152, supported by cDNA: supported by cDNA: gi_17104568, supported by cDNA: gi_20259887
  misc_feature (52)..(384): Homolog of NCBI NO: 9663767 NR Description: RNA Binding Protein 45 [Nicotiana plumbaginifolia]
  misc_feature (49)..(392): Homolog of NCBI NO: 39545835 NR Description: OSJNBb0060E08.6 [Oryza sativa (japonica
  misc_feature (45)..(392): Homolog of NCBI NO: 34896988 NR Description: putative RNA binding protein [Oryza sativa]
  misc_feature (47)..(387): Homolog of NCBI NO: 9758270 NR Description: contains similarity to polyadenylate-binding
MHTTTRRYPSTSRSSSFCATTVRLPTTLRDCWSCSTTTTDVESSSGGAAISSPTTADEIRTLWIGDLQYWMDENFLYGCFAHTGEMVSAKVIRNKQTGQVEGYGFIEFASHAAAERVLQTFNNAPIPSFPDQLFRLNWASLSSGDKRDDSPDYTIFVGDLAADVTDYILLETFRASYPSVKGAKVVIDRVTGRTKGYGFVRFSDESEQIRAMTEMNGVPCSTRPMRIGPAASKKGVTGQRDSYQSSAAGVTTDNDPNNTTVFVGGLDASVTDDHLKNVFSQYGEIVHVKIPAGKRCGFVQFSEKSCAEEALRMLNGVQLGGTTVRLSWGRSPSNKQSGDPSQFYYGGYGQGQEQYGYTMPQDPNAYYGGYSGGGYSGGYQQTPQAGQQPPQQPPQQQQVGFSY

SEQ ID NO: 85307 - protein, 333 aa, Arabidopsis thaliana
  peptide (1)..(333): Ceres Seq. ID no. 12680013
  misc_feature (1)..(63): Pfam Name: RNA recognition motif. (a.k.a. RRM, RBD, or RNP domain) Pfam Description: RNA recognition motif. (a.k.a. RRM, RBD, or RNP
  misc_feature (1)..(333): Homolog of NCBI NO: 15221071 NR Description: RNA binding protein 45 (RBP45), putative; protein At1g11650.1, supported by cDNA: 30022., supported by cDNA: [Arabidopsis thaliana] >gi|25402676|pir||H86249 hypothetical
  misc_feature (1)..(333): Homolog of NCBI NO: 21592583 NR Description: putative DNA binding protein [Arabidopsis
  misc_feature (1)..(234): Homolog of NCBI NO: 30682335 NR Description: RNA binding protein 45 (RBP45), putative
  misc_feature (1)..(322): Homolog of NCBI NO: 40253807 NR Description: putative RNA Binding Protein 45 [Oryza sativa
  misc_feature (1)..(331): Homolog of NCBI NO: 7485342 NR Description: hypothetical protein F10M23.340 - Arabidopsis >gi|4455223|emb|CAB36546.1| putative DNA binding protein thaliana] >gi|7269553|emb|CAB79555.1| putative DNA binding
  misc_feature (1)..(322): Homolog of NCBI NO: 18416906 NR Description: RNA binding protein 45 (RBP45), putative; protein At4g27000.1, supported by cDNA: gi_13878152, supported by cDNA: supported by cDNA: gi_17104568, supported by cDNA: gi_20259887
  misc_feature (1)..(314): Homolog of NCBI NO: 9663767 NR Description: RNA Binding Protein 45 [Nicotiana plumbaginifolia]
  misc_feature (1)..(322): Homolog of NCBI NO: 39545835 NR Description: OSJNBb0060E08.6 [Oryza sativa (japonica
  misc_feature (1)..(322): Homolog of NCBI NO: 34896988 NR Description: putative RNA binding protein [Oryza sativa]
  misc_feature (1)..(317): Homolog of NCBI NO: 9758270 NR Description: contains similarity to polyadenylate-binding
MDENFLYGCFAHTGEMVSAKVIRNKQTGQVEGYGFIEFASHAAAERVLQTFNNAPIPSFPDQLFRLNWASLSSGDKRDDSPDYTIFVGDLAADVTDYILLETFRASYPSVKGAKVVIDRVTGRTKGYGFVRFSDESEQIRAMTEMNGVPCSTRPMRIGPAASKKGVTGQRDSYQSSAAGVTTDNDPNNTTVFVGGLDASVTDDHLKNVFSQYGEIVHVKIPAGKRCGFVQFSEKSCAEEALRMLNGVQLGGTTVRLSWGRSPSNKQSGDPSQFYYGGYGQGQEQYGYTMPQDPNAYYGGYSGGGYSGGYQQTPQAGQQPPQQPPQQQQVGFSY

SEQ ID NO: 85308 - protein, 318 aa, Arabidopsis thaliana
  peptide (1)..(318): Ceres Seq. ID no. 12680014
  misc_feature (1)..(318): Homolog of NCBI NO: 15221071 NR Description: RNA binding protein 45 (RBP45), putative; protein At1g11650.1, supported by cDNA: 30022., supported by cDNA: [Arabidopsis thaliana] >gi|25402676|pir||H86249 hypothetical
  misc_feature (1)..(318): Homolog of NCBI NO: 21592583 NR Description: putative DNA binding protein [Arabidopsis
  misc_feature (1)..(219): Homolog of NCBI NO: 30682335 NR Description: RNA binding protein 45 (RBP45), putative
  misc_feature (1)..(307): Homolog of NCBI NO: 40253807 NR Description: putative RNA Binding Protein 45 [Oryza sativa
  misc_feature (1)..(316): Homolog of NCBI NO: 7485342 NR Description: hypothetical protein F10M23.340 - Arabidopsis >gi|4455223|emb|CAB36546.1| putative DNA binding protein thaliana] >gi|7269553|emb|CAB79555.1| putative DNA binding
  misc_feature (1)..(307): Homolog of NCBI NO: 18416906 NR Description: RNA binding protein 45 (RBP45), putative; protein At4g27000.1, supported by cDNA: gi_13878152, supported by cDNA: supported by cDNA: gi_17104568, supported by cDNA: gi_20259887
  misc_feature (1)..(299): Homolog of NCBI NO: 9663767 NR Description: RNA Binding Protein 45 [Nicotiana plumbaginifolia]
  misc_feature (1)..(307): Homolog of NCBI NO: 39545835 NR Description: OSJNBb0060E08.6 [Oryza sativa (japonica
  misc_feature (1)..(307): Homolog of NCBI NO: 34896988 NR Description: putative RNA binding protein [Oryza sativa]
  misc_feature (1)..(302): Homolog of NCBI NO: 9758270 NR Description: contains similarity to polyadenylate-binding
MVSAKVIRNKQTGQVEGYGFIEFASHAAAERVLQTFNNAPIPSFPDQLFRLNWASLSSGDKRDDSPDYTIFVGDLAADVTDYILLETFRASYPSVKGAKVVIDRVTGRTKGYGFVRFSDESEQIRAMTEMNGVPCSTRPMRIGPAASKKGVTGQRDSYQSSAAGVTTDNDPNNTTVFVGGLDASVTDDHLKNVFSQYGEIVHVKIPAGKRCGFVQFSEKSCAEEALRMLNGVQLGGTTVRLSWGRSPSNKQSGDPSQFYYGGYGQGQEQYGYTMPQDPNAYYGGYSGGGYSGGYQQTPQAGQQPPQQPPQQQQVGFSY

SEQ ID NO: 85309 - DNA, 2292 bp, Arabidopsis thaliana
  misc_feature (1)..(2292): Ceres Seq. ID no. 12680015
  misc_feature: MA Experiment ID: 108576 Result: Up-regulated in Transcription
  misc_feature: MA Experiment 108576 PARAMETER Experiment Name: At_42deg_Heat_cDNA_P Parameter: Temperature (deg C) Value: 42 vs. 22
  misc_feature: MA Experiment 108576 PARAMETER Experiment Name: At_42deg_Heat_cDNA_P Parameter: Timepoint (hr) Value: 1
  misc_feature: MA Experiment 108576 PARAMETER Experiment Name: At_42deg_Heat_cDNA_P Parameter: Tissue Value: Aerial
  misc_feature: MA Experiment ID: 20000093 Result: Up-regulated in Transcription
  misc_feature: MA Experiment 20000093 PARAMETER Experiment Name: At_42deg_Heat_cDNA_P Parameter: Temperature (deg C) Value: 42 vs. 22
  misc_feature: MA Experiment 20000093 PARAMETER Experiment Name: At_42deg_Heat_cDNA_P Parameter: Timepoint (hr) Value: 0.5
  misc_feature: MA Experiment 20000093 PARAMETER Experiment Name: At_42deg_Heat_cDNA_P Parameter: Tissue Value: Aerial
  misc_feature: MA Experiment ID: 20000111 Result: Up-regulated in Transcription
  misc_feature: MA Experiment 20000111 PARAMETER Experiment Name: At_42deg_Heat_cDNA_P Parameter: Temperature (deg C) Value: 42 vs. 22
  misc_feature: MA Experiment 20000111 PARAMETER Experiment Name: At_42deg_Heat_cDNA_P Parameter: Timepoint (hr) Value: 6
  misc_feature: MA Experiment 20000111 PARAMETER Experiment Name: At_42deg_Heat_cDNA_P Parameter: Tissue Value: Aerial
  misc_feature: MA Experiment ID: 20000112 Result: Up-regulated in Transcription
  misc_feature: MA Experiment 20000112 PARAMETER Experiment Name: At_42deg_Heat_cDNA_P Parameter: Temperature (deg C) Value: 42 vs. 22
  misc_feature: MA Experiment 20000112 PARAMETER Experiment Name: At_42deg_Heat_cDNA_P Parameter: Timepoint (hr) Value: 2
  misc_feature: MA Experiment 20000112 PARAMETER Experiment Name: At_42deg_Heat_cDNA_P Parameter: Tissue Value: Aerial
  misc_feature: MA Experiment ID: 20000144 Result: Up-regulated in Transcription
  misc_feature: MA Experiment 20000144 PARAMETER Experiment Name: At_42deg_Heat_cDNA_P Parameter: Temperature (deg C) Value: 42 vs. 22
  misc_feature: MA Experiment 20000144 PARAMETER Experiment Name: At_42deg_Heat_cDNA_P Parameter: Timepoint (hr) Value: 1
  misc_feature: MA Experiment 20000144 PARAMETER Experiment Name: At_42deg_Heat_cDNA_P Parameter: Tissue Value: Aerial
  misc_feature: MA Experiment ID: 20000171 Result: Up-regulated in Transcription
  misc_feature: MA Experiment 20000171 PARAMETER Experiment Name: At_42deg_Heat_P Parameter: Age (day) Value: 14
  misc_feature: MA Experiment 20000171 PARAMETER Experiment Name: At_42deg_Heat_P Parameter: Organism Value: A. thaliana
  misc_feature: MA Experiment 20000171 PARAMETER Experiment Name: At_42deg_Heat_P Parameter: Plant Line Value: WS
  misc_feature: MA Experiment 20000171 PARAMETER Experiment Name: At_42deg_Heat_P Parameter: Temperature (deg C) Value: 42 vs. 22
  misc_feature: MA Experiment 20000171 PARAMETER Experiment Name: At_42deg_Heat_P Parameter: Timepoint (hr) Value: 1
  misc_feature: MA Experiment 20000171 PARAMETER Experiment Name: At_42deg_Heat_P Parameter: Tissue Value: Aerial
  misc_feature: MA Experiment ID: 20000173 Result: Up-regulated in Transcription
  misc_feature: MA Experiment 20000173 PARAMETER Experiment Name: At_42deg_Heat_P Parameter: Age (day) Value: 14
  misc_feature: MA Experiment 20000173 PARAMETER Experiment Name: At_42deg_Heat_P Parameter: Organism Value: A. thaliana
  misc_feature: MA Experiment 20000173 PARAMETER Experiment Name: At_42deg_Heat_P Parameter: Plant Line Value: WS
  misc_feature: MA Experiment 20000173 PARAMETER Experiment Name: At_42deg_Heat_P Parameter: Temperature (deg C) Value: 42 vs. 22
  misc_feature: MA Experiment 20000173 PARAMETER Experiment Name: At_42deg_Heat_P Parameter: Timepoint (hr) Value: 6
  misc_feature: MA Experiment 20000173 PARAMETER Experiment Name: At_42deg_Heat_P Parameter: Tissue Value: Aerial
  misc_feature: MA Experiment ID: 20000184 Result: Down-regulated in Transcription
  misc_feature: MA Experiment 20000184 PARAMETER Experiment Name: At_Shoots__P Parameter: Age (day) Value: 7
  misc_feature: MA Experiment 20000184 PARAMETER Experiment Name: At_Shoots__P Parameter: Tissue Value: Shoots vs. Whole Plant
atgagtgtagtgggatttgatgttgggaatgagaactgtgttatcgcagttgcaaagcaacgagggatcgacgttttgttgaacgatgaatcgaaccgagaaaatcctgctatggtttcctttggtgagaagcagagattcatgggtgctgctgctgctgcctctgctactatgcatcccaagtcaaccatttctcagttaaagagattgatcggtaggaaattcagggagcctgatgttcagaatgatctgaggttgtttccttttgaaacttctgaagactctgatggtggaattcaaattcggcttcggtatatgggtgagatacagagcttcagtccggtgcagatattaggcatgttgctttcacatttgaagcagattgcagagaagagtctcaaaacgcctgtttcagactgtgtcattgggattccatcctactttacaaactcacaaagacttgcctatttggatgctgcagccattgctggcctgaggccattgagattgatgcatgattctaccgccactgcacttggatatggtatatacaagacagatttggtagctaactcgagccctacttacattgtgtttatcgatatcggtcactgtgatacacaagtgtgtgtggcatcgtttgagtctggaagcatgagagtccgttctcatgcttttgatagaaacttgggcgggagagattttgatgaggttctcttcaaccactttgcccttgaatttaaggagaaatacaacatagatgtatatacaaataccaaggcgtgtgttaggttaagggcatcgtgtgagaaagttaaaaaggtcttgagtgcaaatgctgaggcacagctgaatattgaatgtctgatggaggagaaggacgtgaggagcttcatcaagagagaagagtttgagcagttgtcagcaggcttgttggagagattaattgtaccgtgtcaaaaggctttggctgactctggtctaagtttggatcaaatccactctgtggagctagttggttcagggtcccgcattccagctatatctaagatgctaagctcgttgtttaagagggagctaggcaggactgtgaatgcaagtgagtgcgtagctcgaggatgtgcgcttcaatgtgcaatgctcagtccagtttttcgagttagagattatgaggttcaagattcttaccctttcgcaatcggcttttcatctgataaaggtcccataaacacaccatcgaatgaattgctctttccgaaaggccagatcttcccaagtgtaaaggttcttactctacatagggaaaacactttccagttggaagccttttatgcaaaccataatgaactatcaccagatataccaacacagataagcagttttatgattgggccttttcatatatcgcacggagaagcggcacgtgtcaaagtaagagttcagctaaatctccacgggattgtcacgattgattcagctacgctaatagaatatcataaggagaatataacttctgaagagatgatatctgaagagaatcatcaatcttctgctatgaaggatggctctttggacccttcgtcaggttctattggtaatgagcctaaggctatcaaaagaatggaaattccagttgttgcgaacgtgtctggtgcattgacgaaggatgagttatcggaggccaaacagagagagaactctttagtggagcaagatctgaagatggaatcgacaaaggataagaaaaatgctcttgaatcttttgtctatgagatgcgtgataagatgttaaatacatatcggaacactgcaaccgagtcagaacgggaatgcatagctagaaatcttcaggaaacagaggaatggctatatgaagatggtgatgatgaatctgaaaatgcgtacatcgagaagttgaatgatgtcaaaaagctcatcgatcctattgaaaaccggttcaaagatggagaagagcgagttcaagcatcaaaagatcttctgaaaactattgcagataaccgaatggctgcagagtctcttcctcctccaagaaagaatgcggttctcgatgaatgccataaagctgagaggtggctccacgagaaaaccacagaacaggaatctttacccaaagacgctaatccagagctgcaatctgctgaaatcaggagaaaagctgatgctctaaacgcgacatgcaagtacattgggaaatcaaactctccccccgcgaaaccggaacataacggatcatacggaagtagaaaatcagatgatatggagcttgattga

SEQ ID NO: 85310 - protein, 763 aa, Arabidopsis thaliana
  peptide (1)..(763): Ceres Seq. ID no. 12680016
  misc_feature (3)..(389): Pfam Name: Hsp70 protein Pfam Description: Hsp70 protein
  misc_feature (1)..(641): Homolog of NCBI NO: 34906196 NR Description: putative heat-shock protein [Oryza sativa
  misc_feature (1)..(657): Homolog of NCBI NO: 17473863 NR Description: putative heat-shock protein [Arabidopsis thaliana]
  misc_feature (1)..(651): Homolog of NCBI NO: 30699465 NR Description: heat shock protein hsp70, putative [Arabidopsis
  misc_feature (1)..(657): Homolog of NCBI NO: 15220026 NR Description: putative heat-shock protein; protein id: supported by cDNA: gi_19310472 [Arabidopsis thaliana]
  misc_feature (1)..(651): Homolog of NCBI NO: 30699467 NR Description: heat shock protein hsp70, putative [Arabidopsis
  misc_feature (1)..(657): Homolog of NCBI NO: 7450157 NR Description: heat shock protein 91 - Arabidopsis thaliana
  misc_feature (2)..(763): Homolog of NCBI NO: 28564467 NR Description: putative heat shock protein [Malassezia
  misc_feature (1)..(701): Homolog of NCBI NO: 5729879 NR Description: heat shock 105kD; heat shock 105kD alpha; heat
  misc_feature (1)..(701): Homolog of NCBI NO: 1001011 NR Description: heat shock protein 105 kDa beta (42 degrees
  misc_feature (1)..(727): Homolog of NCBI NO: 40747009 NR Description: hypothetical protein AN1047.2 [Aspergillus
MSVVGFDVGNENCVIAVAKQRGIDVLLNDESNRENPAMVSFGEKQRFMGAAAAASATMHPKSTISQLKRLIGRKFREPDVQNDLRLFPFETSEDSDGGIQIRLRYMGEIQSFSPVQILGMLLSHLKQIAEKSLKTPVSDCVIGIPSYFTNSQRLAYLDAAAIAGLRPLRLMHDSTATALGYGIYKTDLVANSSPTYIVFIDIGHCDTQVCVASFESGSMRVRSHAFDRNLGGRDFDEVLFNHFALEFKEKYNIDVYTNTKACVRLRASCEKVKKVLSANAEAQLNIECLMEEKDVRSFIKREEFEQLSAGLLERLIVPCQKALADSGLSLDQIHSVELVGSGSRIPAISKMLSSLFKRELGRTVNASECVARGCALQCAMLSPVFRVRDYEVQDSYPFAIGFSSDKGPINTPSNELLFPKGQIFPSVKVLTLHRENTFQLEAFYANHNELSPDIPTQISSFMIGPFHISHGEAARVKVRVQLNLHGIVTIDSATLIEYHKENITSEEMISEENHQSSAMKDGSLDPSSGSIGNEPKAIKRMEIPVVANVSGALTKDELSEAKQRENSLVEQDLKMESTKDKKNALESFVYEMRDKMLNTYRNTATESERECIARNLQETEEWLYEDGDDESENAYIEKLNDVKKLIDPIENRFKDGEERVQASKDLLKTIADNRMAAESLPPPRKNAVLDECHKAERWLHEKTTEQESLPKDANPELQSAEIRRKADALNATCKYIGKSNSPPAKPEHNGSYGSRKSDDMELD

SEQ ID NO: 85311 - protein, 726 aa, Arabidopsis thaliana
  peptide (1)..(726): Ceres Seq. ID no. 12680017
  misc_feature (1)..(352): Pfam Name: Hsp70 protein Pfam Description: Hsp70 protein
  misc_feature (1)..(604): Homolog of NCBI NO: 34906196 NR Description: putative heat-shock protein [Oryza sativa
  misc_feature (1)..(620): Homolog of NCBI NO: 17473863 NR Description: putative heat-shock protein [Arabidopsis thaliana]
  misc_feature (1)..(614): Homolog of NCBI NO: 30699465 NR Description: heat shock protein hsp70, putative [Arabidopsis
  misc_feature (1)..(620): Homolog of NCBI NO: 15220026 NR Description: putative heat-shock protein; protein id: supported by cDNA: gi_19310472 [Arabidopsis thaliana]
  misc_feature (1)..(614): Homolog of NCBI NO: 30699467 NR Description: heat shock protein hsp70, putative [Arabidopsis
  misc_feature (1)..(620): Homolog of NCBI NO: 7450157 NR Description: heat shock protein 91 - Arabidopsis thaliana
  misc_feature (1)..(726): Homolog of NCBI NO: 28564467 NR Description: putative heat shock protein [Malassezia
  misc_feature (1)..(664): Homolog of NCBI NO: 5729879 NR Description: heat shock 105kD; heat shock 105kD alpha; heat
  misc_feature (1)..(664): Homolog of NCBI NO: 1001011 NR Description: heat shock protein 105 kDa beta (42 degrees
  misc_feature (1)..(690): Homolog of NCBI NO: 40747009 NR Description: hypothetical protein AN1047.2 [Aspergillus
MVSFGEKQRFMGAAAAASATMHPKSTISQLKRLIGRKFREPDVQNDLRLFPFETSEDSDGGIQIRLRYMGEIQSFSPVQILGMLLSHLKQIAEKSLKTPVSDCVIGIPSYFTNSQRLAYLDAAAIAGLRPLRLMHDSTATALGYGIYKTDLVANSSPTYIVFIDIGHCDTQVCVASFESGSMRVRSHAFDRNLGGRDFDEVLFNHFALEFKEKYNIDVYTNTKACVRLRASCEKVKKVLSANAEAQLNIECLMEEKDVRSFIKREEFEQLSAGLLERLIVPCQKALADSGLSLDQIHSVELVGSGSRIPAISKMLSSLFKRELGRTVNASECVARGCALQCAMLSPVFRVRDYEVQDSYPFAIGFSSDKGPINTPSNELLFPKGQIFPSVKVLTLHRENTFQLEAFYANHNELSPDIPTQISSFMIGPFHISHGEAARVKVRVQLNLHGIVTIDSATLIEYHKENITSEEMISEENHQSSAMKDGSLDPSSGSIGNEPKAIKRMEIPVVANVSGALTKDELSEAKQRENSLVEQDLKMESTKDKKNALESFVYEMRDKMLNTYRNTATESERECIARNLQETEEWLYEDGDDESENAYIEKLNDVKKLIDPIENRFKDGEERVQASKDLLKTIADNRMAAESLPPPRKNAVLDECHKAERWLHEKTTEQESLPKDANPELQSAEIRRKADALNATCKYIGKSNSPPAKPEHNGSYGSRKSDDMELD

SEQ ID NO: 85312 - protein, 716 aa, Arabidopsis thaliana
  peptide (1)..(716): Ceres Seq. ID no. 12680018
  misc_feature (1)..(342): Pfam Name: Hsp70 protein Pfam Description: Hsp70 protein
  misc_feature (1)..(594): Homolog of NCBI NO: 34906196 NR Description: putative heat-shock protein [Oryza sativa
  misc_feature (1)..(610): Homolog of NCBI NO: 17473863 NR Description: putative heat-shock protein [Arabidopsis thaliana]
  misc_feature (1)..(604): Homolog of NCBI NO: 30699465 NR Description: heat shock protein hsp70, putative [Arabidopsis
  misc_feature (1)..(610): Homolog of NCBI NO: 15220026 NR Description: putative heat-shock protein; protein id: supported by cDNA: gi_19310472 [Arabidopsis thaliana]
  misc_feature (1)..(604): Homolog of NCBI NO: 30699467 NR Description: heat shock protein hsp70, putative [Arabidopsis
  misc_feature (1)..(610): Homolog of NCBI NO: 7450157 NR Description: heat shock protein 91 - Arabidopsis thaliana
  misc_feature (1)..(716): Homolog of NCBI NO: 28564467 NR Description: putative heat shock protein [Malassezia
  misc_feature (1)..(654): Homolog of NCBI NO: 5729879 NR Description: heat shock 105kD; heat shock 105kD alpha; heat
  misc_feature (1)..(654): Homolog of NCBI NO: 1001011 NR Description: heat shock protein 105 kDa beta (42 degrees
  misc_feature (1)..(680): Homolog of NCBI NO: 40747009 NR Description: hypothetical protein AN1047.2 [Aspergillus
MGAAAAASATMHPKSTISQLKRLIGRKFREPDVQNDLRLFPFETSEDSDGGIQIRLRYMGEIQSFSPVQILGMLLSHLKQIAEKSLKTPVSDCVIGIPSYFTNSQRLAYLDAAAIAGLRPLRLMHDSTATALGYGIYKTDLVANSSPTYIVFIDIGHCDTQVCVASFESGSMRVRSHAFDRNLGGRDFDEVLFNHFALEFKEKYNIDVYTNTKACVRLRASCEKVKKVLSANAEAQLNIECLMEEKDVRSFIKREEFEQLSAGLLERLIVPCQKALADSGLSLDQIHSVELVGSGSRIPAISKMLSSLFKRELGRTVNASECVARGCALQCAMLSPVFRVRDYEVQDSYPFAIGFSSDKGPINTPSNELLFPKGQIFPSVKVLTLHRENTFQLEAFYANHNELSPDIPTQISSFMIGPFHISHGEAARVKVRVQLNLHGIVTIDSATLIEYHKENITSEEMISEENHQSSAMKDGSLDPSSGSIGNEPKAIKRMEIPVVANVSGALTKDELSEAKQRENSLVEQDLKMESTKDKKNALESFVYEMRDKMLNTYRNTATESERECIARNLQETEEWLYEDGDDESENAYIEKLNDVKKLIDPIENRFKDGEERVQASKDLLKTIADNRMAAESLPPPRKNAVLDECHKAERWLHEKTTEQESLPKDANPELQSAEIRRKADALNATCKYIGKSNSPPAKPEHNGSYGSRKSDDMELD

SEQ ID NO: 85313 - DNA, 934 bp, Arabidopsis thaliana
  misc_feature (1)..(934): Ceres Seq. ID no. 12680023
  misc_feature: MA Experiment ID: 20000437 Result: Down-regulated in Transcription
  misc_feature: MA Experiment 20000437 PARAMETER Experiment Name: At_Drought_P Parameter: Age (day) Value: 8
  misc_feature: MA Experiment 20000437 PARAMETER Experiment Name: At_Drought_P Parameter: Organism Value: A. thaliana
  misc_feature: MA Experiment 20000437 PARAMETER Experiment Name: At_Drought_P Parameter: Plant Line Value: WS
  misc_feature: MA Experiment 20000437 PARAMETER Experiment Name: At_Drought_P Parameter: Timepoint (hr) Value: 24
  misc_feature: MA Experiment 20000437 PARAMETER Experiment Name: At_Drought_P Parameter: Tissue Value: Whole Plant
  misc_feature: MA Experiment 20000437 PARAMETER Experiment Name: At_Drought_P Parameter: Treatment Value: Drought vs. No Drought
  misc_feature: MA Experiment ID: 20000439 Result: Up-regulated in Transcription
  misc_feature: MA Experiment 20000439 PARAMETER Experiment Name: At_Roots__P Parameter: Age (day) Value: 14 vs. 21
  misc_feature: MA Experiment 20000439 PARAMETER Experiment Name: At_Roots__P Parameter: Organism Value: A. thaliana
  misc_feature: MA Experiment 20000439 PARAMETER Experiment Name: At_Roots__P Parameter: Tissue Value: Roots vs. Whole Plant
atgagttcgtcctcgtcgccggcgattgaaccagacacaccggacctgatttgccagctcgataatgttcaaggaatggtcgatgcactcacttgcgtccgatggaaacgccaccaggatgctttagtagaattatctgaacacggaatagttttgattgttgaagaatcaggttgtcttcaagccaaagtttatcttcaacgcgagctattcacgaaatacgagtatggagctcaaggtaggccgagattcggaatcagcttagggcttcttgttgattgcttgaacacattttcatcacctggacattctaatactatagaaatcaagtatccaggacctgatatggagcttcttctcaaatctgttgataccttaaactcttgcatctactctgagataagaactagaattcccgaaactgttacttgggactacaactttgagcaggcgggaatcgcgccacttacttttacagtaaagtcagcggcgttgaaggaagcaatagatgatcttgaatggcctggttcaagtgtacagatcagtcttcaaaaggaacccccttgtgtaatctttagaggagaaggacatggagacttgcagatagacttcatgtattatgccaacacagatcttctccttgcctttcattgtgataccgaagtctcttacgggtacaaatacaagtttttgaaagcaacaacggcaaacataccgggaaacgtagtgagagaaaacaggggaagcaaactaacaataggaagaggaggaatgttgaaagttcagcacttggtttcagtttctaaagctttagctccacaagtggaatccgcagggtatcagccaccgagtcggattgcttatatagagttctttgtgaagcctgaagagcctgctgattaatagattttctccttcagttactttatctttg

SEQ ID NO: 85314 - protein, 300 aa, Arabidopsis thaliana
  peptide (1)..(300): Ceres Seq. ID no. 12680024
  misc_feature (113)..(235): Pfam Name: Repair protein Rad1/Rec1/Rad17 Pfam Description: Repair protein Rad1/Rec1/Rad17
  misc_feature (1)..(300): Homolog of NCBI NO: 30684177 NR Description: expressed protein [Arabidopsis thaliana]
  misc_feature (53)..(300): Homolog of NCBI NO: 7452416 NR Description: hypothetical protein dl4915w - Arabidopsis >gi|2245135|emb|CAB10556.1| hypothetical protein [Arabidopsis >gi|7268529|emb|CAB78779.1| hypothetical protein [Arabidopsis
  misc_feature (26)..(39): Homolog of NCBI NO: 7452416 NR Description: hypothetical protein dl4915w - Arabidopsis >gi|2245135|emb|CAB10556.1| hypothetical protein [Arabidopsis >gi|7268529|emb|CAB78779.1| hypothetical protein [Arabidopsis
  misc_feature (1)..(297): Homolog of NCBI NO: 11875164 NR Description: hypothetical protein [Oryza sativa (japonica
  misc_feature (1)..(265): Homolog of NCBI NO: 29437240 NR Description: Similar to RAD1 homolog (S. pombe) [Danio rerio]
  misc_feature (1)..(265): Homolog of NCBI NO: 39795628 NR Description: Unknown (protein for MGC:77779) [Danio rerio]
MSSSSSPAIEPDTPDLICQLDNVQGMVDALTCVRWKRHQDALVELSEHGIVLIVEESGCLQAKVYLQRELFTKYEYGAQGRPRFGISLGLLVDCLNTFSSPGHSNTIEIKYPGPDMELLLKSVDTLNSCIYSEIRTRIPETVTWDYNFEQAGIAPLTFTVKSAALKEAIDDLEWPGSSVQISLQKEPPCVIFRGEGHGDLQIDFMYYANTDLLLAFHCDTEVSYGYKYKFLKATTANIPGNVVRENRGSKLTIGRGGMLKVQHLVSVSKALAPQVESAGYQPPSRIAYIEFFVKPEEPAD

SEQ ID NO: 85315 - protein, 275 aa, Arabidopsis thaliana
  peptide (1)..(275): Ceres Seq. ID no. 12680025
  misc_feature (88)..(210): Pfam Name: Repair protein Rad1/Rec1/Rad17 Pfam Description: Repair protein Rad1/Rec1/Rad17
  misc_feature (1)..(275): Homolog of NCBI NO: 30684177 NR Description: expressed protein [Arabidopsis thaliana]
  misc_feature (28)..(275): Homolog of NCBI NO: 7452416 NR Description: hypothetical protein dl4915w - Arabidopsis >gi|2245135|emb|CAB10556.1| hypothetical protein [Arabidopsis >gi|7268529|emb|CAB78779.1| hypothetical protein [Arabidopsis
  misc_feature (1)..(14): Homolog of NCBI NO: 7452416 NR Description: hypothetical protein dl4915w - Arabidopsis >gi|2245135|emb|CAB10556.1| hypothetical protein [Arabidopsis >gi|7268529|emb|CAB78779.1| hypothetical protein [Arabidopsis
  misc_feature (1)..(272): Homolog of NCBI NO: 11875164 NR Description: hypothetical protein [Oryza sativa (japonica
  misc_feature (1)..(240): Homolog of NCBI NO: 29437240 NR Description: Similar to RAD1 homolog (S. pombe) [Danio rerio]
  misc_feature (1)..(240): Homolog of NCBI NO: 39795628 NR Description: Unknown (protein for MGC:77779) [Danio rerio]
MVDALTCVRWKRHQDALVELSEHGIVLIVEESGCLQAKVYLQRELFTKYEYGAQGRPRFGISLGLLVDCLNTFSSPGHSNTIEIKYPGPDMELLLKSVDTLNSCIYSEIRTRIPETVTWDYNFEQAGIAPLTFTVKSAALKEAIDDLEWPGSSVQISLQKEPPCVIFRGEGHGDLQIDFMYYANTDLLLAFHCDTEVSYGYKYKFLKATTANIPGNVVRENRGSKLTIGRGGMLKVQHLVSVSKALAPQVESAGYQPPSRIAYIEFFVKPEEPAD

SEQ ID NO: 85316 - protein, 185 aa, Arabidopsis thaliana; identical to SEQ ID NO: 83088
  peptide (1)..(185): Ceres Seq. ID no. 12680026
  misc_feature (1)..(120): Pfam Name: Repair protein Rad1/Rec1/Rad17 Pfam Description: Repair protein Rad1/Rec1/Rad17
  misc_feature (1)..(185): Homolog of NCBI NO: 30684177 NR Description: expressed protein [Arabidopsis thaliana]
  misc_feature (1)..(185): Homolog of NCBI NO: 7452416 NR Description: hypothetical protein dl4915w - Arabidopsis >gi|2245135|emb|CAB10556.1| hypothetical protein [Arabidopsis >gi|7268529|emb|CAB78779.1| hypothetical protein [Arabidopsis
  misc_feature (1)..(182): Homolog of NCBI NO: 11875164 NR Description: hypothetical protein [Oryza sativa (japonica
  misc_feature (1)..(150): Homolog of NCBI NO: 29437240 NR Description: Similar to RAD1 homolog (S. pombe) [Danio rerio]
  misc_feature (1)..(150): Homolog of NCBI NO: 39795628 NR Description: Unknown (protein for MGC:77779) [Danio rerio]

SEQ ID NO: 85317 - DNA, 1237 bp, Arabidopsis thaliana
  misc_feature (1)..(1237): Ceres Seq. ID no. 12680027
  misc_feature: MA Experiment ID: 108585 Result: Up-regulated in Transcription
  misc_feature: MA Experiment 108585 PARAMETER Experiment Name: At_5mM_NaNP_cDNA_P Parameter: Timepoint (hr) Value: 6
  misc_feature: MA Experiment 108585 PARAMETER Experiment Name: At_5mM_NaNP_cDNA_P Parameter: Tissue Value: Aerial
  misc_feature: MA Experiment 108585 PARAMETER Experiment Name: At_5mM_NaNP_cDNA_P Parameter: Treatment Value: null
  misc_feature: MA Experiment ID: 108668 Result: Up-regulated in Transcription
  misc_feature: MA Experiment 108668 PARAMETER Experiment Name: At_2mM_SA_cDNA_P Parameter: Plant Line Value: WS
  misc_feature: MA Experiment 108668 PARAMETER Experiment Name: At_2mM_SA_cDNA_P Parameter: Timepoint (hr) Value: 6
  misc_feature: MA Experiment 108668 PARAMETER Experiment Name: At_2mM_SA_cDNA_P Parameter: Treatment Value: 2mM SA vs. No Treatment
  misc_feature: MA Experiment ID: 20000182 Result: Up-regulated in Transcription
  misc_feature: MA Experiment 20000182 PARAMETER Experiment Name: At_2mM_SA_P Parameter: Age (day) Value: 14
  misc_feature: MA Experiment 20000182 PARAMETER Experiment Name: At_2mM_SA_P Parameter: Organism Value: A. thaliana
  misc_feature: MA Experiment 20000182 PARAMETER Experiment Name: At_2mM_SA_P Parameter: Plant Line Value: WS
  misc_feature: MA Experiment 20000182 PARAMETER Experiment Name: At_2mM_SA_P Parameter: Timepoint (hr) Value: 6
  misc_feature: MA Experiment 20000182 PARAMETER Experiment Name: At_2mM_SA_P Parameter: Tissue Value: Aerial
  misc_feature: MA Experiment 20000182 PARAMETER Experiment Name: At_2mM_SA_P Parameter: Treatment Value: 2mM SA vs. No Treatment
  misc_feature: MA Experiment ID: 20000184 Result: Down-regulated in Transcription
  misc_feature: MA Experiment 20000184 PARAMETER Experiment Name: At_Shoots__P Parameter: Age (day) Value: 7
  misc_feature: MA Experiment 20000184 PARAMETER Experiment Name: At_Shoots__P Parameter: Tissue Value: Shoots vs. Whole Plant
gaccagagatttttctttcctttgatttttcgtttcgtttcgtttcaaatattgttcctcctgtgtgaaggaaaaacaatcttccatttcaatccgcgtcaacgcgattttcttcatgacgatgacaacagttaaagtgagcaatgtttctctaggagcaaccgatagagatctcaaggagttcttttccttttctggcgatattctgtaccttgagacgcagagcgagactgagcggactaaactggcatatgtcacttttaaggatctacaaggagctgaaactgcggttcttctctcgggagcaacgattgttgattcttcagtcattgtctctatggctcctgattaccaactgtcccctgaggctttagcttccttggaacccaaggacagcaataaatctcccaaggcaggtgactccgtgttgagaaaagccgaagatgttgtgagcagcatgcttgcaaagggctttatcctgggaaaagatgccatagctaaagccaaaagtgttgacgagaagcaccagctaacatctacagcatcagccaaagtcgcatcttttgacaagaaaattggtttcactgataagatcaacacaggcacggtggtagtgggagaaaaggtcagggaagttgatcagaagtaccaagtctcagagaaaaccaaatcagcaatcgctgcagcggagcagacagtgagcaatgcaggttcagctataatgaagaaccggtatgttctcacaggtgccacgtgggttactggagcattcaacaaagttgctaaagctgcagaagaagttggacaaaaggctaaagagaaagttggtatggctgaggaagaggataagaggaaagtggttgatgagtttgctagagttcacttgtctgaatcaccaaaggcagcttcatcaacgcaagaagccgaacgtgaatcaaaactctctgaatctcctgaagcaaagaaagattctgaacatcttgagccacaatcgaaaccattgcagcaacaatctcctccacctatggcttcagctcctgctccggctcaaccttgagatatgcaatcaaagacctttctgattcttgttgtaaacggtaaaacttggaactaatctctctcagattgttgaagatgaagattgaacttgttatttaggacgaagacttgtgttcttgtaacattggattcatggtcgatttggtaattagaccttaaaaagaaaacaattttgttc

SEQ ID NO: 85318 - protein, 313 aa, Arabidopsis thaliana; identical to SEQ ID NO: 25134
  peptide (1)..(313): Ceres Seq. ID no. 12680028
  misc_feature (6)..(74): Pfam Name: RNA recognition motif. (a.k.a. RRM, RBD, or RNP domain) Pfam Description: RNA recognition motif. (a.k.a. RRM, RBD, or RNP
  misc_feature (1)..(313): Homolog of NCBI NO: 18414951 NR Description: RRM-containing protein; protein id: At4g17720.1, by cDNA: 39922. [Arabidopsis thaliana]
  misc_feature (3)..(313): Homolog of NCBI NO: 7485085 NR Description: hypothetical protein - Arabidopsis thaliana hypothetical protein [Arabidopsis thaliana]
  misc_feature (1)..(279): Homolog of NCBI NO: 30695063 NR Description: RNA recognition motif (RRM)-containing protein
  misc_feature (3)..(279): Homolog of NCBI NO: 8809670 NR Description: gene_id:MSD23.5~pir||C71447~similar to unknown
  misc_feature (2)..(312): Homolog of NCBI NO: 38347069 NR Description: OSJNBa0006A01.10 [Oryza sativa (japonica
  misc_feature (3)..(290): Homolog of NCBI NO: 38344181 NR Description: OSJNBa0053K19.20 [Oryza sativa (japonica
  misc_feature (5)..(245): Homolog of NCBI NO: 34897896 NR Description: ESTs D15336(C0474),C98053(C0474) correspond to a of the predicted gene.~Similar to Arabidopsis thaliana DNA
  misc_feature (1)..(276): Homolog of NCBI NO: 18071362 NR Description: putative splicing regulatory protein [Oryza
  misc_feature (5)..(262): Homolog of NCBI NO: 21592997 NR Description: unknown [Arabidopsis thaliana]
  misc_feature (5)..(262): Homolog of NCBI NO: 15237419 NR Description: RRM-containing protein; protein id: At5g16840.1, by cDNA: 34944., supported by cDNA: gi_16648739 [Arabidopsis

SEQ ID NO: 85319 - protein, 311 aa, Arabidopsis thaliana; identical to SEQ ID NO: 25135
  peptide (1)..(311): Ceres Seq. ID no. 12680029
  misc_feature (4)..(72): Pfam Name: RNA recognition motif. (a.k.a. RRM, RBD, or RNP domain) Pfam Description: RNA recognition motif. (a.k.a. RRM, RBD, or RNP
  misc_feature (1)..(311): Homolog of NCBI NO: 18414951 NR Description: RRM-containing protein; protein id: At4g17720.1, by cDNA: 39922. [Arabidopsis thaliana]
  misc_feature (1)..(311): Homolog of NCBI NO: 7485085 NR Description: hypothetical protein - Arabidopsis thaliana hypothetical protein [Arabidopsis thaliana]
  misc_feature (1)..(277): Homolog of NCBI NO: 30695063 NR Description: RNA recognition motif (RRM)-containing protein
  misc_feature (1)..(277): Homolog of NCBI NO: 8809670 NR Description: gene_id:MSD23.5~pir||C71447~similar to unknown
  misc_feature (1)..(310): Homolog of NCBI NO: 38347069 NR Description: OSJNBa0006A01.10 [Oryza sativa (japonica
  misc_feature (1)..(288): Homolog of NCBI NO: 38344181 NR Description: OSJNBa0053K19.20 [Oryza sativa (japonica
  misc_feature (3)..(243): Homolog of NCBI NO: 34897896 NR Description: ESTs D15336(C0474),C98053(C0474) correspond to a of the predicted gene.~Similar to Arabidopsis thaliana DNA
  misc_feature (1)..(274): Homolog of NCBI NO: 18071362 NR Description: putative splicing regulatory protein [Oryza
  misc_feature (3)..(260): Homolog of NCBI NO: 21592997 NR Description: unknown [Arabidopsis thaliana]
  misc_feature (3)..(260): Homolog of NCBI NO: 15237419 NR Description: RRM-containing protein; protein id: At5g16840.1, by cDNA: 34944., supported by cDNA: gi_16648739 [Arabidopsis

SEQ ID NO: 85320 - protein, 239 aa, Arabidopsis thaliana; identical to SEQ ID NO: 25136
  peptide (1)..(239): Ceres Seq. ID no. 12680030
  misc_feature (1)..(239): Homolog of NCBI NO: 18414951 NR Description: RRM-containing protein; protein id: At4g17720.1, by cDNA: 39922. [Arabidopsis thaliana]
  misc_feature (1)..(239): Homolog of NCBI NO: 7485085 NR Description: hypothetical protein - Arabidopsis thaliana hypothetical protein [Arabidopsis thaliana]
  misc_feature (1)..(205): Homolog of NCBI NO: 30695063 NR Description: RNA recognition motif (RRM)-containing protein
  misc_feature (1)..(205): Homolog of NCBI NO: 8809670 NR Description: gene_id:MSD23.5~pir||C71447~similar to unknown
  misc_feature (1)..(238): Homolog of NCBI NO: 38347069 NR Description: OSJNBa0006A01.10 [Oryza sativa (japonica
  misc_feature (1)..(216): Homolog of NCBI NO: 38344181 NR Description: OSJNBa0053K19.20 [Oryza sativa (japonica
  misc_feature (1)..(171): Homolog of NCBI NO: 34897896 NR Description: ESTs D15336(C0474),C98053(C0474) correspond to a of the predicted gene.~Similar to Arabidopsis thaliana DNA
  misc_feature (1)..(202): Homolog of NCBI NO: 18071362 NR Description: putative splicing regulatory protein [Oryza
  misc_feature (1)..(188): Homolog of NCBI NO: 21592997 NR Description: unknown [Arabidopsis thaliana]
  misc_feature (1)..(188): Homolog of NCBI NO: 15237419 NR Description: RRM-containing protein; protein id: At5g16840.1, by cDNA: 34944., supported by cDNA: gi_16648739 [Arabidopsis

SEQ ID NO: 85321 - DNA, 1639 bp, Arabidopsis thaliana
  misc_feature (1)..(1639): Ceres Seq. ID no. 12680066
  misc_feature: MA Experiment ID: 20000171 Result: Up-regulated in Transcription
  misc_feature: MA Experiment 20000171 PARAMETER Experiment Name: At_42deg_Heat_P Parameter: Age (day) Value: 14
  misc_feature: MA Experiment 20000171 PARAMETER Experiment Name: At_42deg_Heat_P Parameter: Organism Value: A. thaliana
  misc_feature: MA Experiment 20000171 PARAMETER Experiment Name: At_42deg_Heat_P Parameter: Plant Line Value: WS
  misc_feature: MA Experiment 20000171 PARAMETER Experiment Name: At_42deg_Heat_P Parameter: Temperature (deg C) Value: 42 vs. 22
  misc_feature: MA Experiment 20000171 PARAMETER Experiment Name: At_42deg_Heat_P Parameter: Timepoint (hr) Value: 1
  misc_feature: MA Experiment 20000171 PARAMETER Experiment Name: At_42deg_Heat_P Parameter: Tissue Value: Aerial
  misc_feature: MA Experiment ID: 20000173 Result: Up-regulated in Transcription
  misc_feature: MA Experiment 20000173 PARAMETER Experiment Name: At_42deg_Heat_P Parameter: Age (day) Value: 14
  misc_feature: MA Experiment 20000173 PARAMETER Experiment Name: At_42deg_Heat_P Parameter: Organism Value: A. thaliana
  misc_feature: MA Experiment 20000173 PARAMETER Experiment Name: At_42deg_Heat_P Parameter: Plant Line Value: WS
  misc_feature: MA Experiment 20000173 PARAMETER Experiment Name: At_42deg_Heat_P Parameter: Temperature (deg C) Value: 42 vs. 22
  misc_feature: MA Experiment 20000173 PARAMETER Experiment Name: At_42deg_Heat_P Parameter: Timepoint (hr) Value: 6
  misc_feature: MA Experiment 20000173 PARAMETER Experiment Name: At_42deg_Heat_P Parameter: Tissue Value: Aerial
  misc_feature: MA Experiment ID: 20000182 Result: Up-regulated in Transcription
  misc_feature: MA Experiment 20000182 PARAMETER Experiment Name: At_2mM_SA_P Parameter: Age (day) Value: 14
  misc_feature: MA Experiment 20000182 PARAMETER Experiment Name: At_2mM_SA_P Parameter: Organism Value: A. thaliana
  misc_feature: MA Experiment 20000182 PARAMETER Experiment Name: At_2mM_SA_P Parameter: Plant Line Value: WS
  misc_feature: MA Experiment 20000182 PARAMETER Experiment Name: At_2mM_SA_P Parameter: Timepoint (hr) Value: 6
  misc_feature: MA Experiment 20000182 PARAMETER Experiment Name: At_2mM_SA_P Parameter: Tissue Value: Aerial
  misc_feature: MA Experiment 20000182 PARAMETER Experiment Name: At_2mM_SA_P Parameter: Treatment Value: 2mM SA vs. No Treatment
  misc_feature: MA Experiment ID: 20000185 Result: Up-regulated in Transcription
  misc_feature: MA Experiment 20000185 PARAMETER Experiment Name: At_Roots__P Parameter: Age (day) Value: 7 vs. 21
  misc_feature: MA Experiment 20000185 PARAMETER Experiment Name: At_Roots__P Parameter: Organism Value: A. thaliana
  misc_feature: MA Experiment 20000185 PARAMETER Experiment Name: At_Roots__P Parameter: Tissue Value: Roots vs. Whole Plant
  misc_feature: MA Experiment ID: 20000437 Result: Up-regulated in Transcription
  misc_feature: MA Experiment 20000437 PARAMETER Experiment Name: At_Drought_P Parameter: Age (day) Value: 8
  misc_feature: MA Experiment 20000437 PARAMETER Experiment Name: At_Drought_P Parameter: Organism Value: A. thaliana
  misc_feature: MA Experiment 20000437 PARAMETER Experiment Name: At_Drought_P Parameter: Plant Line Value: WS
  misc_feature: MA Experiment 20000437 PARAMETER Experiment Name: At_Drought_P Parameter: Timepoint (hr) Value: 24
  misc_feature: MA Experiment 20000437 PARAMETER Experiment Name: At_Drought_P Parameter: Tissue Value: Whole Plant
  misc_feature: MA Experiment 20000437 PARAMETER Experiment Name: At_Drought_P Parameter: Treatment Value: Drought vs. No Drought
  misc_feature: MA Experiment ID: 20000439 Result: Up-regulated in Transcription
  misc_feature: MA Experiment 20000439 PARAMETER Experiment Name: At_Roots__P Parameter: Age (day) Value: 14 vs. 21
  misc_feature: MA Experiment 20000439 PARAMETER Experiment Name: At_Roots__P Parameter: Organism Value: A. thaliana
  misc_feature: MA Experiment 20000439 PARAMETER Experiment Name: At_Roots__P Parameter: Tissue Value: Roots vs. Whole Plant
  misc_feature: MA Experiment ID: 20000441 Result: Up-regulated in Transcription
  misc_feature: MA Experiment 20000441 PARAMETER Experiment Name: At_1uM_BR-BRZ__P Parameter: Tissue Value: Shoot Apices
  misc_feature: MA Experiment 20000441 PARAMETER Experiment Name: At_1uM_BR-BRZ__P Parameter: Treatment Value: 1uM BR vs. No Treatment
  misc_feature: MA Experiment ID: 20000709 Result: Up-regulated in Transcription
  misc_feature: MA Experiment 20000709 PARAMETER Experiment Name: At_15mM_NH4NO3_L-to-H_P Parameter: Age (hr) Value: 14
  misc_feature: MA Experiment 20000709 PARAMETER Experiment Name: At_15mM_NH4NO3_L-to-H_P Parameter: Organism Value: A. thaliana
  misc_feature: MA Experiment 20000709 PARAMETER Experiment Name: At_15mM_NH4NO3_L-to-H_P Parameter: Plant Line Value: WS
  misc_feature: MA Experiment 20000709 PARAMETER Experiment Name: At_15mM_NH4NO3_L-to-H_P Parameter: Timepoint (hr) Value: 4
  misc_feature: MA Experiment 20000709 PARAMETER Experiment Name: At_15mM_NH4NO3_L-to-H_P Parameter: Tissue Value: Aerial
  misc_feature: MA Experiment 20000709 PARAMETER Experiment Name: At_15mM_NH4NO3_L-to-H_P Parameter: Treatment Value: 15mM NH4NO3 vs. 30mM Mannitol
  misc_feature: MA Experiment ID: 20001560 Result: Up-regulated in Transcription
  misc_feature: MA Experiment 20001560 PARAMETER Experiment Name: At_Drought_Soil_Dry_P Parameter: Age (day) Value: 28
  misc_feature: MA Experiment 20001560 PARAMETER Experiment Name: At_Drought_Soil_Dry_P Parameter: Organism Value: A. thaliana
  misc_feature: MA Experiment 20001560 PARAMETER Experiment Name: At_Drought_Soil_Dry_P Parameter: Plant Line Value: WS
  misc_feature: MA Experiment 20001560 PARAMETER Experiment Name: At_Drought_Soil_Dry_P Parameter: Post Timepoint (hr) Value: None
  misc_feature: MA Experiment 20001560 PARAMETER Experiment Name: At_Drought_Soil_Dry_P Parameter: Post-Treatment Value: None
  misc_feature: MA Experiment 20001560 PARAMETER Experiment Name: At_Drought_Soil_Dry_P Parameter: Timepoint (day) Value: 14
  misc_feature: MA Experiment 20001560 PARAMETER Experiment Name: At_Drought_Soil_Dry_P Parameter: Treatment Value: Drought vs. No Drought
  misc_feature: MA Experiment ID: 20001911 Result: Up-regulated in Transcription
  misc_feature: MA Experiment 20001911 PARAMETER Experiment Name: At_Drought_Reproduction_P Parameter: Age (day) Value: 40
  misc_feature: MA Experiment 20001911 PARAMETER Experiment Name: At_Drought_Reproduction_P Parameter: Organism Value: A. thaliana
  misc_feature: MA Experiment 20001911 PARAMETER Experiment Name: At_Drought_Reproduction_P Parameter: Plant Line Value: WS
  misc_feature: MA Experiment 20001911 PARAMETER Experiment Name: At_Drought_Reproduction_P Parameter: Timepoint (day) Value: 10
  misc_feature: MA Experiment 20001911 PARAMETER Experiment Name: At_Drought_Reproduction_P Parameter: Tissue Value: Flowers
  misc_feature: MA Experiment 20001911 PARAMETER Experiment Name: At_Drought_Reproduction_P Parameter: Treatment Value: Drought vs. No Drought
actctcttagattctcagggttttgtgttttttggatggtggagatgatgagatcagagaatcatctaagacaagcttcgaagcatcggaacaacaattttccggtgaagttagagatcattgaagattctcttgaagaagaacacgctcctctcaacaaacgatccaagctatggagcaatggaacaagtgtctctaagtttagtctacttgaagagccaagtcctttggggttgagtttaaaaaagagcccatcttttcaagaactgattgagatgaaactttctcaaagtggtgatgactcaaattcggttaagaaagaaagttttggttttggtggtgtaggaaccgttgagaagcttaaagcttctaactttcctgctactattctcaggattggtcaatgggagtataagtcaaggtatgaaggtgatttggtggcgaaatgttactttgcaaaacataaacttgtgtgggaagtgttggaacaaggtcttaagagcaagattgagattcagtggtctgatattatggctttgaaggctaatttgccagaggatgaacctggaaccctgactattgtgctggctaggcggccattgtttttcagagaaactaatccgcagcctagaaaacatactttgtggcaggcgacatcggattttactgatggtcaagctagcatgaacaggcaacattttctgcagtgtcccccagggattatgaacaaacattttgagaagcttgttcaatgtgatcatcgcttgttctgtctaagccggcagccagagataaacttggccgcaccgttctttgattcacgactatctatatttgaggatccctcagtgtctggatctcataatattgcatctcctgttggggctcagtcatcatcagaacatgtgtctctatctcatgacgcactatcgcctagctcagtgatggatgctcgtgcaatcgaaggagttggtggttccattgattcgaggaatacaaacggttggagtcagataaaaatgcctggactacaccaatctatctcgatgaacgatttccttacgtttttgtcagatcaagcttgtgaaaacaaccaagagtttgaggaaatgaaacagttactgctaagtgacaacactcaaaccgatccatctgatgagaagtctgtcatgtcaaaggtgaattctttctgcaacctcttgcaatctgctgcaaactcacagctcaatatcgaaactgctgataccgaaagagttgttggggtcgataacaatagacacatgcccgaaggaggcaaaagagttgttgaccctgcttcaagcagcaagccactacaagggatgtcaaggaaagactcattcagtgatttgctggtgcaccttcctcgaatcacatcactcccaaagttcttgttcaacatttcagaagaagactagtagatagtgaaccgaaaagttcttgttctaggaatcttgaacaagtagctgtaaatcaaattatctctctcgttcttaaggatttggaggaacttttgtgtttgatgatgaatccttgtaaagaaatgcttttgtgatggcgttttctaaaagccatttctttttttgaaacattaacaaaactttattattgctttcatcct

SEQ ID NO: 85322 - protein, 477 aa, Arabidopsis thaliana
  peptide (1)..(477): Ceres Seq. ID no. 12680067
  misc_feature (12)..(477): Homolog of NCBI NO: 25371341 NR Description: hypothetical protein At2g24100 [imported] - thaliana >gi|14596217|gb|AAK68836.1| Unknown protein [Arabidopsis >gi|15809913|gb|AAL06884.1| At2g24100/F27D4.1 [Arabidopsis
  misc_feature (15)..(477): Homolog of NCBI NO: 18400458 NR Description: expressed protein; protein id: At2g24100.1 thaliana] >gi|20197500|gb|AAD03372.2| expressed protein
  misc_feature (47)..(334): Homolog of NCBI NO: 15234853 NR Description: putative protein; protein id: At4g30780.1
  misc_feature (328)..(477): Homolog of NCBI NO: 15234853 NR Description: putative protein; protein id: At4g30780.1
  misc_feature (118)..(287): Homolog of NCBI NO: 20218825 NR Description: hypothetical protein [Pinus pinaster]
  misc_feature (12)..(112): Homolog of NCBI NO: 15234853 NR Description: putative protein; protein id: At4g30780.1
  misc_feature (225)..(358): Homolog of NCBI NO: 15234853 NR Description: putative protein; protein id: At4g30780.1
  misc_feature (53)..(431): Homolog of NCBI NO: 15230043 NR Description: unknown protein; protein id: At3g05770.1 thaliana] >gi|6714390|gb|AAF26079.1|AC012393_5 unknown protein
  misc_feature (76)..(301): Homolog of NCBI NO: 25405713 NR Description: hypothetical protein F20D21.12 [imported] - thaliana >gi|4585974|gb|AAD25610.1|AC005287_12 Hypothetical
  misc_feature (124)..(301): Homolog of NCBI NO: 15221784 NR Description: unknown protein; protein id: At1g54300.1
SLRFSGFCVFWMVEMMRSENHLRQASKHRNNNFPVKLEIIEDSLEEEHAPLNKRSKLWSNGTSVSKFSLLEEPSPLGLSLKKSPSFQELIEMKLSQSGDDSNSVKKESFGFGGVGTVEKLKASNFPATILRIGQWEYKSRYEGDLVAKCYFAKHKLVWEVLEQGLKSKIEIQWSDIMALKANLPEDEPGTLTIVLARRPLFFRETNPQPRKHTLWQATSDFTDGQASMNRQHFLQCPPGIMNKHFEKLVQCDHRLFCLSRQPEINLAAPFFDSRLSIFEDPSVSGSHNIASPVGAQSSSEHVSLSHDALSPSSVMDARAIEGVGGSIDSRNTNGWSQIKMPGLHQSISMNDFLTFLSDQACENNQEFEEMKQLLLSDNTQTDPSDEKSVMSKVNSFCNLLQSAANSQLNIETADTERVVGVDNNRHMPEGGKRVVDPASSSKPLQGMSRKDSFSDLLVHLPRITSLPKFLFNISEED

SEQ ID NO: 85323 - protein, 466 aa, Arabidopsis thaliana
  peptide (1)..(466): Ceres Seq. ID no. 12680068
  misc_feature (1)..(466): Homolog of NCBI NO: 25371341 NR Description: hypothetical protein At2g24100 [imported] - thaliana >gi|14596217|gb|AAK68836.1| Unknown protein [Arabidopsis >gi|15809913|gb|AAL06884.1| At2g24100/F27D4.1 [Arabidopsis
  misc_feature (4)..(466): Homolog of NCBI NO: 18400458 NR Description: expressed protein; protein id: At2g24100.1 thaliana] >gi|20197500|gb|AAD03372.2| expressed protein
  misc_feature (36)..(323): Homolog of NCBI NO: 15234853 NR Description: putative protein; protein id: At4g30780.1
  misc_feature (317)..(466): Homolog of NCBI NO: 15234853 NR Description: putative protein; protein id: At4g30780.1
  misc_feature (107)..(276): Homolog of NCBI NO: 20218825 NR Description: hypothetical protein [Pinus pinaster]
  misc_feature (1)..(101): Homolog of NCBI NO: 15234853 NR Description: putative protein; protein id: At4g30780.1
  misc_feature (214)..(347): Homolog of NCBI NO: 15234853 NR Description: putative protein; protein id: At4g30780.1
  misc_feature (42)..(420): Homolog of NCBI NO: 15230043 NR Description: unknown protein; protein id: At3g05770.1 thaliana] >gi|6714390|gb|AAF26079.1|AC012393_5 unknown protein
  misc_feature (65)..(290): Homolog of NCBI NO: 25405713 NR Description: hypothetical protein F20D21.12 [imported] - thaliana >gi|4585974|gb|AAD25610.1|AC005287_12 Hypothetical
  misc_feature (113)..(290): Homolog of NCBI NO: 15221784 NR Description: unknown protein; protein id: At1g54300.1
MVEMMRSENHLRQASKHRNNNFPVKLEIIEDSLEEEHAPLNKRSKLWSNGTSVSKFSLLEEPSPLGLSLKKSPSFQELIEMKLSQSGDDSNSVKKESFGFGGVGTVEKLKASNFPATILRIGQWEYKSRYEGDLVAKCYFAKHKLVWEVLEQGLKSKIEIQWSDIMALKANLPEDEPGTLTIVLARRPLFFRETNPQPRKHTLWQATSDFTDGQASMNRQHFLQCPPGIMNKHFEKLVQCDHRLFCLSRQPEINLAAPFFDSRLSIFEDPSVSGSHNIASPVGAQSSSEHVSLSHDALSPSSVMDARAIEGVGGSIDSRNTNGWSQIKMPGLHQSISMNDFLTFLSDQACENNQEFEEMKQLLLSDNTQTDPSDEKSVMSKVNSFCNLLQSAANSQLNIETADTERVVGVDNNRHMPEGGKRVVDPASSSKPLQGMSRKDSFSDLLVHLPRITSLPKFLFNISEED

SEQ ID NO: 85324 - protein, 463 aa, Arabidopsis thaliana
  peptide (1)..(463): Ceres Seq. ID no. 12680069
  misc_feature (1)..(463): Homolog of NCBI NO: 25371341 NR Description: hypothetical protein At2g24100 [imported] - thaliana >gi|14596217|gb|AAK68836.1| Unknown protein [Arabidopsis >gi|15809913|gb|AAL06884.1| At2g24100/F27D4.1 [Arabidopsis
  misc_feature (1)..(463): Homolog of NCBI NO: 18400458 NR Description: expressed protein; protein id: At2g24100.1 thaliana] >gi|20197500|gb|AAD03372.2| expressed protein
  misc_feature (33)..(320): Homolog of NCBI NO: 15234853 NR Description: putative protein; protein id: At4g30780.1
  misc_feature (314)..(463): Homolog of NCBI NO: 15234853 NR Description: putative protein; protein id: At4g30780.1
  misc_feature (104)..(273): Homolog of NCBI NO: 20218825 NR Description: hypothetical protein [Pinus pinaster]
  misc_feature (1)..(98): Homolog of NCBI NO: 15234853 NR Description: putative protein; protein id: At4g30780.1
  misc_feature (211)..(344): Homolog of NCBI NO: 15234853 NR Description: putative protein; protein id: At4g30780.1
  misc_feature (39)..(417): Homolog of NCBI NO: 15230043 NR Description: unknown protein; protein id: At3g05770.1 thaliana] >gi|6714390|gb|AAF26079.1|AC012393_5 unknown protein
  misc_feature (62)..(287): Homolog of NCBI NO: 25405713 NR Description: hypothetical protein F20D21.12 [imported] - thaliana >gi|4585974|gb|AAD25610.1|AC005287_12 Hypothetical
  misc_feature (110)..(287): Homolog of NCBI NO: 15221784 NR Description: unknown protein; protein id: At1g54300.1
MMRSENHLRQASKHRNNNFPVKLEIIEDSLEEEHAPLNKRSKLWSNGTSVSKFSLLEEPSPLGLSLKKSPSFQELIEMKLSQSGDDSNSVKKESFGFGGVGTVEKLKASNFPATILRIGQWEYKSRYEGDLVAKCYFAKHKLVWEVLEQGLKSKIEIQWSDIMALKANLPEDEPGTLTIVLARRPLFFRETNPQPRKHTLWQATSDFTDGQASMNRQHFLQCPPGIMNKHFEKLVQCDHRLFCLSRQPEINLAAPFFDSRLSIFEDPSVSGSHNIASPVGAQSSSEHVSLSHDALSPSSVMDARAIEGVGGSIDSRNTNGWSQIKMPGLHQSISMNDFLTFLSDQACENNQEFEEMKQLLLSDNTQTDPSDEKSVMSKVNSFCNLLQSAANSQLNIETADTERVVGVDNNRHMPEGGKRVVDPASSSKPLQGMSRKDSFSDLLVHLPRITSLPKFLFNISEED

SEQ ID NO: 85325 - DNA, 1153 bp, Arabidopsis thaliana
  misc_feature (1)..(1153): Ceres Seq. ID no. 12680070
  misc_feature: MA Experiment ID: 108434 Result: Up-regulated in Transcription
  misc_feature: MA Experiment 108434 PARAMETER Experiment Name: At_Root_Tips_cDNA_P Parameter: Tissue Value: Root Tips
  misc_feature: MA Experiment ID: 108464 Result: Down-regulated in Transcription
  misc_feature: MA Experiment 108464 PARAMETER Experiment Name: At_Germinating_Seeds_cDNA_P Parameter: Age (day) Value: 4 vs. 0
  misc_feature: MA Experiment 108464 PARAMETER Experiment Name: At_Germinating_Seeds_cDNA_P Parameter: Tissue Value: Germinating Seeds
  misc_feature: MA Experiment ID: 108488 Result: Up-regulated in Transcription
  misc_feature: MA Experiment ID: 108561 Result: Down-regulated in Transcription
  misc_feature: MA Experiment 108561 PARAMETER Experiment Name: At_100uM_ABA_cDNA_P Parameter: Timepoint (hr) Value: 6
  misc_feature: MA Experiment 108561 PARAMETER Experiment Name: At_100uM_ABA_cDNA_P Parameter: Tissue Value: Aerial
  misc_feature: MA Experiment 108561 PARAMETER Experiment Name: At_100uM_ABA_cDNA_P Parameter: Treatment Value: 100uM ABA vs. No Treatment
  misc_feature: MA Experiment ID: 108573 Result: Down-regulated in Transcription
  misc_feature: MA Experiment 108573 PARAMETER Experiment Name: At_Drought_cDNA_P Parameter: Timepoint (hr) Value: 6
  misc_feature: MA Experiment 108573 PARAMETER Experiment Name: At_Drought_cDNA_P Parameter: Tissue Value: Aerial
  misc_feature: MA Experiment 108573 PARAMETER Experiment Name: At_Drought_cDNA_P Parameter: Treatment Value: Drought vs. No Drought
  misc_feature: MA Experiment ID: 108585 Result: Down-regulated in Transcription
  misc_feature: MA Experiment 108585 PARAMETER Experiment Name: At_5mM_NaNP_cDNA_P Parameter: Timepoint (hr) Value: 6
  misc_feature: MA Experiment 108585 PARAMETER Experiment Name: At_5mM_NaNP_cDNA_P Parameter: Tissue Value: Aerial
  misc_feature: MA Experiment 108585 PARAMETER Experiment Name: At_5mM_NaNP_cDNA_P Parameter: Treatment Value: null
  misc_feature: MA Experiment ID: 108595 Result: Down-regulated in Transcription
  misc_feature: MA Experiment 108595 PARAMETER Experiment Name: At_Ler-pi_Ovule_cDNA_P Parameter: Plant Line Value: null
  misc_feature: MA Experiment ID: 108605 Result: Down-regulated in Transcription
  misc_feature: MA Experiment 108605 PARAMETER Experiment Name: At_100uM_ABA_cDNA_P Parameter: Timepoint (hr) Value: 6
  misc_feature: MA Experiment 108605 PARAMETER Experiment Name: At_100uM_ABA_cDNA_P Parameter: Tissue Value: Aerial
  misc_feature: MA Experiment 108605 PARAMETER Experiment Name: At_100uM_ABA_cDNA_P Parameter: Treatment Value: 100uM ABA vs. No Treatment
  misc_feature: MA Experiment ID: 108668 Result: Down-regulated in Transcription
  misc_feature: MA Experiment 108668 PARAMETER Experiment Name: At_2mM_SA_cDNA_P Parameter: Plant Line Value: WS
  misc_feature: MA Experiment 108668 PARAMETER Experiment Name: At_2mM_SA_cDNA_P Parameter: Timepoint (hr) Value: 6
  misc_feature: MA Experiment 108668 PARAMETER Experiment Name: At_2mM_SA_cDNA_P Parameter: Treatment Value: 2mM SA vs. No Treatment
  misc_feature: MA Experiment ID: 20000070 Result: Down-regulated in Transcription
  misc_feature: MA Experiment 20000070 PARAMETER Experiment Name: At_100uM_ABA_Mutants_cDNA_P Parameter: Plant Line Value: CS24
  misc_feature: MA Experiment 20000070 PARAMETER Experiment Name: At_100uM_ABA_Mutants_cDNA_P Parameter: Timepoint (hr) Value: 6
  misc_feature: MA Experiment 20000070 PARAMETER Experiment Name: At_100uM_ABA_Mutants_cDNA_P Parameter: Tissue Value: Aerial
  misc_feature: MA Experiment 20000070 PARAMETER Experiment Name: At_100uM_ABA_Mutants_cDNA_P Parameter: Treatment Value: 100uM ABA vs. No Treatment
  misc_feature: MA Experiment ID: 20000071 Result: Down-regulated in Transcription
  misc_feature: MA Experiment 20000071 PARAMETER Experiment Name: At_100uM_ABA_Mutants_cDNA_P Parameter: Plant Line Value: CS8104
  misc_feature: MA Experiment 20000071 PARAMETER Experiment Name: At_100uM_ABA_Mutants_cDNA_P Parameter: Timepoint (hr) Value: 6
  misc_feature: MA Experiment 20000071 PARAMETER Experiment Name: At_100uM_ABA_Mutants_cDNA_P Parameter: Tissue Value: Aerial
  misc_feature: MA Experiment 20000071 PARAMETER Experiment Name: At_100uM_ABA_Mutants_cDNA_P Parameter: Treatment Value: 100uM ABA vs. No Treatment
  misc_feature: MA Experiment ID: 20000117 Result: Down-regulated in Transcription
  misc_feature: MA Experiment 20000117 PARAMETER Experiment Name: At_100uM_ABA_Mutants_cDNA_P Parameter: Plant Line Value: Columbia
  misc_feature: MA Experiment 20000117 PARAMETER Experiment Name: At_100uM_ABA_Mutants_cDNA_P Parameter: Timepoint (hr) Value: 6
  misc_feature: MA Experiment 20000117 PARAMETER Experiment Name: At_100uM_ABA_Mutants_cDNA_P Parameter: Tissue Value: Aerial
  misc_feature: MA Experiment 20000117 PARAMETER Experiment Name: At_100uM_ABA_Mutants_cDNA_P Parameter: Treatment Value: 100uM ABA vs. No Treatment
  misc_feature: MA Experiment ID: 20000182 Result: Down-regulated in Transcription
  misc_feature: MA Experiment 20000182 PARAMETER Experiment Name: At_2mM_SA_P Parameter: Age (day) Value: 14
  misc_feature: MA Experiment 20000182 PARAMETER Experiment Name: At_2mM_SA_P Parameter: Organism Value: A. thaliana
  misc_feature: MA Experiment 20000182 PARAMETER Experiment Name: At_2mM_SA_P Parameter: Plant Line Value: WS
  misc_feature: MA Experiment 20000182 PARAMETER Experiment Name: At_2mM_SA_P Parameter: Timepoint (hr) Value: 6
  misc_feature: MA Experiment 20000182 PARAMETER Experiment Name: At_2mM_SA_P Parameter: Tissue Value: Aerial
  misc_feature: MA Experiment 20000182 PARAMETER Experiment Name: At_2mM_SA_P Parameter: Treatment Value: 2mM SA vs. No Treatment
  misc_feature: MA Experiment ID: 20000185 Result: Down-regulated in Transcription
  misc_feature: MA Experiment 20000185 PARAMETER Experiment Name: At_Roots__P Parameter: Age (day) Value: 7 vs. 21
  misc_feature: MA Experiment 20000185 PARAMETER Experiment Name: At_Roots__P Parameter: Organism Value: A. thaliana
  misc_feature: MA Experiment 20000185 PARAMETER Experiment Name: At_Roots__P Parameter: Tissue Value: Roots vs. Whole Plant
  misc_feature: MA Experiment ID: 20000224 Result: Up-regulated in Transcription
  misc_feature: MA Experiment ID: 20000436 Result: Down-regulated in Transcription
  misc_feature: MA Experiment 20000436 PARAMETER Experiment Name: At_Drought_P Parameter: Age (day) Value: 7
  misc_feature: MA Experiment 20000436 PARAMETER Experiment Name: At_Drought_P Parameter: Organism Value: A. thaliana
  misc_feature: MA Experiment 20000436 PARAMETER Experiment Name: At_Drought_P Parameter: Plant Line Value: WS
  misc_feature: MA Experiment 20000436 PARAMETER Experiment Name: At_Drought_P Parameter: Timepoint (hr) Value: 12
  misc_feature: MA Experiment 20000436 PARAMETER Experiment Name: At_Drought_P Parameter: Tissue Value: Whole Plant
  misc_feature: MA Experiment 20000436 PARAMETER Experiment Name: At_Drought_P Parameter: Treatment Value: Drought vs. No Drought
  misc_feature: MA Experiment ID: 20000437 Result: Down-regulated in Transcription
  misc_feature: MA Experiment 20000437 PARAMETER Experiment Name: At_Drought_P Parameter: Age (day) Value: 8
  misc_feature: MA Experiment 20000437 PARAMETER Experiment Name: At_Drought_P Parameter: Organism Value: A. thaliana
  misc_feature: MA Experiment 20000437 PARAMETER Experiment Name: At_Drought_P Parameter: Plant Line Value: WS
  misc_feature: MA Experiment 20000437 PARAMETER Experiment Name: At_Drought_P Parameter: Timepoint (hr) Value: 24
  misc_feature: MA Experiment 20000437 PARAMETER Experiment Name: At_Drought_P Parameter: Tissue Value: Whole Plant
  misc_feature: MA Experiment 20000437 PARAMETER Experiment Name: At_Drought_P Parameter: Treatment Value: Drought vs. No Drought
  misc_feature: MA Experiment ID: 20000439 Result: Down-regulated in Transcription
  misc_feature: MA Experiment 20000439 PARAMETER Experiment Name: At_Roots__P Parameter: Age (day) Value: 14 vs. 21
  misc_feature: MA Experiment 20000439 PARAMETER Experiment Name: At_Roots__P Parameter: Organism Value: A. thaliana
  misc_feature: MA Experiment 20000439 PARAMETER Experiment Name: At_Roots__P Parameter: Tissue Value: Roots vs. Whole Plant
  misc_feature: MA Experiment ID: 20000794 Result: Down-regulated in Transcription
  misc_feature: MA Experiment 20000794 PARAMETER Experiment Name: At_Petals_P Parameter: Age (day) Value: 23-25 days
  misc_feature: MA Experiment 20000794 PARAMETER Experiment Name: At_Petals_P Parameter: Plant Line Value: WS
  misc_feature: MA Experiment 20000794 PARAMETER Experiment Name: At_Petals_P Parameter: Tissue Value: Petals vs. Whole plant
  misc_feature: MA Experiment ID: 20001450 Result: Down-regulated in Transcription
  misc_feature: MA Experiment 20001450 PARAMETER Experiment Name: At_Far-red-induction_P Parameter: Age (day) Value: 7
  misc_feature: MA Experiment 20001450 PARAMETER Experiment Name: At_Far-red-induction_P Parameter: Light Value: Far-red vs. White
  misc_feature: MA Experiment 20001450 PARAMETER Experiment Name: At_Far-red-induction_P Parameter: Organism Value: A. thaliana
  misc_feature: MA Experiment 20001450 PARAMETER Experiment Name: At_Far-red-induction_P Parameter: Plant Line Value: Columbia
  misc_feature: MA Experiment 20001450 PARAMETER Experiment Name: At_Far-red-induction_P Parameter: Timepoint (hr) Value: 8
  misc_feature: MA Experiment 20001450 PARAMETER Experiment Name: At_Far-red-induction_P Parameter: Tissue Value: Whole Plant
  misc_feature: MA Experiment ID: 20001757 Result: Up-regulated in Transcription
  misc_feature: MA Experiment 20001757 PARAMETER Experiment Name: At_50mM_NH4NO3_L-to-H_P Parameter: Timepoint (hr) Value: 6
  misc_feature: MA Experiment 20001757 PARAMETER Experiment Name: At_50mM_NH4NO3_L-to-H_P Parameter: Tissue Value: Leaf
  misc_feature: MA Experiment 20001757 PARAMETER Experiment Name: At_50mM_NH4NO3_L-to-H_P Parameter: Treatment Value: 50mM NH4NO3 vs 100mM Mannitol
  misc_feature: MA Experiment ID: 20001905 Result: Down-regulated in Transcription
  misc_feature: MA Experiment 20001905 PARAMETER Experiment Name: At_Drought_Reproduction_P Parameter: Age (day) Value: 40
  misc_feature: MA Experiment 20001905 PARAMETER Experiment Name: At_Drought_Reproduction_P Parameter: Organism Value: A. thaliana
  misc_feature: MA Experiment 20001905 PARAMETER Experiment Name: At_Drought_Reproduction_P Parameter: Plant Line Value: WS
  misc_feature: MA Experiment 20001905 PARAMETER Experiment Name: At_Drought_Reproduction_P Parameter: Timepoint (day) Value: 10
  misc_feature: MA Experiment 20001905 PARAMETER Experiment Name: At_Drought_Reproduction_P Parameter: Tissue Value: Rosettes
  misc_feature: MA Experiment 20001905 PARAMETER Experiment Name: At_Drought_Reproduction_P Parameter: Treatment Value: Drought vs. No Drought
ggataagagcttcgtgatggtttgaaacctctgagtgaagaagaagcgccatggctgggattaccagcagcaccgttggattcaacgccgtcttcaccggaataaccaaaacagtatcatcacattcactcttctctgttgattccaaactctgtagtcttcgtctctccaaaaccgaactgtctttcactaatctcactccttctcctcgccgtgctttcgccgtcacttgccgcttcggcggtggtggtggaggttatcgattctctggagacaatagaagaggtaggccgaaagaagctgaaattgatgaagctcttgatatctcctcaattaggtcagctactgttaggcttatcgatgggcaacaaaacatgcttggtttagtgtctaaagacgaagccgttcgaatggctgatgatgctgaacttgatctggttatactatcgcctgatgcagatcctccggttgttaaaatgatggactacagtaaatacagatacgaacagcaaaagaggaaaaaagatcagcaaaagaaaacaactcgcatggatttaaaggagcttaaaatgggttataatattgatcagcatgattattccgttcgtctaagggctgcccaaaagttcttgcaagatggtgacaaggttaaggtgattgtgagcatgaaaggacgagaaaacgagttcagaaatatcgctattgaactcctcagacgtttccaaaccgaaataggggagcttgcaactgaagagagcaaaaacttcagggacagaaatatgttcattatcttggtcccaaacaaagaaatgattcggaaaccacaagaaccacccacaagaaagaagaaaaaaacagcggaaaacgaagcttcagcttcagctgcagaaataacagctgagcctgagcctgagcctgagcctgagcctgaacctgagcctgagcctgagcctgagcctgagccagagcctctacagatcgattcttgagtttaaaatcttgtggtaggattttcagagctaaagtaaagttttgtatatttacttttctaccatgtctcaagagagccaagagctgtataacaaatagagttagtcctatttgaatgatgttcttcgtttgtagatcttttctctaatctatttttttgttt

SEQ ID NO: 85326 - protein, 312 aa, Arabidopsis thaliana; identical to SEQ ID NO: 37566
  peptide (1)..(312): Ceres Seq. ID no. 12680071
  misc_feature (166)..(252): Pfam Name: Translation initiation factor IF-3, C-terminal domain Pfam Description: Translation initiation factor IF-3, C-terminal
  misc_feature (1)..(312): Homolog of NCBI NO: 15224088 NR Description: putative chloroplast initiation factor 3; protein At2g24060.1, supported by cDNA: 41558., supported by cDNA:
  misc_feature (1)..(283): Homolog of NCBI NO: 18417644 NR Description: putative protein; protein id: At4g30690.1, by cDNA: gi_14596120, supported by cDNA: gi_18377497 [Arabidopsis >gi|14596121|gb|AAK68788.1| putative protein [Arabidopsis
  misc_feature (1)..(164): Homolog of NCBI NO: 25407671 NR Description: hypothetical protein AT4g30690 [imported] - thaliana >gi|5725433|emb|CAB52442.1| putative protein thaliana] >gi|7269970|emb|CAB79787.1| putative protein
  misc_feature (82)..(269): Homolog of NCBI NO: 33241247 NR Description: Translation initiation factor 3 [Prochlorococcus subsp. marinus str. CCMP1375] >gi|33238777|gb|AAQ00842.1| initiation factor 3 [Prochlorococcus marinus subsp. marinus str.
  misc_feature (82)..(284): Homolog of NCBI NO: 33864629 NR Description: translation initiation factor IF-3 [Synechococcus
  misc_feature (95)..(252): Homolog of NCBI NO: 17232115 NR Description: translation initiation factor IF-3 [Nostoc sp.
  misc_feature (95)..(252): Homolog of NCBI NO: 20138475 NR Description: Translation initiation factor IF-3
  misc_feature (95)..(253): Homolog of NCBI NO: 20808119 NR Description: Translation initiation factor IF3 tengcongensis] >gi|22095768|sp|Q8R9C2|IF3_THETN Translation
  misc_feature (75)..(306): Homolog of NCBI NO: 547710 NR Description: TRANSLATION INITIATION FACTOR IF-3, CHLOROPLAST
  misc_feature (95)..(252): Homolog of NCBI NO: 23128110 NR Description: hypothetical protein [Nostoc punctiforme]

SEQ ID NO: 85327 - protein, 204 aa, Arabidopsis thaliana; identical to SEQ ID NO: 37567
  peptide (1)..(204): Ceres Seq. ID no. 12680072
  misc_feature (58)..(144): Pfam Name: Translation initiation factor IF-3, C-terminal domain Pfam Description: Translation initiation factor IF-3, C-terminal
  misc_feature (1)..(204): Homolog of NCBI NO: 15224088 NR Description: putative chloroplast initiation factor 3; protein At2g24060.1, supported by cDNA: 41558., supported by cDNA:
  misc_feature (1)..(175): Homolog of NCBI NO: 18417644 NR Description: putative protein; protein id: At4g30690.1, by cDNA: gi_14596120, supported by cDNA: gi_18377497 [Arabidopsis >gi|14596121|gb|AAK68788.1| putative protein [Arabidopsis
  misc_feature (1)..(56): Homolog of NCBI NO: 25407671 NR Description: hypothetical protein AT4g30690 [imported] - thaliana >gi|5725433|emb|CAB52442.1| putative protein thaliana] >gi|7269970|emb|CAB79787.1| putative protein
  misc_feature (1)..(161): Homolog of NCBI NO: 33241247 NR Description: Translation initiation factor 3 [Prochlorococcus subsp. marinus str. CCMP1375] >gi|33238777|gb|AAQ00842.1| initiation factor 3 [Prochlorococcus marinus subsp. marinus str.
  misc_feature (1)..(176): Homolog of NCBI NO: 33864629 NR Description: translation initiation factor IF-3 [Synechococcus
  misc_feature (1)..(144): Homolog of NCBI NO: 17232115 NR Description: translation initiation factor IF-3 [Nostoc sp.
  misc_feature (1)..(144): Homolog of NCBI NO: 20138475 NR Description: Translation initiation factor IF-3
  misc_feature (1)..(145): Homolog of NCBI NO: 20808119 NR Description: Translation initiation factor IF3 tengcongensis] >gi|22095768|sp|Q8R9C2|IF3_THETN Translation
  misc_feature (1)..(198): Homolog of NCBI NO: 547710 NR Description: TRANSLATION INITIATION FACTOR IF-3, CHLOROPLAST
  misc_feature (1)..(144): Homolog of NCBI NO: 23128110 NR Description: hypothetical protein [Nostoc punctiforme]

SEQ ID NO: 85328 - protein, 192 aa, Arabidopsis thaliana; identical to SEQ ID NO: 37568
  peptide (1)..(192): Ceres Seq. ID no. 12680073
  misc_feature (46)..(132): Pfam Name: Translation initiation factor IF-3, C-terminal domain Pfam Description: Translation initiation factor IF-3, C-terminal
  misc_feature (1)..(192): Homolog of NCBI NO: 15224088 NR Description: putative chloroplast initiation factor 3; protein At2g24060.1, supported by cDNA: 41558., supported by cDNA:
  misc_feature (1)..(163): Homolog of NCBI NO: 18417644 NR Description: putative protein; protein id: At4g30690.1, by cDNA: gi_14596120, supported by cDNA: gi_18377497 [Arabidopsis >gi|14596121|gb|AAK68788.1| putative protein [Arabidopsis
  misc_feature (1)..(44): Homolog of NCBI NO: 25407671 NR Description: hypothetical protein AT4g30690 [imported] - thaliana >gi|5725433|emb|CAB52442.1| putative protein thaliana] >gi|7269970|emb|CAB79787.1| putative protein
  misc_feature (1)..(149): Homolog of NCBI NO: 33241247 NR Description: Translation initiation factor 3 [Prochlorococcus subsp. marinus str. CCMP1375] >gi|33238777|gb|AAQ00842.1| initiation factor 3 [Prochlorococcus marinus subsp. marinus str.
  misc_feature (1)..(164): Homolog of NCBI NO: 33864629 NR Description: translation initiation factor IF-3 [Synechococcus
  misc_feature (1)..(132): Homolog of NCBI NO: 17232115 NR Description: translation initiation factor IF-3 [Nostoc sp.
  misc_feature (1)..(132): Homolog of NCBI NO: 20138475 NR Description: Translation initiation factor IF-3
  misc_feature (1)..(133): Homolog of NCBI NO: 20808119 NR Description: Translation initiation factor IF3 tengcongensis] >gi|22095768|sp|Q8R9C2|IF3_THETN Translation
  misc_feature (1)..(186): Homolog of NCBI NO: 547710 NR Description: TRANSLATION INITIATION FACTOR IF-3, CHLOROPLAST
  misc_feature (1)..(132): Homolog of NCBI NO: 23128110 NR Description: hypothetical protein [Nostoc punctiforme]

SEQ ID NO: 85329 - DNA, 1154 bp, Arabidopsis thaliana
  misc_feature (1)..(1154): Ceres Seq. ID no. 12680098
  misc_feature: MA Experiment ID: 108434 Result: Up-regulated in Transcription
  misc_feature: MA Experiment 108434 PARAMETER Experiment Name: At_Root_Tips_cDNA_P Parameter: Tissue Value: Root Tips
  misc_feature: MA Experiment ID: 108464 Result: Down-regulated in Transcription
  misc_feature: MA Experiment 108464 PARAMETER Experiment Name: At_Germinating_Seeds_cDNA_P Parameter: Age (day) Value: 4 vs. 0
  misc_feature: MA Experiment 108464 PARAMETER Experiment Name: At_Germinating_Seeds_cDNA_P Parameter: Tissue Value: Germinating Seeds
  misc_feature: MA Experiment ID: 20000180 Result: Up-regulated in Transcription
  misc_feature: MA Experiment 20000180 PARAMETER Experiment Name: At_Germinating_Seeds_P Parameter: Age (hr) Value: 24 vs. 0
  misc_feature: MA Experiment 20000180 PARAMETER Experiment Name: At_Germinating_Seeds_P Parameter: Tissue Value: Germinating Seeds
  misc_feature: MA Experiment ID: 20000185 Result: Up-regulated in Transcription
  misc_feature: MA Experiment 20000185 PARAMETER Experiment Name: At_Roots__P Parameter: Age (day) Value: 7 vs. 21
  misc_feature: MA Experiment 20000185 PARAMETER Experiment Name: At_Roots__P Parameter: Organism Value: A. thaliana
  misc_feature: MA Experiment 20000185 PARAMETER Experiment Name: At_Roots__P Parameter: Tissue Value: Roots vs. Whole Plant
  misc_feature: MA Experiment ID: 20000234 Result: Up-regulated in Transcription
  misc_feature: MA Experiment 20000234 PARAMETER Experiment Name: At_Siliques_P Parameter: Age (day) Value: 21
  misc_feature: MA Experiment 20000234 PARAMETER Experiment Name: At_Siliques_P Parameter: Organism Value: A. thaliana
  misc_feature: MA Experiment 20000234 PARAMETER Experiment Name: At_Siliques_P Parameter: Plant Line Value: WS
  misc_feature: MA Experiment 20000234 PARAMETER Experiment Name: At_Siliques_P Parameter: Tissue Value: Less Than 5mm Siliques vs. Whole Plant
  misc_feature: MA Experiment ID: 20000235 Result: Up-regulated in Transcription
  misc_feature: MA Experiment 20000235 PARAMETER Experiment Name: At_Siliques_P Parameter: Age (day) Value: 21
  misc_feature: MA Experiment 20000235 PARAMETER Experiment Name: At_Siliques_P Parameter: Organism Value: A. thaliana
  misc_feature: MA Experiment 20000235 PARAMETER Experiment Name: At_Siliques_P Parameter: Plant Line Value: WS
  misc_feature: MA Experiment 20000235 PARAMETER Experiment Name: At_Siliques_P Parameter: Tissue Value: 5-10mm Siliques vs. Whole Plant
  misc_feature: MA Experiment ID: 20000264 Result: Up-regulated in Transcription
  misc_feature: MA Experiment 20000264 PARAMETER Experiment Name: At_Open_Flower_P Parameter: Age (day) Value: 21
  misc_feature: MA Experiment 20000264 PARAMETER Experiment Name: At_Open_Flower_P Parameter: Plant Line Value: WS
  misc_feature: MA Experiment 20000264 PARAMETER Experiment Name: At_Open_Flower_P Parameter: Tissue Value: Open Flower vs. Whole Plant
  misc_feature: MA Experiment ID: 20000265 Result: Up-regulated in Transcription
  misc_feature: MA Experiment 20000265 PARAMETER Experiment Name: At_Open_Flower_P Parameter: Age (day) Value: 21
  misc_feature: MA Experiment 20000265 PARAMETER Experiment Name: At_Open_Flower_P Parameter: Plant Line Value: WS
  misc_feature: MA Experiment 20000265 PARAMETER Experiment Name: At_Open_Flower_P Parameter: Tissue Value: Closed Flower vs. Whole Plant
  misc_feature: MA Experiment ID: 20000286 Result: Up-regulated in Transcription
  misc_feature: MA Experiment 20000286 PARAMETER Experiment Name: At_Open_Flower_P Parameter: Age (day) Value: 21
  misc_feature: MA Experiment 20000286 PARAMETER Experiment Name: At_Open_Flower_P Parameter: Plant Line Value: WS
  misc_feature: MA Experiment 20000286 PARAMETER Experiment Name: At_Open_Flower_P Parameter: Tissue Value: Half Open vs. Whole Plant
  misc_feature: MA Experiment ID: 20000438 Result: Up-regulated in Transcription
  misc_feature: MA Experiment 20000438 PARAMETER Experiment Name: At_Shoots__P Parameter: Age (day) Value: 14
  misc_feature: MA Experiment 20000438 PARAMETER Experiment Name: At_Shoots__P Parameter: Tissue Value: Shoots vs. Whole Plant
  misc_feature: MA Experiment ID: 20001247 Result: Down-regulated in Transcription
  misc_feature: MA Experiment 20001247 PARAMETER Experiment Name: At_Far-red-induction_P Parameter: Age (day) Value: 7
  misc_feature: MA Experiment 20001247 PARAMETER Experiment Name: At_Far-red-induction_P Parameter: Light Value: Far-red vs. White
  misc_feature: MA Experiment 20001247 PARAMETER Experiment Name: At_Far-red-induction_P Parameter: Organism Value: A. thaliana
  misc_feature: MA Experiment 20001247 PARAMETER Experiment Name: At_Far-red-induction_P Parameter: Plant Line Value: Columbia
  misc_feature: MA Experiment 20001247 PARAMETER Experiment Name: At_Far-red-induction_P Parameter: Timepoint (hr) Value: 1
  misc_feature: MA Experiment 20001247 PARAMETER Experiment Name: At_Far-red-induction_P Parameter: Tissue Value: Whole Plant
  misc_feature: MA Experiment ID: 20001248 Result: Down-regulated in Transcription
  misc_feature: MA Experiment 20001248 PARAMETER Experiment Name: At_Far-red-induction_P Parameter: Age (day) Value: 7
  misc_feature: MA Experiment 20001248 PARAMETER Experiment Name: At_Far-red-induction_P Parameter: Light Value: Far-red vs. White
  misc_feature: MA Experiment 20001248 PARAMETER Experiment Name: At_Far-red-induction_P Parameter: Organism Value: A. thaliana
  misc_feature: MA Experiment 20001248 PARAMETER Experiment Name: At_Far-red-induction_P Parameter: Plant Line Value: Columbia
  misc_feature: MA Experiment 20001248 PARAMETER Experiment Name: At_Far-red-induction_P Parameter: Timepoint (hr) Value: 4
  misc_feature: MA Experiment 20001248 PARAMETER Experiment Name: At_Far-red-induction_P Parameter: Tissue Value: Whole Plant
  misc_feature: MA Experiment ID: 20001451 Result: Down-regulated in Transcription
  misc_feature: MA Experiment 20001451 PARAMETER Experiment Name: At_Far-red-induction_P Parameter: Age (day) Value: 7
  misc_feature: MA Experiment 20001451 PARAMETER Experiment Name: At_Far-red-induction_P Parameter: Light Value: Far-red vs. White
  misc_feature: MA Experiment 20001451 PARAMETER Experiment Name: At_Far-red-induction_P Parameter: Organism Value: A. thaliana
  misc_feature: MA Experiment 20001451 PARAMETER Experiment Name: At_Far-red-induction_P Parameter: Plant Line Value: Columbia
  misc_feature: MA Experiment 20001451 PARAMETER Experiment Name: At_Far-red-induction_P Parameter: Timepoint (hr) Value: 24
  misc_feature: MA Experiment 20001451 PARAMETER Experiment Name: At_Far-red-induction_P Parameter: Tissue Value: Whole Plant
  misc_feature: MA Experiment ID: 20001555 Result: Down-regulated in Transcription
  misc_feature: MA Experiment 20001555 PARAMETER Experiment Name: At_Drought_Soil_Dry_P Parameter: Age (day) Value: 24
  misc_feature: MA Experiment 20001555 PARAMETER Experiment Name: At_Drought_Soil_Dry_P Parameter: Organism Value: A. thaliana
  misc_feature: MA Experiment 20001555 PARAMETER Experiment Name: At_Drought_Soil_Dry_P Parameter: Plant Line Value: WS
  misc_feature: MA Experiment 20001555 PARAMETER Experiment Name: At_Drought_Soil_Dry_P Parameter: Post Timepoint (hr) Value: None
  misc_feature: MA Experiment 20001555 PARAMETER Experiment Name: At_Drought_Soil_Dry_P Parameter: Post-Treatment Value: None
  misc_feature: MA Experiment 20001555 PARAMETER Experiment Name: At_Drought_Soil_Dry_P Parameter: Timepoint (day) Value: 10
  misc_feature: MA Experiment 20001555 PARAMETER Experiment Name: At_Drought_Soil_Dry_P Parameter: Treatment Value: Drought vs. No Drought
  misc_feature: MA Experiment ID: 20001560 Result: Up-regulated in Transcription
  misc_feature: MA Experiment 20001560 PARAMETER Experiment Name: At_Drought_Soil_Dry_P Parameter: Age (day) Value: 28
  misc_feature: MA Experiment 20001560 PARAMETER Experiment Name: At_Drought_Soil_Dry_P Parameter: Organism Value: A. thaliana
  misc_feature: MA Experiment 20001560 PARAMETER Experiment Name: At_Drought_Soil_Dry_P Parameter: Plant Line Value: WS
  misc_feature: MA Experiment 20001560 PARAMETER Experiment Name: At_Drought_Soil_Dry_P Parameter: Post Timepoint (hr) Value: None
  misc_feature: MA Experiment 20001560 PARAMETER Experiment Name: At_Drought_Soil_Dry_P Parameter: Post-Treatment Value: None
  misc_feature: MA Experiment 20001560 PARAMETER Experiment Name: At_Drought_Soil_Dry_P Parameter: Timepoint (day) Value: 14
  misc_feature: MA Experiment 20001560 PARAMETER Experiment Name: At_Drought_Soil_Dry_P Parameter: Treatment Value: Drought vs. No Drought
  misc_feature: MA Experiment ID: 20001905 Result: Up-regulated in Transcription
  misc_feature: MA Experiment 20001905 PARAMETER Experiment Name: At_Drought_Reproduction_P Parameter: Age (day) Value: 40
  misc_feature: MA Experiment 20001905 PARAMETER Experiment Name: At_Drought_Reproduction_P Parameter: Organism Value: A. thaliana
  misc_feature: MA Experiment 20001905 PARAMETER Experiment Name: At_Drought_Reproduction_P Parameter: Plant Line Value: WS
  misc_feature: MA Experiment 20001905 PARAMETER Experiment Name: At_Drought_Reproduction_P Parameter: Timepoint (day) Value: 10
  misc_feature: MA Experiment 20001905 PARAMETER Experiment Name: At_Drought_Reproduction_P Parameter: Tissue Value: Rosettes
  misc_feature: MA Experiment 20001905 PARAMETER Experiment Name: At_Drought_Reproduction_P Parameter: Treatment Value: Drought vs. No Drought
  misc_feature: MA Experiment ID: 20001911 Result: Down-regulated in Transcription
  misc_feature: MA Experiment 20001911 PARAMETER Experiment Name: At_Drought_Reproduction_P Parameter: Age (day) Value: 40
  misc_feature: MA Experiment 20001911 PARAMETER Experiment Name: At_Drought_Reproduction_P Parameter: Organism Value: A. thaliana
  misc_feature: MA Experiment 20001911 PARAMETER Experiment Name: At_Drought_Reproduction_P Parameter: Plant Line Value: WS
  misc_feature: MA Experiment 20001911 PARAMETER Experiment Name: At_Drought_Reproduction_P Parameter: Timepoint (day) Value: 10
  misc_feature: MA Experiment 20001911 PARAMETER Experiment Name: At_Drought_Reproduction_P Parameter: Tissue Value: Flowers
  misc_feature: MA Experiment 20001911 PARAMETER Experiment Name: At_Drought_Reproduction_P Parameter: Treatment Value: Drought vs. No Drought
actttgatcacttttcaacttcctaaatctcttcacagttactttcgattttccgatttcgtagcttcgaaaatgttctccagcagccaattcgagcctaattccggcttctccggcggcggattcatgtcttctcaaccttctcaagcctacgaatcctcctcctccaccgctaagaatcgtgattttcaaggtcttgttccagtgacggtgaagcaaatcaccgaatgtttccaatccagtggtgaaaaatctggtctcgtcatcaatggaatctcactaacaaacgtttcacttgttggattagtgtgtgacaaagatgaatctaaagtcacagaagttagattcactcttgatgatggaacaggacgaattgactgtaaaagatgggtgagtgaaactttcgacgctagagaaatggagtctgtgcgagatggaacttatgtgcgcctcagtggtcatttgaagacttttcagggcaaaactcagcttcttgttttctctgtgaggcctattatggacttcaatgaggttacttttcactacattgagtgtatacacttctactcccagaactctgaatcacagagacaacaagtcggtgatgtcactcagtcagttaacaccacatttcaaggtggatcaaacacaaaccaggcaacactattgaaccctgtggtttcttctcaaaacaatgatggcaatgggcgcaagaacttggatgatatgattctagactatctaaagcaacctgcttgcactgcaagacaacaggggatacatatcgatgaaattgctcagcagttgaagatcccaaaaaacaagctagagggcgttgttcaatcactggaaggagatggtctaatatactcgacaatcgatgagtatcacttcaagcacgtggagctttgatctatctaatagtcatctagagtttggttaatccgtagatagagtcattagtattgtctggtgatttaaaagatgtttcaatatccagaactattaggatcacgtctagttcacttctgaaactttggtagtgtcatgcttaattctggtgttggattgtttccttgtttctttcaatttggtaagccaacttcaaaagttcaaagttgattttttgtttaatctgaaactatatttggttt

SEQ ID NO: 85330 - protein, 303 aa, Arabidopsis thaliana; identical to SEQ ID NO: 27810
  peptide (1)..(303): Ceres Seq. ID no. 12680099
  misc_feature (97)..(172): Pfam Name: OB-fold nucleic acid binding domain Pfam Description: OB-fold nucleic acid binding domain
  misc_feature (25)..(303): Homolog of NCBI NO: 18400560 NR Description: putative replication protein A1; protein id: supported by cDNA: 7536. [Arabidopsis thaliana] putative replication protein A1 [Arabidopsis thaliana]
  misc_feature (25)..(222): Homolog of NCBI NO: 25347925 NR Description: probable replication protein A1 [imported] -
  misc_feature (226)..(303): Homolog of NCBI NO: 25347925 NR Description: probable replication protein A1 [imported] -
  misc_feature (31)..(299): Homolog of NCBI NO: 18396383 NR Description: putative replication factor A; protein id: supported by cDNA: 118359. [Arabidopsis thaliana] putative replication factor A [Arabidopsis thaliana]
  misc_feature (31)..(299): Homolog of NCBI NO: 6728969 NR Description: putative replication factor A [Arabidopsis
  misc_feature (25)..(299): Homolog of NCBI NO: 9801268 NR Description: replication protein A2 [Oryza sativa]
  misc_feature (25)..(299): Homolog of NCBI NO: 13516746 NR Description: replication protein A 30kDa [Oryza sativa
  misc_feature (26)..(302): Homolog of NCBI NO: 2498847 NR Description: REPLICATION PROTEIN A 32 KD SUBUNIT (RP-A) (RF-A)
  misc_feature (26)..(302): Homolog of NCBI NO: 34871794 NR Description: p32-subunit of replication protein A [Rattus
  misc_feature (28)..(301): Homolog of NCBI NO: 2498849 NR Description: Replication factor-A protein 2 (Single-stranded

SEQ ID NO: 85331 - protein, 279 aa, Arabidopsis thaliana; identical to SEQ ID NO: 27811
  peptide (1)..(279): Ceres Seq. ID no. 12680100
  misc_feature (73)..(148): Pfam Name: OB-fold nucleic acid binding domain Pfam Description: OB-fold nucleic acid binding domain
  misc_feature (1)..(279): Homolog of NCBI NO: 18400560 NR Description: putative replication protein A1; protein id: supported by cDNA: 7536. [Arabidopsis thaliana] putative replication protein A1 [Arabidopsis thaliana]
  misc_feature (1)..(198): Homolog of NCBI NO: 25347925 NR Description: probable replication protein A1 [imported] -
  misc_feature (202)..(279): Homolog of NCBI NO: 25347925 NR Description: probable replication protein A1 [imported] -
  misc_feature (7)..(275): Homolog of NCBI NO: 18396383 NR Description: putative replication factor A; protein id: supported by cDNA: 118359. [Arabidopsis thaliana] putative replication factor A [Arabidopsis thaliana]
  misc_feature (7)..(275): Homolog of NCBI NO: 6728969 NR Description: putative replication factor A [Arabidopsis
  misc_feature (1)..(275): Homolog of NCBI NO: 9801268 NR Description: replication protein A2 [Oryza sativa]
  misc_feature (1)..(275): Homolog of NCBI NO: 13516746 NR Description: replication protein A 30kDa [Oryza sativa
  misc_feature (2)..(278): Homolog of NCBI NO: 2498847 NR Description: REPLICATION PROTEIN A 32 KD SUBUNIT (RP-A) (RF-A)
  misc_feature (2)..(278): Homolog of NCBI NO: 34871794 NR Description: p32-subunit of replication protein A [Rattus
  misc_feature (4)..(277): Homolog of NCBI NO: 2498849 NR Description: Replication factor-A protein 2 (Single-stranded

SEQ ID NO: 85332 - protein, 261 aa, Arabidopsis thaliana; identical to SEQ ID NO: 27812
  peptide (1)..(261): Ceres Seq. ID no. 12680101
  misc_feature (55)..(130): Pfam Name: OB-fold nucleic acid binding domain Pfam Description: OB-fold nucleic acid binding domain
  misc_feature (1)..(261): Homolog of NCBI NO: 18400560 NR Description: putative replication protein A1; protein id: supported by cDNA: 7536. [Arabidopsis thaliana] putative replication protein A1 [Arabidopsis thaliana]
  misc_feature (1)..(180): Homolog of NCBI NO: 25347925 NR Description: probable replication protein A1 [imported] -
  misc_feature (184)..(261): Homolog of NCBI NO: 25347925 NR Description: probable replication protein A1 [imported] -
  misc_feature (1)..(257): Homolog of NCBI NO: 18396383 NR Description: putative replication factor A; protein id: supported by cDNA: 118359. [Arabidopsis thaliana] putative replication factor A [Arabidopsis thaliana]
  misc_feature (1)..(257): Homolog of NCBI NO: 6728969 NR Description: putative replication factor A [Arabidopsis
  misc_feature (1)..(257): Homolog of NCBI NO: 9801268 NR Description: replication protein A2 [Oryza sativa]
  misc_feature (1)..(257): Homolog of NCBI NO: 13516746 NR Description: replication protein A 30kDa [Oryza sativa
  misc_feature (1)..(260): Homolog of NCBI NO: 2498847 NR Description: REPLICATION PROTEIN A 32 KD SUBUNIT (RP-A) (RF-A)
  misc_feature (1)..(260): Homolog of NCBI NO: 34871794 NR Description: p32-subunit of replication protein A [Rattus
  misc_feature (1)..(259): Homolog of NCBI NO: 2498849 NR Description: Replication factor-A protein 2 (Single-stranded

SEQ ID NO: 85333 - DNA, 1452 bp, Arabidopsis thaliana
  misc_feature (1)..(1452): Ceres Seq. ID no. 12680106
  misc_feature: MA Experiment ID: 108463 Result: Up-regulated in Transcription
  misc_feature: MA Experiment 108463 PARAMETER Experiment Name: At_Germinating_Seeds_cDNA_P Parameter: Age (day) Value: 3 vs. 0
  misc_feature: MA Experiment 108463 PARAMETER Experiment Name: At_Germinating_Seeds_cDNA_P Parameter: Tissue Value: Germinating Seeds
  misc_feature: MA Experiment ID: 108464 Result: Up-regulated in Transcription
  misc_feature: MA Experiment 108464 PARAMETER Experiment Name: At_Germinating_Seeds_cDNA_P Parameter: Age (day) Value: 4 vs. 0
  misc_feature: MA Experiment 108464 PARAMETER Experiment Name: At_Germinating_Seeds_cDNA_P Parameter: Tissue Value: Germinating Seeds
  misc_feature: MA Experiment ID: 108595 Result: Down-regulated in Transcription
  misc_feature: MA Experiment 108595 PARAMETER Experiment Name: At_Ler-pi_Ovule_cDNA_P Parameter: Plant Line Value: null
  misc_feature: MA Experiment ID: 20000112 Result: Up-regulated in Transcription
  misc_feature: MA Experiment 20000112 PARAMETER Experiment Name: At_42deg_Heat_cDNA_P Parameter: Temperature (deg C) Value: 42 vs. 22
  misc_feature: MA Experiment 20000112 PARAMETER Experiment Name: At_42deg_Heat_cDNA_P Parameter: Timepoint (hr) Value: 2
  misc_feature: MA Experiment 20000112 PARAMETER Experiment Name: At_42deg_Heat_cDNA_P Parameter: Tissue Value: Aerial
  misc_feature: MA Experiment ID: 20000184 Result: Down-regulated in Transcription
  misc_feature: MA Experiment 20000184 PARAMETER Experiment Name: At_Shoots__P Parameter: Age (day) Value: 7
  misc_feature: MA Experiment 20000184 PARAMETER Experiment Name: At_Shoots__P Parameter: Tissue Value: Shoots vs. Whole Plant
  misc_feature: MA Experiment ID: 20000235 Result: Down-regulated in Transcription
  misc_feature: MA Experiment 20000235 PARAMETER Experiment Name: At_Siliques_P Parameter: Age (day) Value: 21
  misc_feature: MA Experiment 20000235 PARAMETER Experiment Name: At_Siliques_P Parameter: Organism Value: A. thaliana
  misc_feature: MA Experiment 20000235 PARAMETER Experiment Name: At_Siliques_P Parameter: Plant Line Value: WS
  misc_feature: MA Experiment 20000235 PARAMETER Experiment Name: At_Siliques_P Parameter: Tissue Value: 5-10mm Siliques vs. Whole Plant
  misc_feature: MA Experiment ID: 20000286 Result: Down-regulated in Transcription
  misc_feature: MA Experiment 20000286 PARAMETER Experiment Name: At_Open_Flower_P Parameter: Age (day) Value: 21
  misc_feature: MA Experiment 20000286 PARAMETER Experiment Name: At_Open_Flower_P Parameter: Plant Line Value: WS
  misc_feature: MA Experiment 20000286 PARAMETER Experiment Name: At_Open_Flower_P Parameter: Tissue Value: Half Open vs. Whole Plant
aagtgatttcaagtggttggttctgttccttttctcgtccccgatcaagtttcttctcctaaactccagaatttggtcttgaagatctctaaaggctcttcctttttgttcatttctctacccagatatcgatgggtacatacctaagttctccgaaaactgaaaagttatcagaagatggtgagaatgataagctcagatttggtttatcgtctatgcaaggttggcgcgctaccatggaagacgcgcatgctgcaattcttgatcttgatgataagacatcgttcttcggtgtgtatgatggccatggaggtaaagtcgttgcaaagttctgtgccaagtatctacaccagcaggttatcagtaatgaagcgtataaaactggagacgtcgaaacatctcttcgaagagcattctttagaatggatgacatgatgcaaggacaaagaggatggcgagagttagctgtacttggcgacaagatgaacaaatttagcggcatgattgaaggatttatatggtcaccaagaagcggtgacaccaataaccaacccgatagttggcctcttgaagatggtcctcattctgatttcacgggacctacctcggggtgcacagcgtgtgtagctcttattaaagataagaagctctttgttgcaaatgccggtgactcacgttgtgtgatatcaagaaagagtcaggcttacaatctttctaaagatcacaagcctgatcttgaagttgaaaaagaaaggatattgaaagctggtggctttattcacgctgggagaatcaatggaagcttgaatctgacaagagccattggtgatatggagttcaagcagaataagtttttaccatctgaaaagcaaatggttactgctgatccagatataaacactattgacctatgtgatgatgatgactttcttgttgttgcttgcgatggaatatgggattgtatgtcaagccaggaactagttgattttatccatgaacagttaaaatctgaaacaaaactttcaacagtatgtgaaaaggttgttgatagatgtttggctccagatacagcgactggtgaaggttgtgataatatgaccatcatcttggttcagttcaagaagcctaacccatctgagactgaaccagaagattccaaaccagaaccaagcgaagatgagccgagctcatcaagctagatatctttaaagagccaagaggaagaagatttgtgaaagtgtctcttttatcattgactttttgttcaacattgtaaatccttttgaatgtggcttagattcaagaagctggctttttcccagtttagcttcaagaagtctgagatgtcacagagtttggtttaatcttaaaaggacctttgtatagatatttcttgtgattgatgttttcagctatagtttaaaaaattcacaaggacaagctttttgtacc

SEQ ID NO: 85334 - protein, 355 aa, Arabidopsis thaliana; identical to SEQ ID NO: 28678
  peptide (1)..(355): Ceres Seq. ID no. 12680107
  misc_feature (22)..(322): Pfam Name: Protein phosphatase 2C Pfam Description: Protein phosphatase 2C
  misc_feature (1)..(355): Homolog of NCBI NO: 15224677 NR Description: protein phosphatase 2C (PP2C); protein id: supported by cDNA: 11428., supported by cDNA: gi_15292878, by cDNA: gi_18652942, supported by cDNA: gi_20258908 [Arabidopsis
  misc_feature (1)..(355): Homolog of NCBI NO: 15236548 NR Description: protein phosphatase 2C (PP2C); protein id: supported by cDNA: gi_16209697 [Arabidopsis thaliana]
  misc_feature (1)..(343): Homolog of NCBI NO: 12003990 NR Description: protein phosphatase type-2C [Zea mays]
  misc_feature (134)..(355): Homolog of NCBI NO: 27697184 NR Description: Similar to protein phosphatase 1G (formerly 2C),
  misc_feature (156)..(348): Homolog of NCBI NO: 4505999 NR Description: protein phosphatase 1G (formerly 2C), gamma isoform; protein phosphatase 1G (formerly 2C),; protein
  misc_feature (1)..(120): Homolog of NCBI NO: 27697184 NR Description: Similar to protein phosphatase 1G (formerly 2C),
  misc_feature (1)..(117): Homolog of NCBI NO: 4505999 NR Description: protein phosphatase 1G (formerly 2C), gamma isoform; protein phosphatase 1G (formerly 2C),; protein
  misc_feature (156)..(348): Homolog of NCBI NO: 22219444 NR Description: protein phosphatase 1G (formerly 2C), gamma isoform [Rattus norvegicus] >gi|22087629|gb|AAM90993.1|
  misc_feature (1)..(117): Homolog of NCBI NO: 22219444 NR Description: protein phosphatase 1G (formerly 2C), gamma isoform [Rattus norvegicus] >gi|22087629|gb|AAM90993.1|
  misc_feature (156)..(348): Homolog of NCBI NO: 27807391 NR Description: protein phosphatase 1G (formerly 2C), gamma isoform [Bos taurus] >gi|3122591|sp|P79126|P2CG_BOVIN

SEQ ID NO: 85335 - protein, 327 aa, Arabidopsis thaliana; identical to SEQ ID NO: 28679
  peptide (1)..(327): Ceres Seq. ID no. 12680108
  misc_feature (1)..(294): Pfam Name: Protein phosphatase 2C Pfam Description: Protein phosphatase 2C
  misc_feature (1)..(327): Homolog of NCBI NO: 15224677 NR Description: protein phosphatase 2C (PP2C); protein id: supported by cDNA: 11428., supported by cDNA: gi_15292878, by cDNA: gi_18652942, supported by cDNA: gi_20258908 [Arabidopsis
  misc_feature (1)..(327): Homolog of NCBI NO: 15236548 NR Description: protein phosphatase 2C (PP2C); protein id: supported by cDNA: gi_16209697 [Arabidopsis thaliana]
  misc_feature (1)..(315): Homolog of NCBI NO: 12003990 NR Description: protein phosphatase type-2C [Zea mays]
  misc_feature (106)..(327): Homolog of NCBI NO: 27697184 NR Description: Similar to protein phosphatase 1G (formerly 2C),
  misc_feature (128)..(320): Homolog of NCBI NO: 4505999 NR Description: protein phosphatase 1G (formerly 2C), gamma isoform; protein phosphatase 1G (formerly 2C),; protein
  misc_feature (1)..(92): Homolog of NCBI NO: 27697184 NR Description: Similar to protein phosphatase 1G (formerly 2C),
  misc_feature (1)..(89): Homolog of NCBI NO: 4505999 NR Description: protein phosphatase 1G (formerly 2C), gamma isoform; protein phosphatase 1G (formerly 2C),; protein
  misc_feature (128)..(320): Homolog of NCBI NO: 22219444 NR Description: protein phosphatase 1G (formerly 2C), gamma isoform [Rattus norvegicus] >gi|22087629|gb|AAM90993.1|
  misc_feature (1)..(89): Homolog of NCBI NO: 22219444 NR Description: protein phosphatase 1G (formerly 2C), gamma isoform [Rattus norvegicus] >gi|22087629|gb|AAM90993.1|
  misc_feature (128)..(320): Homolog of NCBI NO: 27807391 NR Description: protein phosphatase 1G (formerly 2C), gamma isoform [Bos taurus] >gi|3122591|sp|P79126|P2CG_BOVIN

SEQ ID NO: 85336 - protein, 320 aa, Arabidopsis thaliana; identical to SEQ ID NO: 28680
  peptide (1)..(320): Ceres Seq. ID no. 12680109
  misc_feature (1)..(287): Pfam Name: Protein phosphatase 2C Pfam Description: Protein phosphatase 2C
  misc_feature (1)..(320): Homolog of NCBI NO: 15224677 NR Description: protein phosphatase 2C (PP2C); protein id: supported by cDNA: 11428., supported by cDNA: gi_15292878, by cDNA: gi_18652942, supported by cDNA: gi_20258908 [Arabidopsis
  misc_feature (1)..(320): Homolog of NCBI NO: 15236548 NR Description: protein phosphatase 2C (PP2C); protein id: supported by cDNA: gi_16209697 [Arabidopsis thaliana]
  misc_feature (1)..(308): Homolog of NCBI NO: 12003990 NR Description: protein phosphatase type-2C [Zea mays]
  misc_feature (99)..(320): Homolog of NCBI NO: 27697184 NR Description: Similar to protein phosphatase 1G (formerly 2C),
  misc_feature (121)..(313): Homolog of NCBI NO: 4505999 NR Description: protein phosphatase 1G (formerly 2C), gamma isoform; protein phosphatase 1G (formerly 2C),; protein
  misc_feature (1)..(85): Homolog of NCBI NO: 27697184 NR Description: Similar to protein phosphatase 1G (formerly 2C),
  misc_feature (1)..(82): Homolog of NCBI NO: 4505999 NR Description: protein phosphatase 1G (formerly 2C), gamma isoform; protein phosphatase 1G (formerly 2C),; protein
  misc_feature (121)..(313): Homolog of NCBI NO: 22219444 NR Description: protein phosphatase 1G (formerly 2C), gamma isoform [Rattus norvegicus] >gi|22087629|gb|AAM90993.1|
  misc_feature (1)..(82): Homolog of NCBI NO: 22219444 NR Description: protein phosphatase 1G (formerly 2C), gamma isoform [Rattus norvegicus] >gi|22087629|gb|AAM90993.1|
  misc_feature (121)..(313): Homolog of NCBI NO: 27807391 NR Description: protein phosphatase 1G (formerly 2C), gamma isoform [Bos taurus] >gi|3122591|sp|P79126|P2CG_BOVIN

SEQ ID NO: 85337 - DNA, 893 bp, Arabidopsis thaliana
  misc_feature (1)..(893): Ceres Seq. ID no. 12680126
  misc_feature: MA Experiment ID: 108435 Result: Down-regulated in Transcription
  misc_feature: MA Experiment 108435 PARAMETER Experiment Name: At_stm_Mutants_cDNA_P Parameter: Plant Line Value: wt Landsburg vs stm
  misc_feature: MA Experiment 108435 PARAMETER Experiment Name: At_stm_Mutants_cDNA_P Parameter: Tissue Value: Shoot Apical Meristem Region
  misc_feature: MA Experiment ID: 108463 Result: Up-regulated in Transcription
  misc_feature: MA Experiment 108463 PARAMETER Experiment Name: At_Germinating_Seeds_cDNA_P Parameter: Age (day) Value: 3 vs. 0
  misc_feature: MA Experiment 108463 PARAMETER Experiment Name: At_Germinating_Seeds_cDNA_P Parameter: Tissue Value: Germinating Seeds
  misc_feature: MA Experiment ID: 108464 Result: Up-regulated in Transcription
  misc_feature: MA Experiment 108464 PARAMETER Experiment Name: At_Germinating_Seeds_cDNA_P Parameter: Age (day) Value: 4 vs. 0
  misc_feature: MA Experiment 108464 PARAMETER Experiment Name: At_Germinating_Seeds_cDNA_P Parameter: Tissue Value: Germinating Seeds
  misc_feature: MA Experiment ID: 108488 Result: Up-regulated in Transcription
  misc_feature: MA Experiment ID: 108577 Result: Up-regulated in Transcription
  misc_feature: MA Experiment 108577 PARAMETER Experiment Name: At_42deg_Heat_cDNA_P Parameter: Temperature (deg C) Value: 42 vs. 22
  misc_feature: MA Experiment 108577 PARAMETER Experiment Name: At_42deg_Heat_cDNA_P Parameter: Timepoint (hr) Value: 6
  misc_feature: MA Experiment 108577 PARAMETER Experiment Name: At_42deg_Heat_cDNA_P Parameter: Tissue Value: Aerial
  misc_feature: MA Experiment ID: 108594 Result: Down-regulated in Transcription
  misc_feature: MA Experiment 108594 PARAMETER Experiment Name: At_Ler-rhl_Root_cDNA_P Parameter: Plant Line Value: null
  misc_feature: MA Experiment ID: 108595 Result: Down-regulated in Transcription
  misc_feature: MA Experiment 108595 PARAMETER Experiment Name: At_Ler-pi_Ovule_cDNA_P Parameter: Plant Line Value: null
  misc_feature: MA Experiment ID: 20000086 Result: Down-regulated in Transcription
  misc_feature: MA Experiment 20000086 PARAMETER Experiment Name: At_100uM_ABA_Mutants_cDNA_P Parameter: Plant Line Value: CS22
  misc_feature: MA Experiment 20000086 PARAMETER Experiment Name: At_100uM_ABA_Mutants_cDNA_P Parameter: Timepoint (hr) Value: 6
  misc_feature: MA Experiment 20000086 PARAMETER Experiment Name: At_100uM_ABA_Mutants_cDNA_P Parameter: Tissue Value: Aerial
  misc_feature: MA Experiment 20000086 PARAMETER Experiment Name: At_100uM_ABA_Mutants_cDNA_P Parameter: Treatment Value: 100uM ABA vs. No Treatment
  misc_feature: MA Experiment ID: 20000087 Result: Down-regulated in Transcription
  misc_feature: MA Experiment 20000087 PARAMETER Experiment Name: At_100uM_ABA_Mutants_cDNA_P Parameter: Plant Line Value: WS
  misc_feature: MA Experiment 20000087 PARAMETER Experiment Name: At_100uM_ABA_Mutants_cDNA_P Parameter: Timepoint (hr) Value: 6
  misc_feature: MA Experiment 20000087 PARAMETER Experiment Name: At_100uM_ABA_Mutants_cDNA_P Parameter: Tissue Value: Aerial
  misc_feature: MA Experiment 20000087 PARAMETER Experiment Name: At_100uM_ABA_Mutants_cDNA_P Parameter: Treatment Value: 100uM ABA vs. No Treatment
  misc_feature: MA Experiment ID: 20000090 Result: Down-regulated in Transcription
  misc_feature: MA Experiment ID: 20000185 Result: Down-regulated in Transcription
  misc_feature: MA Experiment 20000185 PARAMETER Experiment Name: At_Roots__P Parameter: Age (day) Value: 7 vs. 21
  misc_feature: MA Experiment 20000185 PARAMETER Experiment Name: At_Roots__P Parameter: Organism Value: A. thaliana
  misc_feature: MA Experiment 20000185 PARAMETER Experiment Name: At_Roots__P Parameter: Tissue Value: Roots vs. Whole Plant
  misc_feature: MA Experiment ID: 20000227 Result: Down-regulated in Transcription
  misc_feature: MA Experiment 20000227 PARAMETER Experiment Name: At_Root-Tips-vs-Tops_P Parameter: Tissue Value: Root Tips vs. Root Tops
  misc_feature: MA Experiment ID: 20000234 Result: Down-regulated in Transcription
  misc_feature: MA Experiment 20000234 PARAMETER Experiment Name: At_Siliques_P Parameter: Age (day) Value: 21
  misc_feature: MA Experiment 20000234 PARAMETER Experiment Name: At_Siliques_P Parameter: Organism Value: A. thaliana
  misc_feature: MA Experiment 20000234 PARAMETER Experiment Name: At_Siliques_P Parameter: Plant Line Value: WS
  misc_feature: MA Experiment 20000234 PARAMETER Experiment Name: At_Siliques_P Parameter: Tissue Value: Less Than 5mm Siliques vs. Whole Plant
  misc_feature: MA Experiment ID: 20000235 Result: Down-regulated in Transcription
  misc_feature: MA Experiment 20000235 PARAMETER Experiment Name: At_Siliques_P Parameter: Age (day) Value: 21
  misc_feature: MA Experiment 20000235 PARAMETER Experiment Name: At_Siliques_P Parameter: Organism Value: A. thaliana
  misc_feature: MA Experiment 20000235 PARAMETER Experiment Name: At_Siliques_P Parameter: Plant Line Value: WS
  misc_feature: MA Experiment 20000235 PARAMETER Experiment Name: At_Siliques_P Parameter: Tissue Value: 5-10mm Siliques vs. Whole Plant
  misc_feature: MA Experiment ID: 20000286 Result: Down-regulated in Transcription
  misc_feature: MA Experiment 20000286 PARAMETER Experiment Name: At_Open_Flower_P Parameter: Age (day) Value: 21
  misc_feature: MA Experiment 20000286 PARAMETER Experiment Name: At_Open_Flower_P Parameter: Plant Line Value: WS
  misc_feature: MA Experiment 20000286 PARAMETER Experiment Name: At_Open_Flower_P Parameter: Tissue Value: Half Open vs. Whole Plant
  misc_feature: MA Experiment ID: 20000308 Result: Down-regulated in Transcription
  misc_feature: MA Experiment 20000308 PARAMETER Experiment Name: At_100mM_NaCl__P Parameter: Age (day) Value: 17
  misc_feature: MA Experiment 20000308 PARAMETER Experiment Name: At_100mM_NaCl__P Parameter: Organism Value: A. thaliana
  misc_feature: MA Experiment 20000308 PARAMETER Experiment Name: At_100mM_NaCl__P Parameter: Plant Line Value: WS
  misc_feature: MA Experiment 20000308 PARAMETER Experiment Name: At_100mM_NaCl__P Parameter: Timepoint (hr) Value: 72
  misc_feature: MA Experiment 20000308 PARAMETER Experiment Name: At_100mM_NaCl__P Parameter: Tissue Value: Whole Plant
  misc_feature: MA Experiment 20000308 PARAMETER Experiment Name: At_100mM_NaCl__P Parameter: Treatment Value: 100mM NaCl vs. No Treatment
  misc_feature: MA Experiment ID: 20000438 Result: Up-regulated in Transcription
  misc_feature: MA Experiment 20000438 PARAMETER Experiment Name: At_Shoots__P Parameter: Age (day) Value: 14
  misc_feature: MA Experiment 20000438 PARAMETER Experiment Name: At_Shoots__P Parameter: Tissue Value: Shoots vs. Whole Plant
  misc_feature: MA Experiment ID: 20000439 Result: Down-regulated in Transcription
  misc_feature: MA Experiment 20000439 PARAMETER Experiment Name: At_Roots__P Parameter: Age (day) Value: 14 vs. 21
  misc_feature: MA Experiment 20000439 PARAMETER Experiment Name: At_Roots__P Parameter: Organism Value: A. thaliana
  misc_feature: MA Experiment 20000439 PARAMETER Experiment Name: At_Roots__P Parameter: Tissue Value: Roots vs. Whole Plant
  misc_feature: MA Experiment ID: 20000527 Result: Up-regulated in Transcription
  misc_feature: MA Experiment 20000527 PARAMETER Experiment Name: At_10percent_PEG_P Parameter: Age (day) Value: 20
  misc_feature: MA Experiment 20000527 PARAMETER Experiment Name: At_10percent_PEG_P Parameter: Organism Value: A. thaliana
  misc_feature: MA Experiment 20000527 PARAMETER Experiment Name: At_10percent_PEG_P Parameter: Plant Line Value: WS
  misc_feature: MA Experiment 20000527 PARAMETER Experiment Name: At_10percent_PEG_P Parameter: Timepoint (day) Value: 20
  misc_feature: MA Experiment 20000527 PARAMETER Experiment Name: At_10percent_PEG_P Parameter: Tissue Value: Whole Plant
  misc_feature: MA Experiment 20000527 PARAMETER Experiment Name: At_10percent_PEG_P Parameter: Treatment Value: 10percent PEG vs. No Treatment
  misc_feature: MA Experiment ID: 20001247 Result: Up-regulated in Transcription
  misc_feature: MA Experiment 20001247 PARAMETER Experiment Name: At_Far-red-induction_P Parameter: Age (day) Value: 7
  misc_feature: MA Experiment 20001247 PARAMETER Experiment Name: At_Far-red-induction_P Parameter: Light Value: Far-red vs. White
  misc_feature: MA Experiment 20001247 PARAMETER Experiment Name: At_Far-red-induction_P Parameter: Organism Value: A. thaliana
  misc_feature: MA Experiment 20001247 PARAMETER Experiment Name: At_Far-red-induction_P Parameter: Plant Line Value: Columbia
  misc_feature: MA Experiment 20001247 PARAMETER Experiment Name: At_Far-red-induction_P Parameter: Timepoint (hr) Value: 1
  misc_feature: MA Experiment 20001247 PARAMETER Experiment Name: At_Far-red-induction_P Parameter: Tissue Value: Whole Plant
  misc_feature: MA Experiment ID: 20001248 Result: Down-regulated in Transcription
  misc_feature: MA Experiment 20001248 PARAMETER Experiment Name: At_Far-red-induction_P Parameter: Age (day) Value: 7
  misc_feature: MA Experiment 20001248 PARAMETER Experiment Name: At_Far-red-induction_P Parameter: Light Value: Far-red vs. White
  misc_feature: MA Experiment 20001248 PARAMETER Experiment Name: At_Far-red-induction_P Parameter: Organism Value: A. thaliana
  misc_feature: MA Experiment 20001248 PARAMETER Experiment Name: At_Far-red-induction_P Parameter: Plant Line Value: Columbia
  misc_feature: MA Experiment 20001248 PARAMETER Experiment Name: At_Far-red-induction_P Parameter: Timepoint (hr) Value: 4
  misc_feature: MA Experiment 20001248 PARAMETER Experiment Name: At_Far-red-induction_P Parameter: Tissue Value: Whole Plant
  misc_feature: MA Experiment ID: 20001556 Result: Down-regulated in Transcription
  misc_feature: MA Experiment 20001556 PARAMETER Experiment Name: At_Drought_Soil_Dry_P Parameter: Age (day) Value: 26
  misc_feature: MA Experiment 20001556 PARAMETER Experiment Name: At_Drought_Soil_Dry_P Parameter: Organism Value: A. thaliana
  misc_feature: MA Experiment 20001556 PARAMETER Experiment Name: At_Drought_Soil_Dry_P Parameter: Plant Line Value: WS
  misc_feature: MA Experiment 20001556 PARAMETER Experiment Name: At_Drought_Soil_Dry_P Parameter: Post Timepoint (hr) Value: None
  misc_feature: MA Experiment 20001556 PARAMETER Experiment Name: At_Drought_Soil_Dry_P Parameter: Post-Treatment Value: None
  misc_feature: MA Experiment 20001556 PARAMETER Experiment Name: At_Drought_Soil_Dry_P Parameter: Timepoint (day) Value: 12
  misc_feature: MA Experiment 20001556 PARAMETER Experiment Name: At_Drought_Soil_Dry_P Parameter: Treatment Value: Drought vs. No Drought
  misc_feature: MA Experiment ID: 20001557 Result: Down-regulated in Transcription
  misc_feature: MA Experiment 20001557 PARAMETER Experiment Name: At_Drought_Soil_Dry_P Parameter: Age (day) Value: 27
  misc_feature: MA Experiment 20001557 PARAMETER Experiment Name: At_Drought_Soil_Dry_P Parameter: Organism Value: A. thaliana
  misc_feature: MA Experiment 20001557 PARAMETER Experiment Name: At_Drought_Soil_Dry_P Parameter: Plant Line Value: WS
  misc_feature: MA Experiment 20001557 PARAMETER Experiment Name: At_Drought_Soil_Dry_P Parameter: Post Timepoint (hr) Value: 3
  misc_feature: MA Experiment 20001557 PARAMETER Experiment Name: At_Drought_Soil_Dry_P Parameter: Post-Treatment Value: Re-Water vs. No Drought
  misc_feature: MA Experiment 20001557 PARAMETER Experiment Name: At_Drought_Soil_Dry_P Parameter: Timepoint (day) Value: 13
  misc_feature: MA Experiment 20001557 PARAMETER Experiment Name: At_Drought_Soil_Dry_P Parameter: Treatment Value: Drought vs. No Drought
  misc_feature: MA Experiment ID: 20001558 Result: Down-regulated in Transcription
  misc_feature: MA Experiment 20001558 PARAMETER Experiment Name: At_Drought_Soil_Dry_P Parameter: Age (day) Value: 27
  misc_feature: MA Experiment 20001558 PARAMETER Experiment Name: At_Drought_Soil_Dry_P Parameter: Organism Value: A. thaliana
  misc_feature: MA Experiment 20001558 PARAMETER Experiment Name: At_Drought_Soil_Dry_P Parameter: Plant Line Value: WS
  misc_feature: MA Experiment 20001558 PARAMETER Experiment Name: At_Drought_Soil_Dry_P Parameter: Post Timepoint (hr) Value: 6
  misc_feature: MA Experiment 20001558 PARAMETER Experiment Name: At_Drought_Soil_Dry_P Parameter: Post-Treatment Value: Re-Water vs. No Drought
  misc_feature: MA Experiment 20001558 PARAMETER Experiment Name: At_Drought_Soil_Dry_P Parameter: Timepoint (day) Value: 13
  misc_feature: MA Experiment 20001558 PARAMETER Experiment Name: At_Drought_Soil_Dry_P Parameter: Treatment Value: Drought vs. No Drought
  misc_feature: MA Experiment ID: 20001559 Result: Down-regulated in Transcription
  misc_feature: MA Experiment 20001559 PARAMETER Experiment Name: At_Drought_Soil_Dry_P Parameter: Age (day) Value: 28
  misc_feature: MA Experiment 20001559 PARAMETER Experiment Name: At_Drought_Soil_Dry_P Parameter: Organism Value: A. thaliana
  misc_feature: MA Experiment 20001559 PARAMETER Experiment Name: At_Drought_Soil_Dry_P Parameter: Plant Line Value: WS
  misc_feature: MA Experiment 20001559 PARAMETER Experiment Name: At_Drought_Soil_Dry_P Parameter: Post Timepoint (hr) Value: 29
  misc_feature: MA Experiment 20001559 PARAMETER Experiment Name: At_Drought_Soil_Dry_P Parameter: Post-Treatment Value: Re-Water vs. No Drought
  misc_feature: MA Experiment 20001559 PARAMETER Experiment Name: At_Drought_Soil_Dry_P Parameter: Timepoint (day) Value: 14
  misc_feature: MA Experiment 20001559 PARAMETER Experiment Name: At_Drought_Soil_Dry_P Parameter: Treatment Value: Drought vs. No Drought
  misc_feature: MA Experiment ID: 20001560 Result: Down-regulated in Transcription
  misc_feature: MA Experiment 20001560 PARAMETER Experiment Name: At_Drought_Soil_Dry_P Parameter: Age (day) Value: 28
  misc_feature: MA Experiment 20001560 PARAMETER Experiment Name: At_Drought_Soil_Dry_P Parameter: Organism Value: A. thaliana
  misc_feature: MA Experiment 20001560 PARAMETER Experiment Name: At_Drought_Soil_Dry_P Parameter: Plant Line Value: WS
  misc_feature: MA Experiment 20001560 PARAMETER Experiment Name: At_Drought_Soil_Dry_P Parameter: Post Timepoint (hr) Value: None
  misc_feature: MA Experiment 20001560 PARAMETER Experiment Name: At_Drought_Soil_Dry_P Parameter: Post-Treatment Value: None
  misc_feature: MA Experiment 20001560 PARAMETER Experiment Name: At_Drought_Soil_Dry_P Parameter: Timepoint (day) Value: 14
  misc_feature: MA Experiment 20001560 PARAMETER Experiment Name: At_Drought_Soil_Dry_P Parameter: Treatment Value: Drought vs. No Drought
  misc_feature: MA Experiment ID: 20001757 Result: Up-regulated in Transcription
  misc_feature: MA Experiment 20001757 PARAMETER Experiment Name: At_50mM_NH4NO3_L-to-H_P Parameter: Timepoint (hr) Value: 6
  misc_feature: MA Experiment 20001757 PARAMETER Experiment Name: At_50mM_NH4NO3_L-to-H_P Parameter: Tissue Value: Leaf
  misc_feature: MA Experiment 20001757 PARAMETER Experiment Name: At_50mM_NH4NO3_L-to-H_P Parameter: Treatment Value: 50mM NH4NO3 vs 100mM Mannitol
  misc_feature: MA Experiment ID: 20001904 Result: Down-regulated in Transcription
  misc_feature: MA Experiment 20001904 PARAMETER Experiment Name: At_Drought_Reproduction_P Parameter: Age (day) Value: 37
  misc_feature: MA Experiment 20001904 PARAMETER Experiment Name: At_Drought_Reproduction_P Parameter: Organism Value: A. thaliana
  misc_feature: MA Experiment 20001904 PARAMETER Experiment Name: At_Drought_Reproduction_P Parameter: Plant Line Value: WS
  misc_feature: MA Experiment 20001904 PARAMETER Experiment Name: At_Drought_Reproduction_P Parameter: Timepoint (day) Value: 7
  misc_feature: MA Experiment 20001904 PARAMETER Experiment Name: At_Drought_Reproduction_P Parameter: Tissue Value: Rosettes
  misc_feature: MA Experiment 20001904 PARAMETER Experiment Name: At_Drought_Reproduction_P Parameter: Treatment Value: Drought vs. No Drought
  misc_feature: MA Experiment ID: 20001905 Result: Down-regulated in Transcription
  misc_feature: MA Experiment 20001905 PARAMETER Experiment Name: At_Drought_Reproduction_P Parameter: Age (day) Value: 40
  misc_feature: MA Experiment 20001905 PARAMETER Experiment Name: At_Drought_Reproduction_P Parameter: Organism Value: A. thaliana
  misc_feature: MA Experiment 20001905 PARAMETER Experiment Name: At_Drought_Reproduction_P Parameter: Plant Line Value: WS
  misc_feature: MA Experiment 20001905 PARAMETER Experiment Name: At_Drought_Reproduction_P Parameter: Timepoint (day) Value: 10
  misc_feature: MA Experiment 20001905 PARAMETER Experiment Name: At_Drought_Reproduction_P Parameter: Tissue Value: Rosettes
  misc_feature: MA Experiment 20001905 PARAMETER Experiment Name: At_Drought_Reproduction_P Parameter: Treatment Value: Drought vs. No Drought
gacgaacataaactcgtctccggtaaccaaaaatggtttccatgactacttcatcttcttcgtacggaacattctctacagtcgtcaacagttctagacctaattcctcagcaacctttctcgtcccttccttgaaattctccaccggaatatcgaatttcgcgaatctgagtaatgggttttctctaaaatctccaattaatcctgggtttctcttcaagtctcgtcctttcactgtccaagctagagctgctgcagaaaaaaccgttcacgatttcaccgttaaggacattgatgggaaggatgttgctttgaacaaattcaaggggaaagttatgttgattgtcaatgttgcttcaagatgtggtttgacatcatcaaattactcagagctttcacatctgtacgagaaatacaaaactcaaggatttgagattctagcttttccctgcaatcagtttggtttccaagagcccgggtcaaactccgagatcaaacaattcgcttgcacccggtttaaagcagagttccctatatttgataaggttgacgtgaatggaccaagcacagcgccgatctacgagttcttgaaatcaaacgcaggaggattcttgggtggtctcattaaatggaactttgagaagttcttgattgataaaaagggaaaggtcgttgagaggtaccctcccaccacatcccctttccaaatcgagaaagacatccagaagttgcttgccgcttaaaaacttttgctcatgagtgagcatatagagactgatggttaaagtaaccgtaaattgtgacataaagtttccggttattgcttgtataccttcttacattctaagttgtactaatcgcttaataatttgcgtataatggtaatgttatat

SEQ ID NO: 85338 - protein, 236 aa, Arabidopsis thaliana [sequence omitted]

SEQ ID NO: 85339 - protein, 233 aa, Arabidopsis thaliana
  peptide (1)..(233): Ceres Seq. ID no. 12680128
  misc_feature (75)..(184): Pfam Name: Glutathione peroxidase Pfam Description: Glutathione peroxidase
  misc_feature (1)..(233): Homolog of NCBI NO: 15224678 NR Description: glutathione peroxidase, putative; protein id: supported by cDNA: gi_14334959, supported by cDNA: gi_17104618 thaliana] >gi|20141398|sp|P52032|GSHY_ARATH Phospholipid
  misc_feature (1)..(232): Homolog of NCBI NO: 2129599 NR Description: glutathione peroxidase (EC 1.11.1.9) precursor - thaliana >gi|1061036|emb|CAA61965.1| glutathione peroxidase
  misc_feature (7)..(233): Homolog of NCBI NO: 22329066 NR Description: glutathione peroxidase, putative; protein id:
  misc_feature (7)..(230): Homolog of NCBI NO: 7433114 NR Description: glutathione peroxidase (EC 1.11.1.9) F11C18.70 -
  misc_feature (4)..(233): Homolog of NCBI NO: 20147455 NR Description: glutathione peroxidase [Brassica napus]
  misc_feature (4)..(233): Homolog of NCBI NO: 40388501 NR Description: GPx [Brassica oleracea var. botrytis]
  misc_feature (19)..(233): Homolog of NCBI NO: 2982362 NR Description: glutathione peroxidase [Zantedeschia aethiopica]
  misc_feature (1)..(233): Homolog of NCBI NO: 20138099 NR Description: Phospholipid hydroperoxide glutathione chloroplast precursor (PHGPx) >gi|7433115|pir||T06462 glutathione
  misc_feature (68)..(233): Homolog of NCBI NO: 21360380 NR Description: glutathione peroxidase 1 [Oryza sativa]
  misc_feature (18)..(233): Homolog of NCBI NO: 6179600 NR Description: GPX12Hv, glutathione peroxidase-like protein
MTTSSSSYGTFSTVVNSSRPNSSATFLVPSLKFSTGISNFANLSNGFSLKSPINPGFLFKSRPFTVQARAAAEKTVHDFTVKDIDGKDVALNKFKGKVMLIVNVASRCGLTSSNYSELSHLYEKYKTQGFEILAFPCNQFGFQEPGSNSEIKQFACTRFKAEFPIFDKVDVNGPSTAPIYEFLKSNAGGFLGGLIKWNFEKFLIDKKGKVVERYPPTTSPFQIEKDIQKLLAA

SEQ ID NO: 85340 - protein, 135 aa, Arabidopsis thaliana; identical to SEQ ID NO: 29401
  peptide (1)..(135): Ceres Seq. ID no. 12680129
  misc_feature (1)..(86): Pfam Name: Glutathione peroxidase Pfam Description: Glutathione peroxidase
  misc_feature (1)..(135): Homolog of NCBI NO: 15224678 NR Description: glutathione peroxidase, putative; protein id: supported by cDNA: gi_14334959, supported by cDNA: gi_17104618 thaliana] >gi|20141398|sp|P52032|GSHY_ARATH Phospholipid
  misc_feature (1)..(134): Homolog of NCBI NO: 2129599 NR Description: glutathione peroxidase (EC 1.11.1.9) precursor - thaliana >gi|1061036|emb|CAA61965.1| glutathione peroxidase
  misc_feature (1)..(135): Homolog of NCBI NO: 22329066 NR Description: glutathione peroxidase, putative; protein id:
  misc_feature (1)..(132): Homolog of NCBI NO: 7433114 NR Description: glutathione peroxidase (EC 1.11.1.9) F11C18.70 -
  misc_feature (1)..(135): Homolog of NCBI NO: 20147455 NR Description: glutathione peroxidase [Brassica napus]
  misc_feature (1)..(135): Homolog of NCBI NO: 40388501 NR Description: GPx [Brassica oleracea var. botrytis]
  misc_feature (1)..(135): Homolog of NCBI NO: 2982362 NR Description: glutathione peroxidase [Zantedeschia aethiopica]
  misc_feature (1)..(135): Homolog of NCBI NO: 20138099 NR Description: Phospholipid hydroperoxide glutathione chloroplast precursor (PHGPx) >gi|7433115|pir||T06462 glutathione
  misc_feature (1)..(135): Homolog of NCBI NO: 21360380 NR Description: glutathione peroxidase 1 [Oryza sativa]
  misc_feature (1)..(135): Homolog of NCBI NO: 6179600 NR Description: GPX12Hv, glutathione peroxidase-like protein

SEQ ID NO: 85341 - DNA, 2722 bp, Arabidopsis thaliana
  misc_feature (1)..(2722): Ceres Seq. ID no. 12680130
  misc_feature: MA Experiment ID: 20000173 Result: Up-regulated in Transcription
  misc_feature: MA Experiment 20000173 PARAMETER Experiment Name: At_42deg_Heat_P Parameter: Age (day) Value: 14
  misc_feature: MA Experiment 20000173 PARAMETER Experiment Name: At_42deg_Heat_P Parameter: Organism Value: A. thaliana
  misc_feature: MA Experiment 20000173 PARAMETER Experiment Name: At_42deg_Heat_P Parameter: Plant Line Value: WS
  misc_feature: MA Experiment 20000173 PARAMETER Experiment Name: At_42deg_Heat_P Parameter: Temperature (deg C) Value: 42 vs. 22
  misc_feature: MA Experiment 20000173 PARAMETER Experiment Name: At_42deg_Heat_P Parameter: Timepoint (hr) Value: 6
  misc_feature: MA Experiment 20000173 PARAMETER Experiment Name: At_42deg_Heat_P Parameter: Tissue Value: Aerial
  misc_feature: MA Experiment ID: 20000268 Result: Up-regulated in Transcription
  misc_feature: MA Experiment 20000268 PARAMETER Experiment Name: At_100mM_NaCl__P Parameter: Age (day) Value: 14
  misc_feature: MA Experiment 20000268 PARAMETER Experiment Name: At_100mM_NaCl__P Parameter: Organism Value: A. thaliana
  misc_feature: MA Experiment 20000268 PARAMETER Experiment Name: At_100mM_NaCl__P Parameter: Plant Line Value: WS
  misc_feature: MA Experiment 20000268 PARAMETER Experiment Name: At_100mM_NaCl__P Parameter: Timepoint (hr) Value: 6
  misc_feature: MA Experiment 20000268 PARAMETER Experiment Name: At_100mM_NaCl__P Parameter: Tissue Value: Whole Plant
  misc_feature: MA Experiment 20000268 PARAMETER Experiment Name: At_100mM_NaCl__P Parameter: Treatment Value: 100mM NaCl vs. No Treatment
  misc_feature: MA Experiment ID: 20000436 Result: Up-regulated in Transcription
  misc_feature: MA Experiment 20000436 PARAMETER Experiment Name: At_Drought_P Parameter: Age (day) Value: 7
  misc_feature: MA Experiment 20000436 PARAMETER Experiment Name: At_Drought_P Parameter: Organism Value: A. thaliana
  misc_feature: MA Experiment 20000436 PARAMETER Experiment Name: At_Drought_P Parameter: Plant Line Value: WS
  misc_feature: MA Experiment 20000436 PARAMETER Experiment Name: At_Drought_P Parameter: Timepoint (hr) Value: 12
  misc_feature: MA Experiment 20000436 PARAMETER Experiment Name: At_Drought_P Parameter: Tissue Value: Whole Plant
  misc_feature: MA Experiment 20000436 PARAMETER Experiment Name: At_Drought_P Parameter: Treatment Value: Drought vs. No Drought
  misc_feature: MA Experiment ID: 20000437 Result: Up-regulated in Transcription
  misc_feature: MA Experiment 20000437 PARAMETER Experiment Name: At_Drought_P Parameter: Age (day) Value: 8
  misc_feature: MA Experiment 20000437 PARAMETER Experiment Name: At_Drought_P Parameter: Organism Value: A. thaliana
  misc_feature: MA Experiment 20000437 PARAMETER Experiment Name: At_Drought_P Parameter: Plant Line Value: WS
  misc_feature: MA Experiment 20000437 PARAMETER Experiment Name: At_Drought_P Parameter: Timepoint (hr) Value: 24
  misc_feature: MA Experiment 20000437 PARAMETER Experiment Name: At_Drought_P Parameter: Tissue Value: Whole Plant
  misc_feature: MA Experiment 20000437 PARAMETER Experiment Name: At_Drought_P Parameter: Treatment Value: Drought vs. No Drought
  misc_feature: MA Experiment ID: 20001557 Result: Up-regulated in Transcription
  misc_feature: MA Experiment 20001557 PARAMETER Experiment Name: At_Drought_Soil_Dry_P Parameter: Age (day) Value: 27
  misc_feature: MA Experiment 20001557 PARAMETER Experiment Name: At_Drought_Soil_Dry_P Parameter: Organism Value: A. thaliana
  misc_feature: MA Experiment 20001557 PARAMETER Experiment Name: At_Drought_Soil_Dry_P Parameter: Plant Line Value: WS
  misc_feature: MA Experiment 20001557 PARAMETER Experiment Name: At_Drought_Soil_Dry_P Parameter: Post Timepoint (hr) Value: 3
  misc_feature: MA Experiment 20001557 PARAMETER Experiment Name: At_Drought_Soil_Dry_P Parameter: Post-Treatment Value: Re-Water vs. No Drought
  misc_feature: MA Experiment 20001557 PARAMETER Experiment Name: At_Drought_Soil_Dry_P Parameter: Timepoint (day) Value: 13
  misc_feature: MA Experiment 20001557 PARAMETER Experiment Name: At_Drought_Soil_Dry_P Parameter: Treatment Value: Drought vs. No Drought
  misc_feature: MA Experiment ID: 20001558 Result: Up-regulated in Transcription
  misc_feature: MA Experiment 20001558 PARAMETER Experiment Name: At_Drought_Soil_Dry_P Parameter: Age (day) Value: 27
  misc_feature: MA Experiment 20001558 PARAMETER Experiment Name: At_Drought_Soil_Dry_P Parameter: Organism Value: A. thaliana
  misc_feature: MA Experiment 20001558 PARAMETER Experiment Name: At_Drought_Soil_Dry_P Parameter: Plant Line Value: WS
  misc_feature: MA Experiment 20001558 PARAMETER Experiment Name: At_Drought_Soil_Dry_P Parameter: Post Timepoint (hr) Value: 6
  misc_feature: MA Experiment 20001558 PARAMETER Experiment Name: At_Drought_Soil_Dry_P Parameter: Post-Treatment Value: Re-Water vs. No Drought
  misc_feature: MA Experiment 20001558 PARAMETER Experiment Name: At_Drought_Soil_Dry_P Parameter: Timepoint (day) Value: 13
  misc_feature: MA Experiment 20001558 PARAMETER Experiment Name: At_Drought_Soil_Dry_P Parameter: Treatment Value: Drought vs. No Drought
  misc_feature: MA Experiment ID: 20001560 Result: Up-regulated in Transcription
  misc_feature: MA Experiment 20001560 PARAMETER Experiment Name: At_Drought_Soil_Dry_P Parameter: Age (day) Value: 28
  misc_feature: MA Experiment 20001560 PARAMETER Experiment Name: At_Drought_Soil_Dry_P Parameter: Organism Value: A. thaliana
  misc_feature: MA Experiment 20001560 PARAMETER Experiment Name: At_Drought_Soil_Dry_P Parameter: Plant Line Value: WS
  misc_feature: MA Experiment 20001560 PARAMETER Experiment Name: At_Drought_Soil_Dry_P Parameter: Post Timepoint (hr) Value: None
  misc_feature: MA Experiment 20001560 PARAMETER Experiment Name: At_Drought_Soil_Dry_P Parameter: Post-Treatment Value: None
  misc_feature: MA Experiment 20001560 PARAMETER Experiment Name: At_Drought_Soil_Dry_P Parameter: Timepoint (day) Value: 14
  misc_feature: MA Experiment 20001560 PARAMETER Experiment Name: At_Drought_Soil_Dry_P Parameter: Treatment Value: Drought vs. No Drought
  misc_feature: MA Experiment ID: 20001904 Result: Up-regulated in Transcription
  misc_feature: MA Experiment 20001904 PARAMETER Experiment Name: At_Drought_Reproduction_P Parameter: Age (day) Value: 37
  misc_feature: MA Experiment 20001904 PARAMETER Experiment Name: At_Drought_Reproduction_P Parameter: Organism Value: A. thaliana
  misc_feature: MA Experiment 20001904 PARAMETER Experiment Name: At_Drought_Reproduction_P Parameter: Plant Line Value: WS
  misc_feature: MA Experiment 20001904 PARAMETER Experiment Name: At_Drought_Reproduction_P Parameter: Timepoint (day) Value: 7
  misc_feature: MA Experiment 20001904 PARAMETER Experiment Name: At_Drought_Reproduction_P Parameter: Tissue Value: Rosettes
  misc_feature: MA Experiment 20001904 PARAMETER Experiment Name: At_Drought_Reproduction_P Parameter: Treatment Value: Drought vs. No Drought
  misc_feature: MA Experiment ID: 20001905 Result: Up-regulated in Transcription
  misc_feature: MA Experiment 20001905 PARAMETER Experiment Name: At_Drought_Reproduction_P Parameter: Age (day) Value: 40
  misc_feature: MA Experiment 20001905 PARAMETER Experiment Name: At_Drought_Reproduction_P Parameter: Organism Value: A. thaliana
  misc_feature: MA Experiment 20001905 PARAMETER Experiment Name: At_Drought_Reproduction_P Parameter: Plant Line Value: WS
  misc_feature: MA Experiment 20001905 PARAMETER Experiment Name: At_Drought_Reproduction_P Parameter: Timepoint (day) Value: 10
  misc_feature: MA Experiment 20001905 PARAMETER Experiment Name: At_Drought_Reproduction_P Parameter: Tissue Value: Rosettes
  misc_feature: MA Experiment 20001905 PARAMETER Experiment Name: At_Drought_Reproduction_P Parameter: Treatment Value: Drought vs. No Drought
  misc_feature: MA Experiment ID: 20001911 Result: Up-regulated in Transcription
  misc_feature: MA Experiment 20001911 PARAMETER Experiment Name: At_Drought_Reproduction_P Parameter: Age (day) Value: 40
  misc_feature: MA Experiment 20001911 PARAMETER Experiment Name: At_Drought_Reproduction_P Parameter: Organism Value: A. thaliana
  misc_feature: MA Experiment 20001911 PARAMETER Experiment Name: At_Drought_Reproduction_P Parameter: Plant Line Value: WS
  misc_feature: MA Experiment 20001911 PARAMETER Experiment Name: At_Drought_Reproduction_P Parameter: Timepoint (day) Value: 10
  misc_feature: MA Experiment 20001911 PARAMETER Experiment Name: At_Drought_Reproduction_P Parameter: Tissue Value: Flowers
  misc_feature: MA Experiment 20001911 PARAMETER Experiment Name: At_Drought_Reproduction_P Parameter: Treatment Value: Drought vs. No Drought
ctccgccggcgaacagttttattatctctctctttctgcgtgttccaatttcttccacaaaaccctaattttctcttaaaccctgaaattcgtgtaacctttcaacaatctcttcaattttgttttcgattctgaatccattgtttacgaatctctcatctaaagctacattcttcgttaaatcgtttttaatcgactcgctcactcgtgagttgactcgtcagctgtttccataattgcttattgaatttttatacgatgatgtttcaatatggaagaaactagaggaatttctgatccagagaatgggagttcgagttacggcggtaaaccgccgaatccactctccttctcttcttcctccgccgctgctgccgtttacaggcaaaccttcgacggcgagcgatcgttggcgccgtgtaataagaggtcactggttcgacactcatctctcgtgaagacaatggtgtcagatatatctgttgagaatgagtttactatagagaagaacaagtctgagtttgttcctgctacgcgttctggagcttggtctgatattggctccaggtcaagcatggaagatgcttatctatgcgttgataatttcatggatagctttggccttctgaattctgaggctggtccaagtgccttctatggggtatttgatggacatggtgggaagcatgccgctgagtttgcatgtcaccatataccgaggtacattgttgaagatcaagagtttcctagtgaaatcaataaggtgttatcttcagcatttcttcaaacagacactgccttcttagaggcgtgttcattggatgggagccttgcttcaggaactactgctttggcagctattctttttggaaggtcgttggtggtagcaaacgctggagattgcagagcagtcttatcccgtcagggaaaagccattgaaatgtcaagagaccacaaacccatgagcagtaaggaaaggagacgcattgaagcatcgggtggacatgtattcgatggctatctaaatggacaacttaatgtggctcgagcgctaggtgactttcatatggaaggcatgaagaagaagaaagatggttctgattgtggacctctaattgcagagcctgagctcatgacaacaaaactaacagaagaggatgagttccttataattgggtgtgacggggtttgggatgtgttcatgagccagaatgctgtagattttgccagaaggagactacaggagcacaatgacccggtcatgtgtagtaaggagctggttgaggaagctttgaagaggaagagtgctgataatgtgacggcagtggttgtgtgtcttcagccacagccaccaccgaacttggtagcgccgaggttgagagttcacagaagcttctcggcggagggtttaaaagatttacagagctacttggatggcttgggaaactaattgggggacatgaggatggtgacgaatgattgatttctctgtttttgttttgtcttttcttacaattttatagtttggggtttggaggttttgttctgttaaattctcgcaatttgagtaagttataacatgaggcggcatacaataatttattgtttggtaggatatatttttttgtcacttttgcataataataattctgcttcagtctcatttgttttgtaactagaaagttattccaattcctgcgtttaccgaatatgttgtgttcttgcagaatgacgtatgttagatatgcagtaaactcgagggtcggctttgaccacatcgccacttatcggtttgcggatgctggaaaagtcagtctagtgatgaggctgagtgagccatcgtcagttactattttatcgtgaaactctgaacaacgagattgtcccggatattcaaatgaggaacaaggcccaatagtccgatcaaagtgggctattcgtatcgcttacgaggcctatacgatggtaattgaattcacgcgcattcatcagcgcgtgatttggagttgctcaatttcagatcgcacaggctctgttaatcatctcctcctccgaaagacagagaaagagacaaatcaaattcattcatatcaaagagatagagagaaaatgtccggtgtggctattcatgcgagttcatggggcgcggctctggtgagaatctccccgtacactttctccgccatcggaatcgccatctccatcggcgtctctgttcttggtgctgcctggggaatttacattaccggaagtagtttgatcggtgccgccattgaagctcctcgaatcacttccaagaatctcatcagtgtaatcttctgtgaagccgtggctatatacggtgttattgtggcaatcatattacaaacgaagttggagagtgtaccatcatcaaagatgtatgatgctgagtctctaagagctggatatgcaatctttgcttctggaatcattgttggattcgcaaaccttgtatgcgggttatgtgtaggaatcattggaagcagttgcgcattgtctgatgctcagaactcgacgctctttgttaagattcttgtgattgagatctttgggagtgctctcgggttatttggagttatcgttgggattattatgtcagctcaagctacatggcctacaaaatagagatatataaactggtaacttatggacttgtactctatagtctatacattctatgatctatttttcaaagttccgg

SEQ ID NO: 85342 - protein, 392 aa, Arabidopsis thaliana; identical to SEQ ID NO: 28597
  peptide (1)..(392): Ceres Seq. ID no. 12680131
  misc_feature (88)..(349): Pfam Name: Protein phosphatase 2C Pfam Description: Protein phosphatase 2C
  misc_feature (1)..(392): Homolog of NCBI NO: 15224766 NR Description: protein phosphatase 2C (PP2C); protein id: supported by cDNA: gi_12642917, supported by cDNA: gi_14517519, by cDNA: gi_16323271 [Arabidopsis thaliana]
  misc_feature (11)..(390): Homolog of NCBI NO: 20146108 NR Description: protein phosphatase 2C [Mesembryanthemum
  misc_feature (54)..(389): Homolog of NCBI NO: 21693562 NR Description: DNA-binding protein phosphatase 2C [Nicotiana
  misc_feature (57)..(388): Homolog of NCBI NO: 10140768 NR Description: putative protein phosphatase-2C [Oryza sativa]
  misc_feature (84)..(388): Homolog of NCBI NO: 37536524 NR Description: putative protein phosphatase-2C [Oryza sativa
  misc_feature (78)..(387): Homolog of NCBI NO: 24413992 NR Description: putative DNA-binding protein phosphatase 2C
  misc_feature (27)..(389): Homolog of NCBI NO: 15226152 NR Description: protein phosphatase 2C (PP2C); protein id: supported by cDNA: gi_17979441, supported by cDNA: gi_20259092
  misc_feature (49)..(390): Homolog of NCBI NO: 15230495 NR Description: protein phosphatase 2C (PP2C); protein id:
  misc_feature (60)..(389): Homolog of NCBI NO: 30695577 NR Description: protein phosphatase 2C (PP2C), putative
  misc_feature (83)..(388): Homolog of NCBI NO: 34894410 NR Description: putative protein phosphatase [Oryza sativa

SEQ ID NO: 85343 - protein, 328 aa, Arabidopsis thaliana; identical to SEQ ID NO: 28598
  peptide (1)..(328): Ceres Seq. ID no. 12680132
  misc_feature (24)..(285): Pfam Name: Protein phosphatase 2C Pfam Description: Protein phosphatase 2C
  misc_feature (1)..(328): Homolog of NCBI NO: 15224766 NR Description: protein phosphatase 2C (PP2C); protein id: supported by cDNA: gi_12642917, supported by cDNA: gi_14517519, by cDNA: gi_16323271 [Arabidopsis thaliana]
  misc_feature (1)..(326): Homolog of NCBI NO: 20146108 NR Description: protein phosphatase 2C [Mesembryanthemum
  misc_feature (1)..(325): Homolog of NCBI NO: 21693562 NR Description: DNA-binding protein phosphatase 2C [Nicotiana
  misc_feature (1)..(324): Homolog of NCBI NO: 10140768 NR Description: putative protein phosphatase-2C [Oryza sativa]
  misc_feature (20)..(324): Homolog of NCBI NO: 37536524 NR Description: putative protein phosphatase-2C [Oryza sativa
  misc_feature (14)..(323): Homolog of NCBI NO: 24413992 NR Description: putative DNA-binding protein phosphatase 2C
  misc_feature (1)..(325): Homolog of NCBI NO: 15226152 NR Description: protein phosphatase 2C (PP2C); protein id: supported by cDNA: gi_17979441, supported by cDNA: gi_20259092
  misc_feature (1)..(326): Homolog of NCBI NO: 15230495 NR Description: protein phosphatase 2C (PP2C); protein id:
  misc_feature (1)..(325): Homolog of NCBI NO: 30695577 NR Description: protein phosphatase 2C (PP2C), putative
  misc_feature (19)..(324): Homolog of NCBI NO: 34894410 NR Description: putative protein phosphatase [Oryza sativa

SEQ ID NO: 85344 - protein, 291 aa, Arabidopsis thaliana; identical to SEQ ID NO: 28599
  peptide (1)..(291): Ceres Seq. ID no. 12680133
  misc_feature (1)..(248): Pfam Name: Protein phosphatase 2C Pfam Description: Protein phosphatase 2C
  misc_feature (1)..(291): Homolog of NCBI NO: 15224766 NR Description: protein phosphatase 2C (PP2C); protein id: supported by cDNA: gi_12642917, supported by cDNA: gi_14517519, by cDNA: gi_16323271 [Arabidopsis thaliana]
  misc_feature (1)..(289): Homolog of NCBI NO: 20146108 NR Description: protein phosphatase 2C [Mesembryanthemum
  misc_feature (1)..(288): Homolog of NCBI NO: 21693562 NR Description: DNA-binding protein phosphatase 2C [Nicotiana
  misc_feature (1)..(287): Homolog of NCBI NO: 10140768 NR Description: putative protein phosphatase-2C [Oryza sativa]
  misc_feature (1)..(287): Homolog of NCBI NO: 37536524 NR Description: putative protein phosphatase-2C [Oryza sativa
  misc_feature (1)..(286): Homolog of NCBI NO: 24413992 NR Description: putative DNA-binding protein phosphatase 2C
  misc_feature (1)..(288): Homolog of NCBI NO: 15226152 NR Description: protein phosphatase 2C (PP2C); protein id: supported by cDNA: gi_17979441, supported by cDNA: gi_20259092
  misc_feature (1)..(289): Homolog of NCBI NO: 15230495 NR Description: protein phosphatase 2C (PP2C); protein id:
  misc_feature (1)..(288): Homolog of NCBI NO: 30695577 NR Description: protein phosphatase 2C (PP2C), putative
  misc_feature (1)..(287): Homolog of NCBI NO: 34894410 NR Description: putative protein phosphatase [Oryza sativa

SEQ ID NO: 85345 - DNA, 1550 bp, Arabidopsis thaliana
  misc_feature (1)..(1550): Ceres Seq. ID no. 12680150
  misc_feature: MA Experiment ID: 20000184 Result: Up-regulated in Transcription
  misc_feature: MA Experiment 20000184 PARAMETER Experiment Name: At_Shoots__P Parameter: Age (day) Value: 7
  misc_feature: MA Experiment 20000184 PARAMETER Experiment Name: At_Shoots__P Parameter: Tissue Value: Shoots vs. Whole Plant
  misc_feature: MA Experiment ID: 20000185 Result: Up-regulated in Transcription
  misc_feature: MA Experiment 20000185 PARAMETER Experiment Name: At_Roots__P Parameter: Age (day) Value: 7 vs. 21
  misc_feature: MA Experiment 20000185 PARAMETER Experiment Name: At_Roots__P Parameter: Organism Value: A. thaliana
  misc_feature: MA Experiment 20000185 PARAMETER Experiment Name: At_Roots__P Parameter: Tissue Value: Roots vs. Whole Plant
  misc_feature: MA Experiment ID: 20000438 Result: Up-regulated in Transcription
  misc_feature: MA Experiment 20000438 PARAMETER Experiment Name: At_Shoots__P Parameter: Age (day) Value: 14
  misc_feature: MA Experiment 20000438 PARAMETER Experiment Name: At_Shoots__P Parameter: Tissue Value: Shoots vs. Whole Plant
  misc_feature: MA Experiment ID: 20000439 Result: Up-regulated in Transcription
  misc_feature: MA Experiment 20000439 PARAMETER Experiment Name: At_Roots__P Parameter: Age (day) Value: 14 vs. 21
  misc_feature: MA Experiment 20000439 PARAMETER Experiment Name: At_Roots__P Parameter: Organism Value: A. thaliana
  misc_feature: MA Experiment 20000439 PARAMETER Experiment Name: At_Roots__P Parameter: Tissue Value: Roots vs. Whole Plant
  misc_feature: MA Experiment ID: 20001248 Result: Down-regulated in Transcription
  misc_feature: MA Experiment 20001248 PARAMETER Experiment Name: At_Far-red-induction_P Parameter: Age (day) Value: 7
  misc_feature: MA Experiment 20001248 PARAMETER Experiment Name: At_Far-red-induction_P Parameter: Light Value: Far-red vs. White
  misc_feature: MA Experiment 20001248 PARAMETER Experiment Name: At_Far-red-induction_P Parameter: Organism Value: A. thaliana
  misc_feature: MA Experiment 20001248 PARAMETER Experiment Name: At_Far-red-induction_P Parameter: Plant Line Value: Columbia
  misc_feature: MA Experiment 20001248 PARAMETER Experiment Name: At_Far-red-induction_P Parameter: Timepoint (hr) Value: 4
  misc_feature: MA Experiment 20001248 PARAMETER Experiment Name: At_Far-red-induction_P Parameter: Tissue Value: Whole Plant
aaacaaaaaaacacagcctttgttctgtttctctgcgatttcttcgatgttcctcttcttcgttttgattttcagatttgtttaactcggtcgttgcgttgacttcaaatttcttaaaagagagagagagagagagaggagatagttcagaaaatctgtcagacttgggatctttctcggcaatgcgacgcttgttcgccgcgaaatccctctcccgagaggatacaacctttttgtcattctcttcttcttcggtgacgcgtttcctcaaggctcttcttcctctccgttcagatccaagagatgtccgctaattctcatcctcctaattccaaaaacgtcctctgtaatgcagccgccggtgccgccgccggggttgttgcggctacgtttgtgtgtcctcttgatgttataaaaacgaggtttcaggttcatgggctgcctaagctcggtgatgcaaacatcaaaggtagtctaattgttggcagtcttgagcagatcttcaagagagaagggatgcgtggcttataccgcggtctttcccctactgtcatggctcttctctccaattgggccatttattttacaatgtatgaccagctcaagagctttctttgttcaaatgatcacaaactcagcgttggagctaacgtattggctgcttcgggagctggagctgcaactaccattgccacaaatcctctttgggtcgtcaagactagacttcagacacaaggaatgagagtgggtatagtgccatacaaaagcacattttctgctttaaggagaatagcttatgaggagggaattcgcggattgtacagtggtcttgtccctgcactagctggtatcagtcatgttgccattcagtttcccacatatgagatgatcaaagtgtacttggccaagaaaggtgataaatcagtcgataacctcaatgctcgtgatgtagcagttgcctcttcgattgcaaagatatttgcatccacattaacttacccgcacgaggtagtacgagctaggcttcaagagcaagggcaccacagtgagaaacgttactcaggagtaagagattgcatcaagaaagtgtttgagaaagatgggttccctggtttttacagaggctgcgccacgaatctactgagaacaactcctgcagcagttataactttcactagcttcgaaatggtgcatcgtttcctcgtcactcatataccttctgagcaaagctctatactttaaatccggtttttttttttgatgatgatgacgattaaaagttatttttacacaggtaaaaaaaagtttccccttttgggaaatgattcaaaatagaagttcttttctggtgacttattatgtctctctgttggagaaatcagaatctgagaatgggttgaaacttgagagacccaaaaaagcagaatattttagtgtaaaaaactgactcttttatttctctgttttttgggccttcatgttactgaaaggaaacatatattatcttcaagaaatgattatactattattctggttttcagagtgttatg

SEQ ID NO: 85346 - protein, 312 aa, Arabidopsis thaliana; identical to SEQ ID NO: 41374
  peptide (1)..(312): Ceres Seq. ID no. 12680151
  misc_feature (1)..(312): Homolog of NCBI NO: 18407372 NR Description: mitochondrial carrier protein family; protein id: supported by cDNA: 120306., supported by cDNA: gi_13937205, by cDNA: gi_18491124 [Arabidopsis thaliana]
  misc_feature (56)..(312): Homolog of NCBI NO: 7487567 NR Description: probable mitochondrial carrier protein [imported]
  misc_feature (11)..(307): Homolog of NCBI NO: 18395659 NR Description: mitochondrial carrier protein family; protein id: supported by cDNA: 32844., supported by cDNA: gi_20260665 thaliana] >gi|20260666|gb|AAM13231.1| unknown protein
  misc_feature (11)..(307): Homolog of NCBI NO: 11067279 NR Description: unknown protein [Arabidopsis thaliana]
  misc_feature (23)..(305): Homolog of NCBI NO: 34914648 NR Description: OSJNBa0054L14.23 [Oryza sativa (japonica
  misc_feature (108)..(307): Homolog of NCBI NO: 25403521 NR Description: probable mitochondrial carrier protein [imported] Arabidopsis thaliana >gi|12321512|gb|AAG50815.1|AC079281_17
  misc_feature (11)..(62): Homolog of NCBI NO: 25403521 NR Description: probable mitochondrial carrier protein [imported] Arabidopsis thaliana >gi|12321512|gb|AAG50815.1|AC079281_17
  misc_feature (17)..(294): Homolog of NCBI NO: 6322185 NR Description: Hypothetical ORF; Yil006wp [Saccharomyces >gi|731775|sp|P40556|YIA6_YEAST PUTATIVE MITOCHONDRIAL CARRIER
  misc_feature (17)..(302): Homolog of NCBI NO: 6320831 NR Description: Hypothetical ORF; Yel006wp [Saccharomyces >gi|731395|sp|P39953|YEA6_YEAST PUTATIVE MITOCHONDRIAL CARRIER
  misc_feature (19)..(284): Homolog of NCBI NO: 24652037 NR Description: CG8026-PA [Drosophila melanogaster]

SEQ ID NO: 85347 - protein, 241 aa, Arabidopsis thaliana; identical to SEQ ID NO: 41375
  peptide (1)..(241): Ceres Seq. ID no. 12680152
  misc_feature (1)..(241): Homolog of NCBI NO: 18407372 NR Description: mitochondrial carrier protein family; protein id: supported by cDNA: 120306., supported by cDNA: gi_13937205, by cDNA: gi_18491124 [Arabidopsis thaliana]
  misc_feature (1)..(241): Homolog of NCBI NO: 7487567 NR Description: probable mitochondrial carrier protein [imported]
  misc_feature (1)..(236): Homolog of NCBI NO: 18395659 NR Description: mitochondrial carrier protein family; protein id: supported by cDNA: 32844., supported by cDNA: gi_20260665 thaliana] >gi|20260666|gb|AAM13231.1| unknown protein
  misc_feature (1)..(236): Homolog of NCBI NO: 11067279 NR Description: unknown protein [Arabidopsis thaliana]
  misc_feature (1)..(234): Homolog of NCBI NO: 34914648 NR Description: OSJNBa0054L14.23 [Oryza sativa (japonica
  misc_feature (37)..(236): Homolog of NCBI NO: 25403521 NR Description: probable mitochondrial carrier protein [imported] Arabidopsis thaliana >gi|12321512|gb|AAG50815.1|AC079281_17
  misc_feature (1)..(223): Homolog of NCBI NO: 6322185 NR Description: Hypothetical ORF; Yil006wp [Saccharomyces >gi|731775|sp|P40556|YIA6_YEAST PUTATIVE MITOCHONDRIAL CARRIER
  misc_feature (1)..(231): Homolog of NCBI NO: 6320831 NR Description: Hypothetical ORF; Yel006wp [Saccharomyces >gi|731395|sp|P39953|YEA6_YEAST PUTATIVE MITOCHONDRIAL CARRIER
  misc_feature (1)..(213): Homolog of NCBI NO: 24652037 NR Description: CG8026-PA [Drosophila melanogaster]
  misc_feature (193)..(230): Homolog of NCBI NO: 24652037 NR Description: CG8026-PA [Drosophila melanogaster]

SEQ ID NO: 85348 - protein, 229 aa, Arabidopsis thaliana; identical to SEQ ID NO: 41376
  peptide (1)..(229): Ceres Seq. ID no. 12680153
  misc_feature (1)..(229): Homolog of NCBI NO: 18407372 NR Description: mitochondrial carrier protein family; protein id: supported by cDNA: 120306., supported by cDNA: gi_13937205, by cDNA: gi_18491124 [Arabidopsis thaliana]
  misc_feature (1)..(229): Homolog of NCBI NO: 7487567 NR Description: probable mitochondrial carrier protein [imported]
  misc_feature (1)..(224): Homolog of NCBI NO: 18395659 NR Description: mitochondrial carrier protein family; protein id: supported by cDNA: 32844., supported by cDNA: gi_20260665 thaliana] >gi|20260666|gb|AAM13231.1| unknown protein
  misc_feature (1)..(224): Homolog of NCBI NO: 11067279 NR Description: unknown protein [Arabidopsis thaliana]
  misc_feature (1)..(222): Homolog of NCBI NO: 34914648 NR Description: OSJNBa0054L14.23 [Oryza sativa (japonica
  misc_feature (25)..(224): Homolog of NCBI NO: 25403521 NR Description: probable mitochondrial carrier protein [imported] Arabidopsis thaliana >gi|12321512|gb|AAG50815.1|AC079281_17
  misc_feature (1)..(211): Homolog of NCBI NO: 6322185 NR Description: Hypothetical ORF; Yil006wp [Saccharomyces >gi|731775|sp|P40556|YIA6_YEAST PUTATIVE MITOCHONDRIAL CARRIER
  misc_feature (1)..(219): Homolog of NCBI NO: 6320831 NR Description: Hypothetical ORF; Yel006wp [Saccharomyces >gi|731395|sp|P39953|YEA6_YEAST PUTATIVE MITOCHONDRIAL CARRIER
  misc_feature (1)..(201): Homolog of NCBI NO: 24652037 NR Description: CG8026-PA [Drosophila melanogaster]
  misc_feature (181)..(218): Homolog of NCBI NO: 24652037 NR Description: CG8026-PA [Drosophila melanogaster]

SEQ ID NO: 85349 - DNA, 659 bp, Arabidopsis thaliana
  misc_feature (1)..(659): Ceres Seq. ID no. 12680174
  misc_feature: MA Experiment ID: 108434 Result: Up-regulated in Transcription
  misc_feature: MA Experiment 108434 PARAMETER Experiment Name: At_Root_Tips_cDNA_P Parameter: Tissue Value: Root Tips
  misc_feature: MA Experiment ID: 108462 Result: Down-regulated in Transcription
  misc_feature: MA Experiment 108462 PARAMETER Experiment Name: At_Germinating_Seeds_cDNA_P Parameter: Age (day) Value: 2 vs. 0
  misc_feature: MA Experiment 108462 PARAMETER Experiment Name: At_Germinating_Seeds_cDNA_P Parameter: Tissue Value: Germinating Seeds
  misc_feature: MA Experiment ID: 108463 Result: Down-regulated in Transcription
  misc_feature: MA Experiment 108463 PARAMETER Experiment Name: At_Germinating_Seeds_cDNA_P Parameter: Age (day) Value: 3 vs. 0
  misc_feature: MA Experiment 108463 PARAMETER Experiment Name: At_Germinating_Seeds_cDNA_P Parameter: Tissue Value: Germinating Seeds
  misc_feature: MA Experiment ID: 108464 Result: Down-regulated in Transcription
  misc_feature: MA Experiment 108464 PARAMETER Experiment Name: At_Germinating_Seeds_cDNA_P Parameter: Age (day) Value: 4 vs. 0
  misc_feature: MA Experiment 108464 PARAMETER Experiment Name: At_Germinating_Seeds_cDNA_P Parameter: Tissue Value: Germinating Seeds
  misc_feature: MA Experiment ID: 108569 Result: Up-regulated in Transcription
  misc_feature: MA Experiment 108569 PARAMETER Experiment Name: At_0.001%_MeJA__cDNA_P Parameter: Timepoint (hr) Value: 6
  misc_feature: MA Experiment 108569 PARAMETER Experiment Name: At_0.001%_MeJA__cDNA_P Parameter: Tissue Value: Aerial
  misc_feature: MA Experiment 108569 PARAMETER Experiment Name: At_0.001%_MeJA__cDNA_P Parameter: Treatment Value: 0.001% MeJA vs. No Treatment
  misc_feature: MA Experiment ID: 108573 Result: Up-regulated in Transcription
  misc_feature: MA Experiment 108573 PARAMETER Experiment Name: At_Drought_cDNA_P Parameter: Timepoint (hr) Value: 6
  misc_feature: MA Experiment 108573 PARAMETER Experiment Name: At_Drought_cDNA_P Parameter: Tissue Value: Aerial
  misc_feature: MA Experiment 108573 PARAMETER Experiment Name: At_Drought_cDNA_P Parameter: Treatment Value: Drought vs. No Drought
gttctttcgattctcagagaagacttttcagaacatcctccaactttctcagataagcaacaatggtgaaaggtcccggtctctacaccgaaatcggcaaaaaggccagagatcttctgtacaaagaccacaacagtgaccagaaattcagtatcaccactttctctcctgccggtgttgccatcacctcaaccggaactaagaaaggtgacttattgttgggagatgtcgcttttcagtcgaggcgaaagaacattactactgatttgaaagtttgcactgattctacttttctgatcaccgctaccgttgatgaggctgcacccggactgaggtcaatcttcagcttcaaggttcctgaccaaaattctggcaaggttgagctgcaatacttgcatgagtacgccggtatcagcacaagcatgggattgactcagaacccaacttcaattgacaagagtgctaaagttggattggctctcgcactcaagccttgaaactgagatggaagaagaagttgcaatagtttttttaaactagtttctttctacgtactctgttttttctctgcttggttcatggtttgagtgggcaactactgatctttcccattttcctgccggatttgtagaagaataaaaaggttgaaaatgatcatc

SEQ ID NO: 85350 - protein, 144 aa, Arabidopsis thaliana
  peptide (1)..(144): Ceres Seq. ID no. 12680175
  misc_feature (4)..(137): Pfam Name: Eukaryotic porin Pfam Description: Eukaryotic porin
  misc_feature (1)..(137): Homolog of NCBI NO: 21593558 NR Description: putative porin [Arabidopsis thaliana]
  misc_feature (129)..(144): Homolog of NCBI NO: 21593558 NR Description: putative porin [Arabidopsis thaliana]
  misc_feature (1)..(137): Homolog of NCBI NO: 15232074 NR Description: putative porin; protein id: At3g01280.1, by cDNA: 40102., supported by cDNA: gi_14335075 [Arabidopsis >gi|20455197|sp|Q9SRH5|POR1_ARATH Outer mitochondrial membrane
  misc_feature (1)..(142): Homolog of NCBI NO: 36957183 NR Description: VDAC1.2 [Lotus corniculatus var. japonicus]
  misc_feature (1)..(140): Homolog of NCBI NO: 7442953 NR Description: porin - common ice plant
  misc_feature (1)..(142): Homolog of NCBI NO: 36957170 NR Description: VDAC1.1 [Lotus corniculatus var. japonicus]
  misc_feature (1)..(141): Homolog of NCBI NO: 1172558 NR Description: Outer plastidial membrane protein porin
  misc_feature (1)..(137): Homolog of NCBI NO: 1172555 NR Description: 34 kDa outer mitochondrial membrane protein porin
  misc_feature (1)..(137): Homolog of NCBI NO: 5031279 NR Description: porin [Prunus armeniaca]
  misc_feature (1)..(127): Homolog of NCBI NO: 7442952 NR Description: voltage-dependent anion channel protein - spinach
MVKGPGLYTEIGKKARDLLYKDHNSDQKFSITTFSPAGVAITSTGTKKGDLLLGDVAFQSRRKNITTDLKVCTDSTFLITATVDEAAPGLRSIFSFKVPDQNSGKVELQYLHEYAGISTSMGLTQNPTSIDKSAKVGLALALKP

SEQ ID NO: 85351 - DNA, 1734 bp, Arabidopsis thaliana
  misc_feature (1)..(1734): Ceres Seq. ID no. 12680178
  misc_feature: MA Experiment ID: 108579 Result: Down-regulated in Transcription
  misc_feature: MA Experiment 108579 PARAMETER Experiment Name: At_4deg_Cold_cDNA_P Parameter: Temperature (deg C) Value: 4 vs. 22
  misc_feature: MA Experiment 108579 PARAMETER Experiment Name: At_4deg_Cold_cDNA_P Parameter: Timepoint (hr) Value: 6
  misc_feature: MA Experiment 108579 PARAMETER Experiment Name: At_4deg_Cold_cDNA_P Parameter: Tissue Value: Aerial
  misc_feature: MA Experiment ID: 20000314 Result: Down-regulated in Transcription
  misc_feature: MA Experiment 20000314 PARAMETER Experiment Name: At_14day_Shoots-Roots_Sub_P Parameter: Age (day) Value: 14
  misc_feature: MA Experiment 20000314 PARAMETER Experiment Name: At_14day_Shoots-Roots_Sub_P Parameter: Organism Value: A. thaliana
  misc_feature: MA Experiment 20000314 PARAMETER Experiment Name: At_14day_Shoots-Roots_Sub_P Parameter: Plant Line Value: WS
  misc_feature: MA Experiment 20000314 PARAMETER Experiment Name: At_14day_Shoots-Roots_Sub_P Parameter: Tissue Value: Roots vs. Whole Plant
  misc_feature: MA Experiment ID: 20000328 Result: Down-regulated in Transcription
  misc_feature: MA Experiment 20000328 PARAMETER Experiment Name: At_42deg_Heat_Sub_P Parameter: Age (day) Value: 14
  misc_feature: MA Experiment 20000328 PARAMETER Experiment Name: At_42deg_Heat_Sub_P Parameter: Organism Value: A. thaliana
  misc_feature: MA Experiment 20000328 PARAMETER Experiment Name: At_42deg_Heat_Sub_P Parameter: Plant Line Value: WS
  misc_feature: MA Experiment 20000328 PARAMETER Experiment Name: At_42deg_Heat_Sub_P Parameter: Temperature (deg C) Value: 42 vs. 22
  misc_feature: MA Experiment 20000328 PARAMETER Experiment Name: At_42deg_Heat_Sub_P Parameter: Timepoint (hr) Value: 6
  misc_feature: MA Experiment 20000328 PARAMETER Experiment Name: At_42deg_Heat_Sub_P Parameter: Tissue Value: Aerial
  misc_feature: MA Experiment ID: 20000355 Result: Down-regulated in Transcription
  misc_feature: MA Experiment 20000355 PARAMETER Experiment Name: At_Siliques_Sub_P Parameter: Age (day) Value: 21
  misc_feature: MA Experiment 20000355 PARAMETER Experiment Name: At_Siliques_Sub_P Parameter: Organism Value: A. thaliana
  misc_feature: MA Experiment 20000355 PARAMETER Experiment Name: At_Siliques_Sub_P Parameter: Plant Line Value: WS
  misc_feature: MA Experiment 20000355 PARAMETER Experiment Name: At_Siliques_Sub_P Parameter: Tissue Value: Less Than 5mm Siliques vs. Whole Plant
  misc_feature: MA Experiment ID: 20000440 Result: Up-regulated in Transcription
  misc_feature: MA Experiment 20000440 PARAMETER Experiment Name: At_Closed-Flower__Sub_P Parameter: Tissue Value: Closed Flower vs. Whole Plant
gagaagtctaatcacagagaagagagaagcgagagttagcctcttctttagttgtttgttgcaataaacacaaacacaacttccctattttctgcttctttttgttcaactcctacacactccaatcacacaattcacaacccattgagaaaccaataaaataacctcaatcaaaaaaaaaaaaaaaaaaaaaaaaaagatgaaaatctcaatttagtaaaggagaaaaaagccatttcgaataacttgaaaaggttttggttttgcagaagaaaatgaaggagaaggcggagagtggtggaggagtaggatacgtgagagcagatcagatagatttaaagagtctggacgagcaattgcagagacacttaagtaaagcatggacgatggagaagaggaagagtttgagtgatggtgaagataacgtcaataacacccgacataaccagaacaacttcggacatcgacagcttgtgtttcagaggccgcttcttggtggtggatatagcaacaacaacaacagcagcaagaacgacataattaggtcgaccgaggttgagaagtcgaggagagagtgggagattgatccttctaagcttataatcaaaagtgtgattgctagaggtacttttggtacggttcaccgtggaatctacgatggtcaagatgtcgccgtaaaactactagactggggagaagaggggcacaggtcagacgcagagatagcttcgcttagagctgctttcactcaagaagttgctgtgtggcataagctcgaccatcccaatgtcaccaagttcataggagcggcgatggggacatcggagatgagcatacaaacggaaaacgggcaaatgggaatgccgagtaacgtttgctgtgtcgtggttgagtattgccccggcggcgctctcaagtcattcctcatcaaaactcgccgccgcaaactcgccttcaaagtcgttatccaactctcccttgatcttgctcgcgggttgagttacttgcactctcagaagattgtgcatagagacgtgaaaacggagaacatgcttttagataagtcacgcaccttaaagattgcagattttggtgtggctcgtctagaggcttcaaaccctaacgacatgaccggtgagaccggaaccttgggctatatggctcctgaggtgctaaacgggagtccctacaacagaaagtgcgatgtgtatagctttgggatatgtctttgggagatttactgttgcgacatgccttatcctgacctcagcttctccgaagtaacctccgccgtcgtccgccagaatttgagaccagagatacctagatgttgtccaagctcgctggcgaacgtgatgaagaggtgttgggatgcgaatccggagaagcggccggagatggaggaagttgtggctatgttggaggctattgatacttccaaaggcggaggaatgattcctcctgaccaacaacaaggctgtttctgtttccgccgacaccgaggcccatgaagtacacacacatgcactacgttcccattattattataattaactcttactattttggaagaagagagattatttttaaaagttaattgtggggtaattaaaatgttttaattagtttggtgtttgatttataggatgaatgtcgtacctatttcaaacgatcatctcatacgttatacataacacacaacaaaaccttattcttgatcttcgcttgttttat

SEQ ID NO: 85352 - protein, 411 aa, Arabidopsis thaliana; identical to SEQ ID NO: 36421
  peptide (1)..(411): Ceres Seq. ID no. 12680179
  misc_feature (108)..(382): Pfam Name: Protein kinase domain Pfam Description: Protein kinase domain
  misc_feature (1)..(411): Homolog of NCBI NO: 15232131 NR Description: putative protein kinase; protein id: At3g01490.1, by cDNA: gi_16323086 [Arabidopsis thaliana] putative protein kinase [Arabidopsis thaliana]
  misc_feature (96)..(411): Homolog of NCBI NO: 15240597 NR Description: protein kinase; protein id: At5g50000.1, by cDNA: 142106. [Arabidopsis thaliana]
  misc_feature (9)..(49): Homolog of NCBI NO: 15240597 NR Description: protein kinase; protein id: At5g50000.1, by cDNA: 142106. [Arabidopsis thaliana]
  misc_feature (96)..(411): Homolog of NCBI NO: 21553402 NR Description: protein kinase [Arabidopsis thaliana]
  misc_feature (9)..(49): Homolog of NCBI NO: 21553402 NR Description: protein kinase [Arabidopsis thaliana]
  misc_feature (95)..(411): Homolog of NCBI NO: 34911620 NR Description: protein kinase -like [Oryza sativa (japonica
  misc_feature (7)..(34): Homolog of NCBI NO: 34911620 NR Description: protein kinase -like [Oryza sativa (japonica
  misc_feature (98)..(411): Homolog of NCBI NO: 29367399 NR Description: putative protein kinase [Oryza sativa (japonica
  misc_feature (6)..(42): Homolog of NCBI NO: 29367399 NR Description: putative protein kinase [Oryza sativa (japonica
  misc_feature (90)..(411): Homolog of NCBI NO: 15233574 NR Description: kinase like protein; protein id: At4g14780.1

SEQ ID NO: 85353 - protein, 374 aa, Arabidopsis thaliana; identical to SEQ ID NO: 36422
  peptide (1)..(374): Ceres Seq. ID no. 12680180
  misc_feature (71)..(345): Pfam Name: Protein kinase domain Pfam Description: Protein kinase domain
  misc_feature (1)..(374): Homolog of NCBI NO: 15232131 NR Description: putative protein kinase; protein id: At3g01490.1, by cDNA: gi_16323086 [Arabidopsis thaliana] putative protein kinase [Arabidopsis thaliana]
  misc_feature (59)..(374): Homolog of NCBI NO: 15240597 NR Description: protein kinase; protein id: At5g50000.1, by cDNA: 142106. [Arabidopsis thaliana]
  misc_feature (1)..(12): Homolog of NCBI NO: 15240597 NR Description: protein kinase; protein id: At5g50000.1, by cDNA: 142106. [Arabidopsis thaliana]
  misc_feature (59)..(374): Homolog of NCBI NO: 21553402 NR Description: protein kinase [Arabidopsis thaliana]
  misc_feature (1)..(12): Homolog of NCBI NO: 21553402 NR Description: protein kinase [Arabidopsis thaliana]
  misc_feature (58)..(374): Homolog of NCBI NO: 34911620 NR Description: protein kinase -like [Oryza sativa (japonica
  misc_feature (61)..(374): Homolog of NCBI NO: 29367399 NR Description: putative protein kinase [Oryza sativa (japonica
  misc_feature (53)..(374): Homolog of NCBI NO: 15233574 NR Description: kinase like protein; protein id: At4g14780.1
  misc_feature (1)..(374): Homolog of NCBI NO: 18403507 NR Description: expressed protein; protein id: At3g22750.1, by cDNA: gi_14334661, supported by cDNA: gi_17104596 [Arabidopsis
  misc_feature (62)..(374): Homolog of NCBI NO: 15229398 NR Description: ATMRK1; protein id: At3g63260.1, supported by

SEQ ID NO: 85354 - protein, 232 aa, Arabidopsis thaliana; identical to SEQ ID NO: 36423
  peptide (1)..(232): Ceres Seq. ID no. 12680181
  misc_feature (1)..(203): Pfam Name: Protein kinase domain Pfam Description: Protein kinase domain
  misc_feature (1)..(232): Homolog of NCBI NO: 15232131 NR Description: putative protein kinase; protein id: At3g01490.1, by cDNA: gi_16323086 [Arabidopsis thaliana] putative protein kinase [Arabidopsis thaliana]
  misc_feature (1)..(232): Homolog of NCBI NO: 15240597 NR Description: protein kinase; protein id: At5g50000.1, by cDNA: 142106. [Arabidopsis thaliana]
  misc_feature (1)..(232): Homolog of NCBI NO: 21553402 NR Description: protein kinase [Arabidopsis thaliana]
  misc_feature (1)..(232): Homolog of NCBI NO: 34911620 NR Description: protein kinase -like [Oryza sativa (japonica
  misc_feature (1)..(232): Homolog of NCBI NO: 29367399 NR Description: putative protein kinase [Oryza sativa (japonica
  misc_feature (1)..(232): Homolog of NCBI NO: 15233574 NR Description: kinase like protein; protein id: At4g14780.1
  misc_feature (1)..(232): Homolog of NCBI NO: 18403507 NR Description: expressed protein; protein id: At3g22750.1, by cDNA: gi_14334661, supported by cDNA: gi_17104596 [Arabidopsis
  misc_feature (1)..(232): Homolog of NCBI NO: 15229398 NR Description: ATMRK1; protein id: At3g63260.1, supported by
  misc_feature (1)..(232): Homolog of NCBI NO: 21554375 NR Description: ATMRK1 [Arabidopsis thaliana]
  misc_feature (1)..(231): Homolog of NCBI NO: 14626298 NR Description: putative protein kinase [Oryza sativa (japonica

SEQ ID NO: 85355 - DNA, 1543 bp, Arabidopsis thaliana
  misc_feature (1)..(1543): Ceres Seq. ID no. 12680182
  misc_feature: MA Experiment ID: 108462 Result: Up-regulated in Transcription
  misc_feature: MA Experiment 108462 PARAMETER Experiment Name: At_Germinating_Seeds_cDNA_P Parameter: Age (day) Value: 2 vs. 0
  misc_feature: MA Experiment 108462 PARAMETER Experiment Name: At_Germinating_Seeds_cDNA_P Parameter: Tissue Value: Germinating Seeds
  misc_feature: MA Experiment ID: 108463 Result: Up-regulated in Transcription
  misc_feature: MA Experiment 108463 PARAMETER Experiment Name: At_Germinating_Seeds_cDNA_P Parameter: Age (day) Value: 3 vs. 0
  misc_feature: MA Experiment 108463 PARAMETER Experiment Name: At_Germinating_Seeds_cDNA_P Parameter: Tissue Value: Germinating Seeds
  misc_feature: MA Experiment ID: 108573 Result: Up-regulated in Transcription
  misc_feature: MA Experiment 108573 PARAMETER Experiment Name: At_Drought_cDNA_P Parameter: Timepoint (hr) Value: 6
  misc_feature: MA Experiment 108573 PARAMETER Experiment Name: At_Drought_cDNA_P Parameter: Tissue Value: Aerial
  misc_feature: MA Experiment 108573 PARAMETER Experiment Name: At_Drought_cDNA_P Parameter: Treatment Value: Drought vs. No Drought
  misc_feature: MA Experiment ID: 108607 Result: Up-regulated in Transcription
  misc_feature: MA Experiment 108607 PARAMETER Experiment Name: At_100uM_ABA_cDNA_P Parameter: Timepoint (hr) Value: 4
  misc_feature: MA Experiment 108607 PARAMETER Experiment Name: At_100uM_ABA_cDNA_P Parameter: Tissue Value: Aerial
  misc_feature: MA Experiment 108607 PARAMETER Experiment Name: At_100uM_ABA_cDNA_P Parameter: Treatment Value: 100uM ABA vs. No Treatment
  misc_feature: MA Experiment ID: 20000437 Result: Up-regulated in Transcription
  misc_feature: MA Experiment 20000437 PARAMETER Experiment Name: At_Drought_P Parameter: Age (day) Value: 8
  misc_feature: MA Experiment 20000437 PARAMETER Experiment Name: At_Drought_P Parameter: Organism Value: A. thaliana
  misc_feature: MA Experiment 20000437 PARAMETER Experiment Name: At_Drought_P Parameter: Plant Line Value: WS
  misc_feature: MA Experiment 20000437 PARAMETER Experiment Name: At_Drought_P Parameter: Timepoint (hr) Value: 24
  misc_feature: MA Experiment 20000437 PARAMETER Experiment Name: At_Drought_P Parameter: Tissue Value: Whole Plant
  misc_feature: MA Experiment 20000437 PARAMETER Experiment Name: At_Drought_P Parameter: Treatment Value: Drought vs. No Drought
agagccttattcaagagaacaccaaggtcagcattttcttctactctctcgatctcaatttctctctttatccttgtgatctatttctctctcgtctacaatttgagctacttttcttgttattatcgtcacgttgtgtgtcgcgtagtggatttgagtgattggttgattgattgatggattttttcacgaaacgcgtagagtttggtggaagttgttgaaattcgaagccgatcgcggactcgtttgctcttgattacgtcgcaatccgtacgattttccgatcaaacttaagagtgaaggagatagatttgtagaaaaaggaagagaataagagtgagcttgtggccaaaaaagggatgcctttgaacttaggcaacgatggcgatgggtcttcccggattattttgactgagcctcgcggatctactgctgaggtgcttctatttggaggacaagtcatttcttggaaaaatgaaaggagggaagaactgctttatatgagcagcaaggctcaatataagccacccaaggcgatcagaggaggaatacctgtttgctttccacagtttggaaactttggtggacttgagcgacatggatttgcccggaacaaattctggtcacatgatgaagatccttcgcctctacctcctgctaacaaacaatcatctgttgatctgatattgaagtccacagaagatgacttgaagacctggccgcatagttttgaactccgtattcgcatttctattagccctgggaagcttactttgatccctcgtgtgaggaacattgactcaaaggcattctcctttatgtttgcactgcgaaactacttatatgtatctgacataagtgaagttcgagttgagggtttggagacactggattatctagacaacttgattggtaaagaaagattcactgagcaagcagacgcgattacctttgacggggaggtcgatagagtgtacttgaacacaccaacaaagattgcggtcatagatcatgagcgaaagaggaccatcgagttgcgaaaggaaggcatgcccaatgcagttgtgtggaacccctgggacaaaaaggcaaagaccatagctgatatgggagatgaagattacaaaacaatgctttgtgtagattctggagtaatcgaacctctggtattgttaaagcctcgtgaagagtggaaaggcagacaagaactatccatcgtctcatcaagttactgcagcggacagcttgatccacgcaaggttctttacggagatatctgatccttttgggggtttatcttacttagtaaaaaaacagtaataagccatgatctcattatcactaccacccagaaacaactctctaagagtcttgtcttgaacttggagattttatccttttgacttgtgttttgagtgagttctgattgttgttgttacacagagaggtcacggtaatattttgtaacgttgactctgtgtttgaccgtcaaacagtgtatcggtttctttgttcggaaatttagtagaatatatcatcaatt

SEQ ID NO: 85356 - protein, 306 aa, Arabidopsis thaliana; identical to SEQ ID NO: 37477
  peptide (1)..(306): Ceres Seq. ID no. 12680183
  misc_feature (13)..(285): Pfam Name: Aldose 1-epimerase Pfam Description: Aldose 1-epimerase
  misc_feature (1)..(306): Homolog of NCBI NO: 18395868 NR Description: expressed protein; protein id: At3g01590.1, by cDNA: 41354., supported by cDNA: gi_16612257, supported by gi_20258972 [Arabidopsis thaliana]
  misc_feature (1)..(306): Homolog of NCBI NO: 16612258 NR Description: AT3g01590/F4P13_13 [Arabidopsis thaliana]
  misc_feature (1)..(305): Homolog of NCBI NO: 11281678 NR Description: hypothetical protein F18O22.290 - Arabidopsis >gi|7573475|emb|CAB87789.1| putative protein [Arabidopsis
  misc_feature (1)..(305): Homolog of NCBI NO: 28393808 NR Description: unknown protein [Arabidopsis thaliana]
  misc_feature (1)..(305): Homolog of NCBI NO: 18417396 NR Description: putative protein; protein id: At5g14500.1,
  misc_feature (10)..(302): Homolog of NCBI NO: 15242099 NR Description: apospory-associated protein C; protein id:
  misc_feature (11)..(304): Homolog of NCBI NO: 38344152 NR Description: OSJNBa0041A02.19 [Oryza sativa (japonica
  misc_feature (6)..(304): Homolog of NCBI NO: 40253263 NR Description: putative Aldose 1-epimerase [Oryza sativa
  misc_feature (11)..(304): Homolog of NCBI NO: 2501555 NR Description: POSSIBLE APOSPORY-ASSOCIATED PROTEIN C
  misc_feature (10)..(302): Homolog of NCBI NO: 19387263 NR Description: putative apospory-associated protein C [Oryza

SEQ ID NO: 85357 - protein, 259 aa, Arabidopsis thaliana; identical to SEQ ID NO: 37478
  peptide (1)..(259): Ceres Seq. ID no. 12680184
  misc_feature (1)..(238): Pfam Name: Aldose 1-epimerase Pfam Description: Aldose 1-epimerase
  misc_feature (1)..(259): Homolog of NCBI NO: 18395868 NR Description: expressed protein; protein id: At3g01590.1, by cDNA: 41354., supported by cDNA: gi_16612257, supported by gi_20258972 [Arabidopsis thaliana]
  misc_feature (1)..(259): Homolog of NCBI NO: 16612258 NR Description: AT3g01590/F4P13_13 [Arabidopsis thaliana]
  misc_feature (1)..(258): Homolog of NCBI NO: 11281678 NR Description: hypothetical protein F18O22.290 - Arabidopsis >gi|7573475|emb|CAB87789.1| putative protein [Arabidopsis
  misc_feature (1)..(258): Homolog of NCBI NO: 28393808 NR Description: unknown protein [Arabidopsis thaliana]
  misc_feature (1)..(258): Homolog of NCBI NO: 18417396 NR Description: putative protein; protein id: At5g14500.1,
  misc_feature (1)..(255): Homolog of NCBI NO: 15242099 NR Description: apospory-associated protein C; protein id:
  misc_feature (1)..(257): Homolog of NCBI NO: 38344152 NR Description: OSJNBa0041A02.19 [Oryza sativa (japonica
  misc_feature (1)..(257): Homolog of NCBI NO: 40253263 NR Description: putative Aldose 1-epimerase [Oryza sativa
  misc_feature (1)..(257): Homolog of NCBI NO: 2501555 NR Description: POSSIBLE APOSPORY-ASSOCIATED PROTEIN C
  misc_feature (1)..(255): Homolog of NCBI NO: 19387263 NR Description: putative apospory-associated protein C [Oryza

SEQ ID NO: 85358 - protein, 153 aa, Arabidopsis thaliana; identical to SEQ ID NO: 37479
  peptide (1)..(153): Ceres Seq. ID no. 12680185
  misc_feature (1)..(132): Pfam Name: Aldose 1-epimerase Pfam Description: Aldose 1-epimerase
  misc_feature (1)..(153): Homolog of NCBI NO: 18395868 NR Description: expressed protein; protein id: At3g01590.1, by cDNA: 41354., supported by cDNA: gi_16612257, supported by gi_20258972 [Arabidopsis thaliana]
  misc_feature (1)..(153): Homolog of NCBI NO: 16612258 NR Description: AT3g01590/F4P13_13 [Arabidopsis thaliana]
  misc_feature (1)..(152): Homolog of NCBI NO: 11281678 NR Description: hypothetical protein F18O22.290 - Arabidopsis >gi|7573475|emb|CAB87789.1| putative protein [Arabidopsis
  misc_feature (1)..(152): Homolog of NCBI NO: 28393808 NR Description: unknown protein [Arabidopsis thaliana]
  misc_feature (1)..(152): Homolog of NCBI NO: 18417396 NR Description: putative protein; protein id: At5g14500.1,
  misc_feature (1)..(149): Homolog of NCBI NO: 15242099 NR Description: apospory-associated protein C; protein id:
  misc_feature (1)..(151): Homolog of NCBI NO: 38344152 NR Description: OSJNBa0041A02.19 [Oryza sativa (japonica
  misc_feature (1)..(151): Homolog of NCBI NO: 40253263 NR Description: putative Aldose 1-epimerase [Oryza sativa
  misc_feature (1)..(151): Homolog of NCBI NO: 2501555 NR Description: POSSIBLE APOSPORY-ASSOCIATED PROTEIN C
  misc_feature (1)..(149): Homolog of NCBI NO: 19387263 NR Description: putative apospory-associated protein C [Oryza

SEQ ID NO: 85359 - DNA, 1305 bp, Arabidopsis thaliana
  misc_feature (1)..(1305): Ceres Seq. ID no. 12680186
  misc_feature: MA Experiment ID: 108435 Result: Down-regulated in Transcription
  misc_feature: MA Experiment 108435 PARAMETER Experiment Name: At_stm_Mutants_cDNA_P Parameter: Plant Line Value: wt Landsburg vs stm
  misc_feature: MA Experiment 108435 PARAMETER Experiment Name: At_stm_Mutants_cDNA_P Parameter: Tissue Value: Shoot Apical Meristem Region
  misc_feature: MA Experiment ID: 108461 Result: Up-regulated in Transcription
  misc_feature: MA Experiment 108461 PARAMETER Experiment Name: At_Germinating_Seeds_cDNA_P Parameter: Age (day) Value: 1 vs. 0
  misc_feature: MA Experiment 108461 PARAMETER Experiment Name: At_Germinating_Seeds_cDNA_P Parameter: Tissue Value: Germinating Seeds
  misc_feature: MA Experiment ID: 108464 Result: Up-regulated in Transcription
  misc_feature: MA Experiment 108464 PARAMETER Experiment Name: At_Germinating_Seeds_cDNA_P Parameter: Age (day) Value: 4 vs. 0
  misc_feature: MA Experiment 108464 PARAMETER Experiment Name: At_Germinating_Seeds_cDNA_P Parameter: Tissue Value: Germinating Seeds
  misc_feature: MA Experiment ID: 108474 Result: Up-regulated in Transcription
  misc_feature: MA Experiment 108474 PARAMETER Experiment Name: At_Drought_Flowers_cDNA_P Parameter: Timepoint (hr) Value: null
  misc_feature: MA Experiment 108474 PARAMETER Experiment Name: At_Drought_Flowers_cDNA_P Parameter: Treatment Value: Drought vs. No Drought
  misc_feature: MA Experiment ID: 108605 Result: Down-regulated in Transcription
  misc_feature: MA Experiment 108605 PARAMETER Experiment Name: At_100uM_ABA_cDNA_P Parameter: Timepoint (hr) Value: 6
  misc_feature: MA Experiment 108605 PARAMETER Experiment Name: At_100uM_ABA_cDNA_P Parameter: Tissue Value: Aerial
  misc_feature: MA Experiment 108605 PARAMETER Experiment Name: At_100uM_ABA_cDNA_P Parameter: Treatment Value: 100uM ABA vs. No Treatment
  misc_feature: MA Experiment ID: 20000069 Result: Down-regulated in Transcription
  misc_feature: MA Experiment 20000069 PARAMETER Experiment Name: At_100uM_ABA_Mutants_cDNA_P Parameter: Plant Line Value: CS23
  misc_feature: MA Experiment 20000069 PARAMETER Experiment Name: At_100uM_ABA_Mutants_cDNA_P Parameter: Timepoint (hr) Value: 6
  misc_feature: MA Experiment 20000069 PARAMETER Experiment Name: At_100uM_ABA_Mutants_cDNA_P Parameter: Tissue Value: Aerial
  misc_feature: MA Experiment 20000069 PARAMETER Experiment Name: At_100uM_ABA_Mutants_cDNA_P Parameter: Treatment Value: 100uM ABA vs. No Treatment
  misc_feature: MA Experiment ID: 20000070 Result: Down-regulated in Transcription
  misc_feature: MA Experiment 20000070 PARAMETER Experiment Name: At_100uM_ABA_Mutants_cDNA_P Parameter: Plant Line Value: CS24
  misc_feature: MA Experiment 20000070 PARAMETER Experiment Name: At_100uM_ABA_Mutants_cDNA_P Parameter: Timepoint (hr) Value: 6
  misc_feature: MA Experiment 20000070 PARAMETER Experiment Name: At_100uM_ABA_Mutants_cDNA_P Parameter: Tissue Value: Aerial
  misc_feature: MA Experiment 20000070 PARAMETER Experiment Name: At_100uM_ABA_Mutants_cDNA_P Parameter: Treatment Value: 100uM ABA vs. No Treatment
  misc_feature: MA Experiment ID: 20000072 Result: Down-regulated in Transcription
  misc_feature: MA Experiment 20000072 PARAMETER Experiment Name: At_100uM_ABA_Mutants_cDNA_P Parameter: Plant Line Value: CS8105
  misc_feature: MA Experiment 20000072 PARAMETER Experiment Name: At_100uM_ABA_Mutants_cDNA_P Parameter: Timepoint (hr) Value: 6
  misc_feature: MA Experiment 20000072 PARAMETER Experiment Name: At_100uM_ABA_Mutants_cDNA_P Parameter: Tissue Value: Aerial
  misc_feature: MA Experiment 20000072 PARAMETER Experiment Name: At_100uM_ABA_Mutants_cDNA_P Parameter: Treatment Value: 100uM ABA vs. No Treatment
  misc_feature: MA Experiment ID: 20000087 Result: Down-regulated in Transcription
  misc_feature: MA Experiment 20000087 PARAMETER Experiment Name: At_100uM_ABA_Mutants_cDNA_P Parameter: Plant Line Value: WS
  misc_feature: MA Experiment 20000087 PARAMETER Experiment Name: At_100uM_ABA_Mutants_cDNA_P Parameter: Timepoint (hr) Value: 6
  misc_feature: MA Experiment 20000087 PARAMETER Experiment Name: At_100uM_ABA_Mutants_cDNA_P Parameter: Tissue Value: Aerial
  misc_feature: MA Experiment 20000087 PARAMETER Experiment Name: At_100uM_ABA_Mutants_cDNA_P Parameter: Treatment Value: 100uM ABA vs. No Treatment
  misc_feature: MA Experiment ID: 20000088 Result: Down-regulated in Transcription
  misc_feature: MA Experiment 20000088 PARAMETER Experiment Name: At_100uM_ABA_Mutants_cDNA_P Parameter: Plant Line Value: Landsberg
  misc_feature: MA Experiment 20000088 PARAMETER Experiment Name: At_100uM_ABA_Mutants_cDNA_P Parameter: Timepoint (hr) Value: 6
  misc_feature: MA Experiment 20000088 PARAMETER Experiment Name: At_100uM_ABA_Mutants_cDNA_P Parameter: Tissue Value: Aerial
  misc_feature: MA Experiment 20000088 PARAMETER Experiment Name: At_100uM_ABA_Mutants_cDNA_P Parameter: Treatment Value: 100uM ABA vs. No Treatment
  misc_feature: MA Experiment ID: 20000090 Result: Down-regulated in Transcription
  misc_feature: MA Experiment ID: 20000113 Result: Up-regulated in Transcription
  misc_feature: MA Experiment 20000113 PARAMETER Experiment Name: At_42deg_Heat_cDNA_P Parameter: Temperature (deg C) Value: 42 vs. 22
  misc_feature: MA Experiment 20000113 PARAMETER Experiment Name: At_42deg_Heat_cDNA_P Parameter: Timepoint (hr) Value: 8
  misc_feature: MA Experiment 20000113 PARAMETER Experiment Name: At_42deg_Heat_cDNA_P Parameter: Tissue Value: Aerial
  misc_feature: MA Experiment ID: 20000117 Result: Down-regulated in Transcription
  misc_feature: MA Experiment 20000117 PARAMETER Experiment Name: At_100uM_ABA_Mutants_cDNA_P Parameter: Plant Line Value: Columbia
  misc_feature: MA Experiment 20000117 PARAMETER Experiment Name: At_100uM_ABA_Mutants_cDNA_P Parameter: Timepoint (hr) Value: 6
  misc_feature: MA Experiment 20000117 PARAMETER Experiment Name: At_100uM_ABA_Mutants_cDNA_P Parameter: Tissue Value: Aerial
  misc_feature: MA Experiment 20000117 PARAMETER Experiment Name: At_100uM_ABA_Mutants_cDNA_P Parameter: Treatment Value: 100uM ABA vs. No Treatment
  misc_feature: MA Experiment ID: 20000184 Result: Up-regulated in Transcription
  misc_feature: MA Experiment 20000184 PARAMETER Experiment Name: At_Shoots__P Parameter: Age (day) Value: 7
  misc_feature: MA Experiment 20000184 PARAMETER Experiment Name: At_Shoots__P Parameter: Tissue Value: Shoots vs. Whole Plant
  misc_feature: MA Experiment ID: 20000185 Result: Down-regulated in Transcription
  misc_feature: MA Experiment 20000185 PARAMETER Experiment Name: At_Roots__P Parameter: Age (day) Value: 7 vs. 21
  misc_feature: MA Experiment 20000185 PARAMETER Experiment Name: At_Roots__P Parameter: Organism Value: A. thaliana
  misc_feature: MA Experiment 20000185 PARAMETER Experiment Name: At_Roots__P Parameter: Tissue Value: Roots vs. Whole Plant
  misc_feature: MA Experiment ID: 20000264 Result: Down-regulated in Transcription
  misc_feature: MA Experiment 20000264 PARAMETER Experiment Name: At_Open_Flower_P Parameter: Age (day) Value: 21
  misc_feature: MA Experiment 20000264 PARAMETER Experiment Name: At_Open_Flower_P Parameter: Plant Line Value: WS
  misc_feature: MA Experiment 20000264 PARAMETER Experiment Name: At_Open_Flower_P Parameter: Tissue Value: Open Flower vs. Whole Plant
  misc_feature: MA Experiment ID: 20000308 Result: Down-regulated in Transcription
  misc_feature: MA Experiment 20000308 PARAMETER Experiment Name: At_100mM_NaCl__P Parameter: Age (day) Value: 17
  misc_feature: MA Experiment 20000308 PARAMETER Experiment Name: At_100mM_NaCl__P Parameter: Organism Value: A. thaliana
  misc_feature: MA Experiment 20000308 PARAMETER Experiment Name: At_100mM_NaCl__P Parameter: Plant Line Value: WS
  misc_feature: MA Experiment 20000308 PARAMETER Experiment Name: At_100mM_NaCl__P Parameter: Timepoint (hr) Value: 72
  misc_feature: MA Experiment 20000308 PARAMETER Experiment Name: At_100mM_NaCl__P Parameter: Tissue Value: Whole Plant
  misc_feature: MA Experiment 20000308 PARAMETER Experiment Name: At_100mM_NaCl__P Parameter: Treatment Value: 100mM NaCl vs. No Treatment
  misc_feature: MA Experiment ID: 20000438 Result: Up-regulated in Transcription
  misc_feature: MA Experiment 20000438 PARAMETER Experiment Name: At_Shoots__P Parameter: Age (day) Value: 14
  misc_feature: MA Experiment 20000438 PARAMETER Experiment Name: At_Shoots__P Parameter: Tissue Value: Shoots vs. Whole Plant
  misc_feature: MA Experiment ID: 20000439 Result: Down-regulated in Transcription
  misc_feature: MA Experiment 20000439 PARAMETER Experiment Name: At_Roots__P Parameter: Age (day) Value: 14 vs. 21
  misc_feature: MA Experiment 20000439 PARAMETER Experiment Name: At_Roots__P Parameter: Organism Value: A. thaliana
  misc_feature: MA Experiment 20000439 PARAMETER Experiment Name: At_Roots__P Parameter: Tissue Value: Roots vs. Whole Plant
  misc_feature: MA Experiment ID: 20000460 Result: Down-regulated in Transcription
  misc_feature: MA Experiment 20000460 PARAMETER Experiment Name: At_10percent_PEG_P Parameter: Age (day) Value: 12
  misc_feature: MA Experiment 20000460 PARAMETER Experiment Name: At_10percent_PEG_P Parameter: Organism Value: A. thaliana
  misc_feature: MA Experiment 20000460 PARAMETER Experiment Name: At_10percent_PEG_P Parameter: Plant Line Value: WS
  misc_feature: MA Experiment 20000460 PARAMETER Experiment Name: At_10percent_PEG_P Parameter: Timepoint (day) Value: 12
  misc_feature: MA Experiment 20000460 PARAMETER Experiment Name: At_10percent_PEG_P Parameter: Tissue Value: Whole Plant
  misc_feature: MA Experiment 20000460 PARAMETER Experiment Name: At_10percent_PEG_P Parameter: Treatment Value: 10percent PEG vs. No Treatment
  misc_feature: MA Experiment ID: 20000794 Result: Down-regulated in Transcription
  misc_feature: MA Experiment 20000794 PARAMETER Experiment Name: At_Petals_P Parameter: Age (day) Value: 23-25 days
  misc_feature: MA Experiment 20000794 PARAMETER Experiment Name: At_Petals_P Parameter: Plant Line Value: WS
  misc_feature: MA Experiment 20000794 PARAMETER Experiment Name: At_Petals_P Parameter: Tissue Value: Petals vs. Whole plant
  misc_feature: MA Experiment ID: 20001450 Result: Down-regulated in Transcription
  misc_feature: MA Experiment 20001450 PARAMETER Experiment Name: At_Far-red-induction_P Parameter: Age (day) Value: 7
  misc_feature: MA Experiment 20001450 PARAMETER Experiment Name: At_Far-red-induction_P Parameter: Light Value: Far-red vs. White
  misc_feature: MA Experiment 20001450 PARAMETER Experiment Name: At_Far-red-induction_P Parameter: Organism Value: A. thaliana
  misc_feature: MA Experiment 20001450 PARAMETER Experiment Name: At_Far-red-induction_P Parameter: Plant Line Value: Columbia
  misc_feature: MA Experiment 20001450 PARAMETER Experiment Name: At_Far-red-induction_P Parameter: Timepoint (hr) Value: 8
  misc_feature: MA Experiment 20001450 PARAMETER Experiment Name: At_Far-red-induction_P Parameter: Tissue Value: Whole Plant
  misc_feature: MA Experiment ID: 20001451 Result: Down-regulated in Transcription
  misc_feature: MA Experiment 20001451 PARAMETER Experiment Name: At_Far-red-induction_P Parameter: Age (day) Value: 7
  misc_feature: MA Experiment 20001451 PARAMETER Experiment Name: At_Far-red-induction_P Parameter: Light Value: Far-red vs. White
  misc_feature: MA Experiment 20001451 PARAMETER Experiment Name: At_Far-red-induction_P Parameter: Organism Value: A. thaliana
  misc_feature: MA Experiment 20001451 PARAMETER Experiment Name: At_Far-red-induction_P Parameter: Plant Line Value: Columbia
  misc_feature: MA Experiment 20001451 PARAMETER Experiment Name: At_Far-red-induction_P Parameter: Timepoint (hr) Value: 24
  misc_feature: MA Experiment 20001451 PARAMETER Experiment Name: At_Far-red-induction_P Parameter: Tissue Value: Whole Plant
  misc_feature: MA Experiment ID: 20001555 Result: Down-regulated in Transcription
  misc_feature: MA Experiment 20001555 PARAMETER Experiment Name: At_Drought_Soil_Dry_P Parameter: Age (day) Value: 24
  misc_feature: MA Experiment 20001555 PARAMETER Experiment Name: At_Drought_Soil_Dry_P Parameter: Organism Value: A. thaliana
  misc_feature: MA Experiment 20001555 PARAMETER Experiment Name: At_Drought_Soil_Dry_P Parameter: Plant Line Value: WS
  misc_feature: MA Experiment 20001555 PARAMETER Experiment Name: At_Drought_Soil_Dry_P Parameter: Post Timepoint (hr) Value: None
  misc_feature: MA Experiment 20001555 PARAMETER Experiment Name: At_Drought_Soil_Dry_P Parameter: Post-Treatment Value: None
  misc_feature: MA Experiment 20001555 PARAMETER Experiment Name: At_Drought_Soil_Dry_P Parameter: Timepoint (day) Value: 10
  misc_feature: MA Experiment 20001555 PARAMETER Experiment Name: At_Drought_Soil_Dry_P Parameter: Treatment Value: Drought vs. No Drought
  misc_feature: MA Experiment ID: 20001557 Result: Down-regulated in Transcription
  misc_feature: MA Experiment 20001557 PARAMETER Experiment Name: At_Drought_Soil_Dry_P Parameter: Age (day) Value: 27
  misc_feature: MA Experiment 20001557 PARAMETER Experiment Name: At_Drought_Soil_Dry_P Parameter: Organism Value: A. thaliana
  misc_feature: MA Experiment 20001557 PARAMETER Experiment Name: At_Drought_Soil_Dry_P Parameter: Plant Line Value: WS
  misc_feature: MA Experiment 20001557 PARAMETER Experiment Name: At_Drought_Soil_Dry_P Parameter: Post Timepoint (hr) Value: 3
  misc_feature: MA Experiment 20001557 PARAMETER Experiment Name: At_Drought_Soil_Dry_P Parameter: Post-Treatment Value: Re-Water vs. No Drought
  misc_feature: MA Experiment 20001557 PARAMETER Experiment Name: At_Drought_Soil_Dry_P Parameter: Timepoint (day) Value: 13
  misc_feature: MA Experiment 20001557 PARAMETER Experiment Name: At_Drought_Soil_Dry_P Parameter: Treatment Value: Drought vs. No Drought
  misc_feature: MA Experiment ID: 20001559 Result: Down-regulated in Transcription
  misc_feature: MA Experiment 20001559 PARAMETER Experiment Name: At_Drought_Soil_Dry_P Parameter: Age (day) Value: 28
  misc_feature: MA Experiment 20001559 PARAMETER Experiment Name: At_Drought_Soil_Dry_P Parameter: Organism Value: A. thaliana
  misc_feature: MA Experiment 20001559 PARAMETER Experiment Name: At_Drought_Soil_Dry_P Parameter: Plant Line Value: WS
  misc_feature: MA Experiment 20001559 PARAMETER Experiment Name: At_Drought_Soil_Dry_P Parameter: Post Timepoint (hr) Value: 29
  misc_feature: MA Experiment 20001559 PARAMETER Experiment Name: At_Drought_Soil_Dry_P Parameter: Post-Treatment Value: Re-Water vs. No Drought
  misc_feature: MA Experiment 20001559 PARAMETER Experiment Name: At_Drought_Soil_Dry_P Parameter: Timepoint (day) Value: 14
  misc_feature: MA Experiment 20001559 PARAMETER Experiment Name: At_Drought_Soil_Dry_P Parameter: Treatment Value: Drought vs. No Drought
  misc_feature: MA Experiment ID: 20001560 Result: Down-regulated in Transcription
  misc_feature: MA Experiment 20001560 PARAMETER Experiment Name: At_Drought_Soil_Dry_P Parameter: Age (day) Value: 28
  misc_feature: MA Experiment 20001560 PARAMETER Experiment Name: At_Drought_Soil_Dry_P Parameter: Organism Value: A. thaliana
  misc_feature: MA Experiment 20001560 PARAMETER Experiment Name: At_Drought_Soil_Dry_P Parameter: Plant Line Value: WS
  misc_feature: MA Experiment 20001560 PARAMETER Experiment Name: At_Drought_Soil_Dry_P Parameter: Post Timepoint (hr) Value: None
  misc_feature: MA Experiment 20001560 PARAMETER Experiment Name: At_Drought_Soil_Dry_P Parameter: Post-Treatment Value: None
  misc_feature: MA Experiment 20001560 PARAMETER Experiment Name: At_Drought_Soil_Dry_P Parameter: Timepoint (day) Value: 14
  misc_feature: MA Experiment 20001560 PARAMETER Experiment Name: At_Drought_Soil_Dry_P Parameter: Treatment Value: Drought vs. No Drought
  misc_feature: MA Experiment ID: 20001757 Result: Up-regulated in Transcription
  misc_feature: MA Experiment 20001757 PARAMETER Experiment Name: At_50mM_NH4NO3_L-to-H_P Parameter: Timepoint (hr) Value: 6
  misc_feature: MA Experiment 20001757 PARAMETER Experiment Name: At_50mM_NH4NO3_L-to-H_P Parameter: Tissue Value: Leaf
  misc_feature: MA Experiment 20001757 PARAMETER Experiment Name: At_50mM_NH4NO3_L-to-H_P Parameter: Treatment Value: 50mM NH4NO3 vs 100mM Mannitol
  misc_feature: MA Experiment ID: 20001905 Result: Down-regulated in Transcription
  misc_feature: MA Experiment 20001905 PARAMETER Experiment Name: At_Drought_Reproduction_P Parameter: Age (day) Value: 40
  misc_feature: MA Experiment 20001905 PARAMETER Experiment Name: At_Drought_Reproduction_P Parameter: Organism Value: A. thaliana
  misc_feature: MA Experiment 20001905 PARAMETER Experiment Name: At_Drought_Reproduction_P Parameter: Plant Line Value: WS
  misc_feature: MA Experiment 20001905 PARAMETER Experiment Name: At_Drought_Reproduction_P Parameter: Timepoint (day) Value: 10
  misc_feature: MA Experiment 20001905 PARAMETER Experiment Name: At_Drought_Reproduction_P Parameter: Tissue Value: Rosettes
  misc_feature: MA Experiment 20001905 PARAMETER Experiment Name: At_Drought_Reproduction_P Parameter: Treatment Value: Drought vs. No Drought
  misc_feature: MA Experiment ID: 20001906 Result: Down-regulated in Transcription
  misc_feature: MA Experiment 20001906 PARAMETER Experiment Name: At_Drought_Reproduction_P Parameter: Age (day) Value: 35
  misc_feature: MA Experiment 20001906 PARAMETER Experiment Name: At_Drought_Reproduction_P Parameter: Organism Value: A. thaliana
  misc_feature: MA Experiment 20001906 PARAMETER Experiment Name: At_Drought_Reproduction_P Parameter: Plant Line Value: WS
  misc_feature: MA Experiment 20001906 PARAMETER Experiment Name: At_Drought_Reproduction_P Parameter: Timepoint (day) Value: 5
  misc_feature: MA Experiment 20001906 PARAMETER Experiment Name: At_Drought_Reproduction_P Parameter: Tissue Value: Siliques
  misc_feature: MA Experiment 20001906 PARAMETER Experiment Name: At_Drought_Reproduction_P Parameter: Treatment Value: Drought vs. No Drought
ataaatacacatatctcactctctctgatctccgcttctcttcgccaacaaatgtcgaccgctcctctctccggcttctttctcacttcactttctccttctcaatcttctctccagaaactctctcttcgtacttcttccaccgtcgcttgcctcccacccgcctcttcttcttcctcatcttcctcctcctcgtcttcccgttccgttccaacgcttatccgtaacgagccagtttttgccgctcctgctcctatcattgccccttattggagtgaagagatgggaaccgaagcatacgacgaggctattgaagctctcaagaagcttctcatcgagaaggaagagctaaagacggttgcagcggcaaaggtggagcagatcacagcggctcttcagacaggtacttcatccgacaagaaagctttcgaccccgtcgaaaccattaagcagggcttcatcaaattcaagaaggagaaatacgaaaccaaccctgctttgtacggtgagctcgcaaagggtcaaagtcctaagtacatggtgtttgcttgttcagactcacgtgtgtgtccatcacacgttctggactttcagccaggagatgccttcgtggtccgtaacatagccaacatggttcctcctttcgacaaggtcaaatacggtggcgttggagcagccattgaatacgcggtcttacaccttaaggtggagaacattgtggtgataggacacagtgcatgtggtgggatcaaagggcttatgtctttccccttagatggaaacaactccactgacttcatagaggactgggtcaaaatctgtttaccagccaagtcaaaggttatatcagaacttggagattcagcctttgaagatcaatgtggccgatgtgaaagggaggcggtgaatgtttcactagcaaacctattgacatatccatttgtgagagaaggacttgtgaagggaacacttgctttgaagggaggctactatgacttcgtcaagggtgcttttgagctttggggacttgaatttggcctctccgaaactagctctgtatgaaccaatccatcatcatcatcatcatcatgaccatccatcatcatcatcattattatcatcgtatataatatatatctaccccatatgtaatttgtaatgtgcctttgactgtgatgagttatctctccctctctaccaactttcttcatatatataaaacaaaaaggaaaagcagatgatatagatctttcgtggtttaattatgaacaattgtctttattatttgtgtatcaaatcggttgt

SEQ ID NO: 85360 - protein, 353 aa, Arabidopsis thaliana
  peptide (1)..(353): Ceres Seq. ID no. 12680187
  misc_feature (18)..(353): Homolog of NCBI NO: 30678350 NR Description: carbonic anhydrase, chloroplast precursor thaliana] >gi|16226255|gb|AAL16116.1|AF428284_1 AT3g01500/F4P13_5 thaliana] >gi|16226669|gb|AAL16228.1|AF428459_1 AT3g01500/F4P13_5
  misc_feature (18)..(353): Homolog of NCBI NO: 30678353 NR Description: carbonic anhydrase, chloroplast precursor thaliana] >gi|115470|sp|P27140|CAHC_ARATH Carbonic anhydrase, precursor (Carbonate dehydratase) >gi|320554|pir||S28412
  misc_feature (95)..(353): Homolog of NCBI NO: 30678347 NR Description: carbonic anhydrase, chloroplast precursor thaliana] >gi|20259533|gb|AAM13886.1| putative carbonic
  misc_feature (18)..(353): Homolog of NCBI NO: 7436820 NR Description: carbonate dehydratase (EC 4.2.1.1) 1b - Populus x Populus tremuloides >gi|1354517|gb|AAB65822.1| carbonic
  misc_feature (18)..(353): Homolog of NCBI NO: 7436819 NR Description: carbonate dehydratase (EC 4.2.1.1) 1a - Populus x Populus tremuloides >gi|1354515|gb|AAC49785.1| carbonic
  misc_feature (95)..(353): Homolog of NCBI NO: 21903379 NR Description: Carbonic anhydrase 2 (Carbonate dehydratase 2) AT5g14740 [Arabidopsis thaliana]
  misc_feature (95)..(353): Homolog of NCBI NO: 30685030 NR Description: CARBONIC ANHYDRASE 2 [Arabidopsis thaliana]
  misc_feature (95)..(353): Homolog of NCBI NO: 438449 NR Description: carbonic anhydrase
  misc_feature (18)..(353): Homolog of NCBI NO: 1168738 NR Description: CARBONIC ANHYDRASE 1 (CARBONATE DEHYDRATASE 1)
  misc_feature (18)..(353): Homolog of NCBI NO: 1168746 NR Description: CARBONIC ANHYDRASE (CARBONATE DEHYDRATASE)
INTHISLSLISASLRQQMSTAPLSGFFLTSLSPSQSSLQKLSLRTSSTVACLPPASSSSSSSSSSSSRSVPTLIRNEPVFAAPAPIIAPYWSEEMGTEAYDEAIEALKKLLIEKEELKTVAAAKVEQITAALQTGTSSDKKAFDPVETIKQGFIKFKKEKYETNPALYGELAKGQSPKYMVFACSDSRVCPSHVLDFQPGDAFVVRNIANMVPPFDKVKYGGVGAAIEYAVLHLKVENIVVIGHSACGGIKGLMSFPLDGNNSTDFIEDWVKICLPAKSKVISELGDSAFEDQCGRCEREAVNVSLANLLTYPFVREGLVKGTLALKGGYYDFVKGAFELWGLEFGLSETSSV

SEQ ID NO: 85361 - protein, 336 aa, Arabidopsis thaliana; identical to SEQ ID NO: 35085
  peptide (1)..(336): Ceres Seq. ID no. 12680188
  misc_feature (1)..(336): Homolog of NCBI NO: 30678350 NR Description: carbonic anhydrase, chloroplast precursor thaliana] >gi|16226255|gb|AAL16116.1|AF428284_1 AT3g01500/F4P13_5 thaliana] >gi|16226669|gb|AAL16228.1|AF428459_1 AT3g01500/F4P13_5
  misc_feature (1)..(336): Homolog of NCBI NO: 30678353 NR Description: carbonic anhydrase, chloroplast precursor thaliana] >gi|115470|sp|P27140|CAHC_ARATH Carbonic anhydrase, precursor (Carbonate dehydratase) >gi|320554|pir||S28412
  misc_feature (78)..(336): Homolog of NCBI NO: 30678347 NR Description: carbonic anhydrase, chloroplast precursor thaliana] >gi|20259533|gb|AAM13886.1| putative carbonic
  misc_feature (1)..(336): Homolog of NCBI NO: 7436820 NR Description: carbonate dehydratase (EC 4.2.1.1) 1b - Populus x Populus tremuloides >gi|1354517|gb|AAB65822.1| carbonic
  misc_feature (1)..(336): Homolog of NCBI NO: 7436819 NR Description: carbonate dehydratase (EC 4.2.1.1) 1a - Populus x Populus tremuloides >gi|1354515|gb|AAC49785.1| carbonic
  misc_feature (78)..(336): Homolog of NCBI NO: 21903379 NR Description: Carbonic anhydrase 2 (Carbonate dehydratase 2) AT5g14740 [Arabidopsis thaliana]
  misc_feature (78)..(336): Homolog of NCBI NO: 30685030 NR Description: CARBONIC ANHYDRASE 2 [Arabidopsis thaliana]
  misc_feature (78)..(336): Homolog of NCBI NO: 438449 NR Description: carbonic anhydrase
  misc_feature (1)..(336): Homolog of NCBI NO: 1168738 NR Description: CARBONIC ANHYDRASE 1 (CARBONATE DEHYDRATASE 1)
  misc_feature (1)..(336): Homolog of NCBI NO: 1168746 NR Description: CARBONIC ANHYDRASE (CARBONATE DEHYDRATASE)

SEQ ID NO: 85362 - protein, 259 aa, Arabidopsis thaliana; identical to SEQ ID NO: 35086
  peptide (1)..(259): Ceres Seq. ID no. 12680189
  misc_feature (1)..(259): Homolog of NCBI NO: 30678350 NR Description: carbonic anhydrase, chloroplast precursor thaliana] >gi|16226255|gb|AAL16116.1|AF428284_1 AT3g01500/F4P13_5 thaliana] >gi|16226669|gb|AAL16228.1|AF428459_1 AT3g01500/F4P13_5
  misc_feature (1)..(259): Homolog of NCBI NO: 30678353 NR Description: carbonic anhydrase, chloroplast precursor thaliana] >gi|115470|sp|P27140|CAHC_ARATH Carbonic anhydrase, precursor (Carbonate dehydratase) >gi|320554|pir||S28412
  misc_feature (1)..(259): Homolog of NCBI NO: 30678347 NR Description: carbonic anhydrase, chloroplast precursor thaliana] >gi|20259533|gb|AAM13886.1| putative carbonic
  misc_feature (1)..(259): Homolog of NCBI NO: 7436820 NR Description: carbonate dehydratase (EC 4.2.1.1) 1b - Populus x Populus tremuloides >gi|1354517|gb|AAB65822.1| carbonic
  misc_feature (1)..(259): Homolog of NCBI NO: 7436819 NR Description: carbonate dehydratase (EC 4.2.1.1) 1a - Populus x Populus tremuloides >gi|1354515|gb|AAC49785.1| carbonic
  misc_feature (1)..(259): Homolog of NCBI NO: 21903379 NR Description: Carbonic anhydrase 2 (Carbonate dehydratase 2) AT5g14740 [Arabidopsis thaliana]
  misc_feature (1)..(259): Homolog of NCBI NO: 30685030 NR Description: CARBONIC ANHYDRASE 2 [Arabidopsis thaliana]
  misc_feature (1)..(259): Homolog of NCBI NO: 438449 NR Description: carbonic anhydrase
  misc_feature (1)..(259): Homolog of NCBI NO: 1168738 NR Description: CARBONIC ANHYDRASE 1 (CARBONATE DEHYDRATASE 1)
  misc_feature (1)..(259): Homolog of NCBI NO: 1168746 NR Description: CARBONIC ANHYDRASE (CARBONATE DEHYDRATASE)

SEQ ID NO: 85363 - DNA, 1096 bp, Arabidopsis thaliana
  misc_feature (1)..(1096): Ceres Seq. ID no. 12680190
  misc_feature: MA Experiment ID: 20000173 Result: Up-regulated in Transcription
  misc_feature: MA Experiment 20000173 PARAMETER Experiment Name: At_42deg_Heat_P Parameter: Age (day) Value: 14
  misc_feature: MA Experiment 20000173 PARAMETER Experiment Name: At_42deg_Heat_P Parameter: Organism Value: A. thaliana
  misc_feature: MA Experiment 20000173 PARAMETER Experiment Name: At_42deg_Heat_P Parameter: Plant Line Value: WS
  misc_feature: MA Experiment 20000173 PARAMETER Experiment Name: At_42deg_Heat_P Parameter: Temperature (deg C) Value: 42 vs. 22
  misc_feature: MA Experiment 20000173 PARAMETER Experiment Name: At_42deg_Heat_P Parameter: Timepoint (hr) Value: 6
  misc_feature: MA Experiment 20000173 PARAMETER Experiment Name: At_42deg_Heat_P Parameter: Tissue Value: Aerial
  misc_feature: MA Experiment ID: 20000182 Result: Up-regulated in Transcription
  misc_feature: MA Experiment 20000182 PARAMETER Experiment Name: At_2mM_SA_P Parameter: Age (day) Value: 14
  misc_feature: MA Experiment 20000182 PARAMETER Experiment Name: At_2mM_SA_P Parameter: Organism Value: A. thaliana
  misc_feature: MA Experiment 20000182 PARAMETER Experiment Name: At_2mM_SA_P Parameter: Plant Line Value: WS
  misc_feature: MA Experiment 20000182 PARAMETER Experiment Name: At_2mM_SA_P Parameter: Timepoint (hr) Value: 6
  misc_feature: MA Experiment 20000182 PARAMETER Experiment Name: At_2mM_SA_P Parameter: Tissue Value: Aerial
  misc_feature: MA Experiment 20000182 PARAMETER Experiment Name: At_2mM_SA_P Parameter: Treatment Value: 2mM SA vs. No Treatment
  misc_feature: MA Experiment ID: 20000184 Result: Down-regulated in Transcription
  misc_feature: MA Experiment 20000184 PARAMETER Experiment Name: At_Shoots__P Parameter: Age (day) Value: 7
  misc_feature: MA Experiment 20000184 PARAMETER Experiment Name: At_Shoots__P Parameter: Tissue Value: Shoots vs. Whole Plant
  misc_feature: MA Experiment ID: 20000227 Result: Down-regulated in Transcription
  misc_feature: MA Experiment 20000227 PARAMETER Experiment Name: At_Root-Tips-vs-Tops_P Parameter: Tissue Value: Root Tips vs. Root Tops
  misc_feature: MA Experiment ID: 20000437 Result: Up-regulated in Transcription
  misc_feature: MA Experiment 20000437 PARAMETER Experiment Name: At_Drought_P Parameter: Age (day) Value: 8
  misc_feature: MA Experiment 20000437 PARAMETER Experiment Name: At_Drought_P Parameter: Organism Value: A. thaliana
  misc_feature: MA Experiment 20000437 PARAMETER Experiment Name: At_Drought_P Parameter: Plant Line Value: WS
  misc_feature: MA Experiment 20000437 PARAMETER Experiment Name: At_Drought_P Parameter: Timepoint (hr) Value: 24
  misc_feature: MA Experiment 20000437 PARAMETER Experiment Name: At_Drought_P Parameter: Tissue Value: Whole Plant
  misc_feature: MA Experiment 20000437 PARAMETER Experiment Name: At_Drought_P Parameter: Treatment Value: Drought vs. No Drought
  misc_feature: MA Experiment ID: 20000438 Result: Down-regulated in Transcription
  misc_feature: MA Experiment 20000438 PARAMETER Experiment Name: At_Shoots__P Parameter: Age (day) Value: 14
  misc_feature: MA Experiment 20000438 PARAMETER Experiment Name: At_Shoots__P Parameter: Tissue Value: Shoots vs. Whole Plant
  misc_feature: MA Experiment ID: 20001555 Result: Up-regulated in Transcription
  misc_feature: MA Experiment 20001555 PARAMETER Experiment Name: At_Drought_Soil_Dry_P Parameter: Age (day) Value: 24
  misc_feature: MA Experiment 20001555 PARAMETER Experiment Name: At_Drought_Soil_Dry_P Parameter: Organism Value: A. thaliana
  misc_feature: MA Experiment 20001555 PARAMETER Experiment Name: At_Drought_Soil_Dry_P Parameter: Plant Line Value: WS
  misc_feature: MA Experiment 20001555 PARAMETER Experiment Name: At_Drought_Soil_Dry_P Parameter: Post Timepoint (hr) Value: None
  misc_feature: MA Experiment 20001555 PARAMETER Experiment Name: At_Drought_Soil_Dry_P Parameter: Post-Treatment Value: None
  misc_feature: MA Experiment 20001555 PARAMETER Experiment Name: At_Drought_Soil_Dry_P Parameter: Timepoint (day) Value: 10
  misc_feature: MA Experiment 20001555 PARAMETER Experiment Name: At_Drought_Soil_Dry_P Parameter: Treatment Value: Drought vs. No Drought
  misc_feature: MA Experiment ID: 20001556 Result: Up-regulated in Transcription
  misc_feature: MA Experiment 20001556 PARAMETER Experiment Name: At_Drought_Soil_Dry_P Parameter: Age (day) Value: 26
  misc_feature: MA Experiment 20001556 PARAMETER Experiment Name: At_Drought_Soil_Dry_P Parameter: Organism Value: A. thaliana
  misc_feature: MA Experiment 20001556 PARAMETER Experiment Name: At_Drought_Soil_Dry_P Parameter: Plant Line Value: WS
  misc_feature: MA Experiment 20001556 PARAMETER Experiment Name: At_Drought_Soil_Dry_P Parameter: Post Timepoint (hr) Value: None
  misc_feature: MA Experiment 20001556 PARAMETER Experiment Name: At_Drought_Soil_Dry_P Parameter: Post-Treatment Value: None
  misc_feature: MA Experiment 20001556 PARAMETER Experiment Name: At_Drought_Soil_Dry_P Parameter: Timepoint (day) Value: 12
  misc_feature: MA Experiment 20001556 PARAMETER Experiment Name: At_Drought_Soil_Dry_P Parameter: Treatment Value: Drought vs. No Drought
  misc_feature: MA Experiment ID: 20001557 Result: Up-regulated in Transcription
  misc_feature: MA Experiment 20001557 PARAMETER Experiment Name: At_Drought_Soil_Dry_P Parameter: Age (day) Value: 27
  misc_feature: MA Experiment 20001557 PARAMETER Experiment Name: At_Drought_Soil_Dry_P Parameter: Organism Value: A. thaliana
  misc_feature: MA Experiment 20001557 PARAMETER Experiment Name: At_Drought_Soil_Dry_P Parameter: Plant Line Value: WS
  misc_feature: MA Experiment 20001557 PARAMETER Experiment Name: At_Drought_Soil_Dry_P Parameter: Post Timepoint (hr) Value: 3
  misc_feature: MA Experiment 20001557 PARAMETER Experiment Name: At_Drought_Soil_Dry_P Parameter: Post-Treatment Value: Re-Water vs. No Drought
  misc_feature: MA Experiment 20001557 PARAMETER Experiment Name: At_Drought_Soil_Dry_P Parameter: Timepoint (day) Value: 13
  misc_feature: MA Experiment 20001557 PARAMETER Experiment Name: At_Drought_Soil_Dry_P Parameter: Treatment Value: Drought vs. No Drought
  misc_feature: MA Experiment ID: 20001905 Result: Up-regulated in Transcription
  misc_feature: MA Experiment 20001905 PARAMETER Experiment Name: At_Drought_Reproduction_P Parameter: Age (day) Value: 40
  misc_feature: MA Experiment 20001905 PARAMETER Experiment Name: At_Drought_Reproduction_P Parameter: Organism Value: A. thaliana
  misc_feature: MA Experiment 20001905 PARAMETER Experiment Name: At_Drought_Reproduction_P Parameter: Plant Line Value: WS
  misc_feature: MA Experiment 20001905 PARAMETER Experiment Name: At_Drought_Reproduction_P Parameter: Timepoint (day) Value: 10
  misc_feature: MA Experiment 20001905 PARAMETER Experiment Name: At_Drought_Reproduction_P Parameter: Tissue Value: Rosettes
  misc_feature: MA Experiment 20001905 PARAMETER Experiment Name: At_Drought_Reproduction_P Parameter: Treatment Value: Drought vs. No Drought
ccctctctttaagctctctctctttctgtggctattctctttctctctttctctctgaatccgccgccacgccttcaccatggcctggcttagccgcgtgagaggagtttcgccggtgacaaggctcgcagcgattcgtcgatcttttggatcagcggccgcgttggagtttgactacgactccgatgacgagtacttgtacggagatgatcgccgcctcgcggaaccgaggcttgggttggatggatcggggccggatagaggagtgcagtgggtgcttatgggagcccctggagcatggaggcacgtcttcgccgagaggctctccaaactgcttgaagttcctcacatttccatggggtcccttgtccgtcaagaactcaaccctagatcttctctctacaaggagattgcaagtgctgtaaatgaacgaaagctggttccaaagagtgttgtgtttgcgttgctatcaaagaggctcgaagaaggctatgcaagaggggaaactggtttcattcttcatggcattcctcgcactcgttttcaagccgaaactcttgatcaaatcgctcagattgacctcgttgtcaatctcaaatgctctgaagaccatctggtaaaccggaatgaaacagctctgcctcagcaggagttcctcggctctatgttacactcacctgttgcaatcaatgctcggagggagagtgtcggtgtctacgcacaggaggtggaagaatactataggaagcagaggaaactgctagactttcatgttggcggtgccacatcagcagacacatggcagggcttgttggcagctttacatctgaagcaggtgaatttgacgacttcacagaagctaactctgtgatgatgaactacaaaacagagctttgctttataaattttgatctttctctctcattttatgggtcttcttaacccctaatatgcaactttttttttgttttctttttctgtaattcaaagttttgcgagagatcaaacgtgatgaggatgataccactaaagcttgtaatgagtctattatatatacaacaaagattttccatctatgaaaaatagttcctatatc

SEQ ID NO: 85364 - protein, 263 aa, Arabidopsis thaliana
  peptide (1)..(263): Ceres Seq. ID no. 12680191
  misc_feature (1)..(263): Homolog of NCBI NO: 30678433 NR Description: adenylate kinase -related [Arabidopsis thaliana] AT3g01820/F28J7_15 [Arabidopsis thaliana]
  misc_feature (1)..(217): Homolog of NCBI NO: 6091724 NR Description: putative adenylate kinase [Arabidopsis thaliana]
  misc_feature (4)..(182): Homolog of NCBI NO: 15228109 NR Description: putative adenylate kinase; protein id: supported by cDNA: 15831., supported by cDNA: gi_15010785, by cDNA: gi_15450418, supported by cDNA: gi_15810108 [Arabidopsis
  misc_feature (1)..(182): Homolog of NCBI NO: 29427816 NR Description: Adenylate kinase, chloroplast precursor (ATP-AMP
  misc_feature (61)..(180): Homolog of NCBI NO: 30687836 NR Description: adenylate kinase -related [Arabidopsis thaliana]
  misc_feature (111)..(182): Homolog of NCBI NO: 6063552 NR Description: ESTs AU065232(E60855),C23624(S1554), correspond to a region of the predicted gene.~similar to putative
  misc_feature (60)..(116): Homolog of NCBI NO: 6063552 NR Description: ESTs AU065232(E60855),C23624(S1554), correspond to a region of the predicted gene.~similar to putative
  misc_feature (66)..(182): Homolog of NCBI NO: 1076067 NR Description: adenylate kinase (EC 2.7.4.3) - Streptomyces
  misc_feature (66)..(182): Homolog of NCBI NO: 2924292 NR Description: AdK adenylate kinase [Streptomyces coelicolor]
  misc_feature (66)..(182): Homolog of NCBI NO: 27468720 NR Description: adenylate kinase [Staphylococcus epidermidis ATCC
MAWLSRVRGVSPVTRLAAIRRSFGSAAALEFDYDSDDEYLYGDDRRLAEPRLGLDGSGPDRGVQWVLMGAPGAWRHVFAERLSKLLEVPHISMGSLVRQELNPRSSLYKEIASAVNERKLVPKSVVFALLSKRLEEGYARGETGFILHGIPRTRFQAETLDQIAQIDLVVNLKCSEDHLVNRNETALPQQEFLGSMLHSPVAINARRESVGVYAQEVEEYYRKQRKLLDFHVGGATSADTWQGLLAALHLKQVNLTTSQKLTL

SEQ ID NO: 85365 - protein, 196 aa, Arabidopsis thaliana
  peptide (1)..(196): Ceres Seq. ID no. 12680192
  misc_feature (1)..(196): Homolog of NCBI NO: 30678433 NR Description: adenylate kinase -related [Arabidopsis thaliana] AT3g01820/F28J7_15 [Arabidopsis thaliana]
  misc_feature (1)..(150): Homolog of NCBI NO: 6091724 NR Description: putative adenylate kinase [Arabidopsis thaliana]
  misc_feature (1)..(115): Homolog of NCBI NO: 15228109 NR Description: putative adenylate kinase; protein id: supported by cDNA: 15831., supported by cDNA: gi_15010785, by cDNA: gi_15450418, supported by cDNA: gi_15810108 [Arabidopsis
  misc_feature (1)..(115): Homolog of NCBI NO: 29427816 NR Description: Adenylate kinase, chloroplast precursor (ATP-AMP
  misc_feature (1)..(113): Homolog of NCBI NO: 30687836 NR Description: adenylate kinase -related [Arabidopsis thaliana]
  misc_feature (44)..(115): Homolog of NCBI NO: 6063552 NR Description: ESTs AU065232(E60855),C23624(S1554), correspond to a region of the predicted gene.~similar to putative
  misc_feature (1)..(49): Homolog of NCBI NO: 6063552 NR Description: ESTs AU065232(E60855),C23624(S1554), correspond to a region of the predicted gene.~similar to putative
  misc_feature (1)..(115): Homolog of NCBI NO: 1076067 NR Description: adenylate kinase (EC 2.7.4.3) - Streptomyces
  misc_feature (1)..(115): Homolog of NCBI NO: 2924292 NR Description: AdK adenylate kinase [Streptomyces coelicolor]
  misc_feature (1)..(115): Homolog of NCBI NO: 27468720 NR Description: adenylate kinase [Staphylococcus epidermidis ATCC
MGAPGAWRHVFAERLSKLLEVPHISMGSLVRQELNPRSSLYKEIASAVNERKLVPKSVVFALLSKRLEEGYARGETGFILHGIPRTRFQAETLDQIAQIDLVVNLKCSEDHLVNRNETALPQQEFLGSMLHSPVAINARRESVGVYAQEVEEYYRKQRKLLDFHVGGATSADTWQGLLAALHLKQVNLTTSQKLTL

SEQ ID NO: 85366 - protein, 171 aa, Arabidopsis thaliana
  peptide (1)..(171): Ceres Seq. ID no. 12680193
  misc_feature (1)..(171): Homolog of NCBI NO: 30678433 NR Description: adenylate kinase -related [Arabidopsis thaliana] AT3g01820/F28J7_15 [Arabidopsis thaliana]
  misc_feature (1)..(125): Homolog of NCBI NO: 6091724 NR Description: putative adenylate kinase [Arabidopsis thaliana]
  misc_feature (1)..(90): Homolog of NCBI NO: 15228109 NR Description: putative adenylate kinase; protein id: supported by cDNA: 15831., supported by cDNA: gi_15010785, by cDNA: gi_15450418, supported by cDNA: gi_15810108 [Arabidopsis
  misc_feature (1)..(90): Homolog of NCBI NO: 29427816 NR Description: Adenylate kinase, chloroplast precursor (ATP-AMP
  misc_feature (1)..(88): Homolog of NCBI NO: 30687836 NR Description: adenylate kinase -related [Arabidopsis thaliana]
  misc_feature (19)..(90): Homolog of NCBI NO: 6063552 NR Description: ESTs AU065232(E60855),C23624(S1554), correspond to a region of the predicted gene.~similar to putative
  misc_feature (1)..(24): Homolog of NCBI NO: 6063552 NR Description: ESTs AU065232(E60855),C23624(S1554), correspond to a region of the predicted gene.~similar to putative
  misc_feature (1)..(90): Homolog of NCBI NO: 1076067 NR Description: adenylate kinase (EC 2.7.4.3) - Streptomyces
  misc_feature (1)..(90): Homolog of NCBI NO: 2924292 NR Description: AdK adenylate kinase [Streptomyces coelicolor]
  misc_feature (1)..(90): Homolog of NCBI NO: 27468720 NR Description: adenylate kinase [Staphylococcus epidermidis ATCC
MGSLVRQELNPRSSLYKEIASAVNERKLVPKSVVFALLSKRLEEGYARGETGFILHGIPRTRFQAETLDQIAQIDLVVNLKCSEDHLVNRNETALPQQEFLGSMLHSPVAINARRESVGVYAQEVEEYYRKQRKLLDFHVGGATSADTWQGLLAALHLKQVNLTTSQKLTL

SEQ ID NO: 85367 - DNA, 2415 bp, Arabidopsis thaliana
  misc_feature (1)..(2415): Ceres Seq. ID no. 12680194
  misc_feature: MA Experiment ID: 20000794 Result: Up-regulated in Transcription
  misc_feature: MA Experiment 20000794 PARAMETER Experiment Name: At_Petals_P Parameter: Age (day) Value: 23-25 days
  misc_feature: MA Experiment 20000794 PARAMETER Experiment Name: At_Petals_P Parameter: Plant Line Value: WS
  misc_feature: MA Experiment 20000794 PARAMETER Experiment Name: At_Petals_P Parameter: Tissue Value: Petals vs. Whole plant
  misc_feature: MA Experiment ID: 20001248 Result: Up-regulated in Transcription
  misc_feature: MA Experiment 20001248 PARAMETER Experiment Name: At_Far-red-induction_P Parameter: Age (day) Value: 7
  misc_feature: MA Experiment 20001248 PARAMETER Experiment Name: At_Far-red-induction_P Parameter: Light Value: Far-red vs. White
  misc_feature: MA Experiment 20001248 PARAMETER Experiment Name: At_Far-red-induction_P Parameter: Organism Value: A. thaliana
  misc_feature: MA Experiment 20001248 PARAMETER Experiment Name: At_Far-red-induction_P Parameter: Plant Line Value: Columbia
  misc_feature: MA Experiment 20001248 PARAMETER Experiment Name: At_Far-red-induction_P Parameter: Timepoint (hr) Value: 4
  misc_feature: MA Experiment 20001248 PARAMETER Experiment Name: At_Far-red-induction_P Parameter: Tissue Value: Whole Plant
  misc_feature: MA Experiment ID: 20001451 Result: Up-regulated in Transcription
  misc_feature: MA Experiment 20001451 PARAMETER Experiment Name: At_Far-red-induction_P Parameter: Age (day) Value: 7
  misc_feature: MA Experiment 20001451 PARAMETER Experiment Name: At_Far-red-induction_P Parameter: Light Value: Far-red vs. White
  misc_feature: MA Experiment 20001451 PARAMETER Experiment Name: At_Far-red-induction_P Parameter: Organism Value: A. thaliana
  misc_feature: MA Experiment 20001451 PARAMETER Experiment Name: At_Far-red-induction_P Parameter: Plant Line Value: Columbia
  misc_feature: MA Experiment 20001451 PARAMETER Experiment Name: At_Far-red-induction_P Parameter: Timepoint (hr) Value: 24
  misc_feature: MA Experiment 20001451 PARAMETER Experiment Name: At_Far-red-induction_P Parameter: Tissue Value: Whole Plant
  misc_feature: MA Experiment ID: 20001911 Result: Up-regulated in Transcription
  misc_feature: MA Experiment 20001911 PARAMETER Experiment Name: At_Drought_Reproduction_P Parameter: Age (day) Value: 40
  misc_feature: MA Experiment 20001911 PARAMETER Experiment Name: At_Drought_Reproduction_P Parameter: Organism Value: A. thaliana
  misc_feature: MA Experiment 20001911 PARAMETER Experiment Name: At_Drought_Reproduction_P Parameter: Plant Line Value: WS
  misc_feature: MA Experiment 20001911 PARAMETER Experiment Name: At_Drought_Reproduction_P Parameter: Timepoint (day) Value: 10
  misc_feature: MA Experiment 20001911 PARAMETER Experiment Name: At_Drought_Reproduction_P Parameter: Tissue Value: Flowers
  misc_feature: MA Experiment 20001911 PARAMETER Experiment Name: At_Drought_Reproduction_P Parameter: Treatment Value: Drought vs. No Drought
ggacatccttgcttttggtctaactttctctctcttgcttctacgcttcttcttgtggcgtagattgttatagagagggaaaccaaaaaagggaatctcaaaagctcgagttcacagatttgacccgagtctttaatccaatctgctggttcgttttccacattcaaactcgactcttgaatatcaaatcagaagtctttgctatggctgctaccgctgctgcttctgttgtccgttacgcacctgaggatcatactcttcccaagccctggaaaggccttatcgatgatagaactggttacttgtacttttggaatcctgagaccaatgttactcagtacgagaaaccaaccccctctctacctcctaagttttctcccgccgtttctgttagctcttccgttcaggttcaacaaactgatgcctatgctcctcccaaggatgacgataagtactccagaggctctgaacgtgtgtccaggttttctgagggtggcaggagtggaccgccttattcgaacggtgctgctaatggagttggggattctgcttatggtgcagcatctaccagagttcctcttccttcatcagctccagcaagtgaactatcccctgaggcctattcccgccgtcatgaaattactgtcagtgggggccaagtaccaccacctctaatgtcctttgaagctactggttttccacctgagcttctgcgggaggtgcgatgtttgctcctgggaggagccaatgtcgtacactgtgccacttctttgaggtccttgcaaattatttggagtgccctatatggtggaccaaattttttggaaagggcttcccaaatcatccaagcttgtggcagggcctgttaatggtgtgatgattcatttcaccaccgggtccagacagaagaagaggcgtcctcctgctgcaggtttcatcagtaaccttttgccacctgcaaatgggggatggtactcagtgcaggtttctctgctccaactccaattcaagctcagtcatggcccattgctatgcaaggtagggacatagtagccattgctaaaactggctcgggaaaaactttgggttacttgattcctggatttttgcatcttcaacgtatccgaaatgattcgcgaatgggcccaacaatcttggtattgtctccaacgagagagctggccacacaaatccaagaagaagctgttaaatttgggaggtcatcaagaatttcgttgtttgtatggtggtgcaccaaagggccctcagttgagggatttagaaagaggagcagatatcgtggttgcaactcctgggagattgaatgatatccttgaaatgaggaggattagtctgcgtcagatatcttatcttgtgctagatgaggcagatagaatgttggacatgggttttgaacctcagataaggaagattgtgaaagaaattcccactaagcgtcaaacccttatgtacacagctacatggccaaagggagttaggaaaattgcagctgacttgcttgttaaccctgctcaagtcaacattggcaatgttgacgagcttgtggctaacaagtcaatcacacagcatattgaagtggtagcaccaatggagaaacagaggaggttagagcagatcttgcggtctcaggaaccaggctcaaaggtgataatattctgctcaaccaaaaggatgtgtgatcaactaacacgcaatctaacccgccaatttggagctgctgctatacatggagacaagtcccagcctgagagagacaatgttcttaatcaattccgcagtggcagaactccggttcttgtagcaaccgatgttgctgctcgtggtctggacgttaaggacatcagggcggtcgtaaactatgatttccccaatggagtggaagactatgttcatagaatcggaagaacaggaagagctggagcgactggtcaggcattcacattctttggtgatcaagattcgaaacatgcttcggatctgatcaagattttggaaggagcaaaccagcgagttcctcctcagatccgcgaaatggctacacgtggtggtgggggaatgaacaaattcagtcgttggggacctccttccggcggccgtggtcgtggtggcgactctggttatggtggcagaggtagctttgcttcccgtgacagtagaagcagcaatggatggggaagagagcgagaaaggagccgtagccctgagagattcaacagagctccaccaccgtcttccaccggatctcctcctcgcagcttccacgagacgatgatgatgaaacacagatgaaaagagagatacaaagctctgataaagccaagtgacagaagattgtgttgtgggggatttcccttatcattgtgacattatatattttttggccgatgaagaaac

SEQ ID NO: 85368 - protein, 393 aa, Arabidopsis thaliana
  peptide (1)..(393): Ceres Seq. ID no. 12680195
  misc_feature (37)..(153): Pfam Name: DEAD/DEAH box helicase Pfam Description: DEAD/DEAH box helicase
  misc_feature (37)..(379): Homolog of NCBI NO: 15241445 NR Description: DRH1 DEAD box protein - like; protein id:
  misc_feature (37)..(393): Homolog of NCBI NO: 23397305 NR Description: putative RNA helicase, DRH1 [Arabidopsis thaliana]
  misc_feature (37)..(375): Homolog of NCBI NO: 1169228 NR Description: RNA helicase-like protein DB10
  misc_feature (37)..(358): Homolog of NCBI NO: 6137207 NR Description: P72 DEAD box protein [Pisum sativum]
  misc_feature (37)..(354): Homolog of NCBI NO: 15528719 NR Description: putative RNA helicase, DRH1 [Oryza sativa
  misc_feature (37)..(393): Homolog of NCBI NO: 34913856 NR Description: putative RNA helicase, DRH1 [Oryza sativa
  misc_feature (37)..(358): Homolog of NCBI NO: 15230730 NR Description: putative RNA helicase; protein id: At3g06480.1 thaliana] >gi|6437557|gb|AAF08584.1|AC011623_17 putative RNA
  misc_feature (37)..(362): Homolog of NCBI NO: 6324217 NR Description: ATP-dependent RNA helicase of DEAD box family;
  misc_feature (313)..(393): Homolog of NCBI NO: 15241445 NR Description: DRH1 DEAD box protein - like; protein id:
  misc_feature (37)..(362): Homolog of NCBI NO: 1183961 NR Description: RNA elicase [Saccharomyces cerevisiae]
MIREWAQQSWYCLQRESWPHKSKKKLLNLGGHQEFRCLYGGAPKGPQLRDLERGADIVVATPGRLNDILEMRRISLRQISYLVLDEADRMLDMGFEPQIRKIVKEIPTKRQTLMYTATWPKGVRKIAADLLVNPAQVNIGNVDELVANKSITQHIEVVAPMEKQRRLEQILRSQEPGSKVIIFCSTKRMCDQLTRNLTRQFGAAAIHGDKSQPERDNVLNQFRSGRTPVLVATDVAARGLDVKDIRAVVNYDFPNGVEDYVHRIGRTGRAGATGQAFTFFGDQDSKHASDLIKILEGANQRVPPQIREMATRGGGGMNKFSRWGPPSGGRGRGGDSGYGGRGSFASRDSRSSNGWGRERERSRSPERFNRAPPPSSTGSPPRSFHETMMMKHR

SEQ ID NO: 85369 - protein, 323 aa, Arabidopsis thaliana
  peptide (1)..(323): Ceres Seq. ID no. 12680196
  misc_feature (1)..(83): Pfam Name: DEAD/DEAH box helicase Pfam Description: DEAD/DEAH box helicase
  misc_feature (1)..(309): Homolog of NCBI NO: 15241445 NR Description: DRH1 DEAD box protein - like; protein id:
  misc_feature (1)..(323): Homolog of NCBI NO: 23397305 NR Description: putative RNA helicase, DRH1 [Arabidopsis thaliana]
  misc_feature (1)..(305): Homolog of NCBI NO: 1169228 NR Description: RNA helicase-like protein DB10
  misc_feature (1)..(288): Homolog of NCBI NO: 6137207 NR Description: P72 DEAD box protein [Pisum sativum]
  misc_feature (1)..(284): Homolog of NCBI NO: 15528719 NR Description: putative RNA helicase, DRH1 [Oryza sativa
  misc_feature (1)..(323): Homolog of NCBI NO: 34913856 NR Description: putative RNA helicase, DRH1 [Oryza sativa
  misc_feature (1)..(288): Homolog of NCBI NO: 15230730 NR Description: putative RNA helicase; protein id: At3g06480.1 thaliana] >gi|6437557|gb|AAF08584.1|AC011623_17 putative RNA
  misc_feature (1)..(292): Homolog of NCBI NO: 6324217 NR Description: ATP-dependent RNA helicase of DEAD box family;
  misc_feature (243)..(323): Homolog of NCBI NO: 15241445 NR Description: DRH1 DEAD box protein - like; protein id:
  misc_feature (1)..(292): Homolog of NCBI NO: 1183961 NR Description: RNA elicase [Saccharomyces cerevisiae]
MRRISLRQISYLVLDEADRMLDMGFEPQIRKIVKEIPTKRQTLMYTATWPKGVRKIAADLLVNPAQVNIGNVDELVANKSITQHIEVVAPMEKQRRLEQILRSQEPGSKVIIFCSTKRMCDQLTRNLTRQFGAAAIHGDKSQPERDNVLNQFRSGRTPVLVATDVAARGLDVKDIRAVVNYDFPNGVEDYVHRIGRTGRAGATGQAFTFFGDQDSKHASDLIKILEGANQRVPPQIREMATRGGGGMNKFSRWGPPSGGRGRGGDSGYGGRGSFASRDSRSSNGWGRERERSRSPERFNRAPPPSSTGSPPRSFHETMMMKHR

SEQ ID NO: 85370 - protein, 304 aa, Arabidopsis thaliana
  peptide (1)..(304): Ceres Seq. ID no. 12680197
  misc_feature (1)..(64): Pfam Name: DEAD/DEAH box helicase Pfam Description: DEAD/DEAH box helicase
  misc_feature (1)..(290): Homolog of NCBI NO: 15241445 NR Description: DRH1 DEAD box protein - like; protein id:
  misc_feature (1)..(304): Homolog of NCBI NO: 23397305 NR Description: putative RNA helicase, DRH1 [Arabidopsis thaliana]
  misc_feature (1)..(286): Homolog of NCBI NO: 1169228 NR Description: RNA helicase-like protein DB10
  misc_feature (1)..(269): Homolog of NCBI NO: 6137207 NR Description: P72 DEAD box protein [Pisum sativum]
  misc_feature (1)..(265): Homolog of NCBI NO: 15528719 NR Description: putative RNA helicase, DRH1 [Oryza sativa
  misc_feature (1)..(304): Homolog of NCBI NO: 34913856 NR Description: putative RNA helicase, DRH1 [Oryza sativa
  misc_feature (1)..(269): Homolog of NCBI NO: 15230730 NR Description: putative RNA helicase; protein id: At3g06480.1 thaliana] >gi|6437557|gb|AAF08584.1|AC011623_17 putative RNA
  misc_feature (1)..(273): Homolog of NCBI NO: 6324217 NR Description: ATP-dependent RNA helicase of DEAD box family;
  misc_feature (224)..(304): Homolog of NCBI NO: 15241445 NR Description: DRH1 DEAD box protein - like; protein id:
  misc_feature (1)..(273): Homolog of NCBI NO: 1183961 NR Description: RNA elicase [Saccharomyces cerevisiae]
MLDMGFEPQIRKIVKEIPTKRQTLMYTATWPKGVRKIAADLLVNPAQVNIGNVDELVANKSITQHIEVVAPMEKQRRLEQILRSQEPGSKVIIFCSTKRMCDQLTRNLTRQFGAAAIHGDKSQPERDNVLNQFRSGRTPVLVATDVAARGLDVKDIRAVVNYDFPNGVEDYVHRIGRTGRAGATGQAFTFFGDQDSKHASDLIKILEGANQRVPPQIREMATRGGGGMNKFSRWGPPSGGRGRGGDSGYGGRGSFASRDSRSSNGWGRERERSRSPERFNRAPPPSSTGSPPRSFHETMMMKHR

SEQ ID NO: 85371 - DNA, 1244 bp, Arabidopsis thaliana
  misc_feature (1)..(1244): Ceres Seq. ID no. 12680198
  misc_feature: MA Experiment ID: 108435 Result: Down-regulated in Transcription
  misc_feature: MA Experiment 108435 PARAMETER Experiment Name: At_stm_Mutants_cDNA_P Parameter: Plant Line Value: wt Landsburg vs stm
  misc_feature: MA Experiment 108435 PARAMETER Experiment Name: At_stm_Mutants_cDNA_P Parameter: Tissue Value: Shoot Apical Meristem Region
  misc_feature: MA Experiment ID: 108461 Result: Up-regulated in Transcription
  misc_feature: MA Experiment 108461 PARAMETER Experiment Name: At_Germinating_Seeds_cDNA_P Parameter: Age (day) Value: 1 vs. 0
  misc_feature: MA Experiment 108461 PARAMETER Experiment Name: At_Germinating_Seeds_cDNA_P Parameter: Tissue Value: Germinating Seeds
  misc_feature: MA Experiment ID: 108464 Result: Up-regulated in Transcription
  misc_feature: MA Experiment 108464 PARAMETER Experiment Name: At_Germinating_Seeds_cDNA_P Parameter: Age (day) Value: 4 vs. 0
  misc_feature: MA Experiment 108464 PARAMETER Experiment Name: At_Germinating_Seeds_cDNA_P Parameter: Tissue Value: Germinating Seeds
  misc_feature: MA Experiment ID: 108474 Result: Up-regulated in Transcription
  misc_feature: MA Experiment 108474 PARAMETER Experiment Name: At_Drought_Flowers_cDNA_P Parameter: Timepoint (hr) Value: null
  misc_feature: MA Experiment 108474 PARAMETER Experiment Name: At_Drought_Flowers_cDNA_P Parameter: Treatment Value: Drought vs. No Drought
  misc_feature: MA Experiment ID: 108605 Result: Down-regulated in Transcription
  misc_feature: MA Experiment 108605 PARAMETER Experiment Name: At_100uM_ABA_cDNA_P Parameter: Timepoint (hr) Value: 6
  misc_feature: MA Experiment 108605 PARAMETER Experiment Name: At_100uM_ABA_cDNA_P Parameter: Tissue Value: Aerial
  misc_feature: MA Experiment 108605 PARAMETER Experiment Name: At_100uM_ABA_cDNA_P Parameter: Treatment Value: 100uM ABA vs. No Treatment
  misc_feature: MA Experiment ID: 20000069 Result: Down-regulated in Transcription
  misc_feature: MA Experiment 20000069 PARAMETER Experiment Name: At_100uM_ABA_Mutants_cDNA_P Parameter: Plant Line Value: CS23
  misc_feature: MA Experiment 20000069 PARAMETER Experiment Name: At_100uM_ABA_Mutants_cDNA_P Parameter: Timepoint (hr) Value: 6
  misc_feature: MA Experiment 20000069 PARAMETER Experiment Name: At_100uM_ABA_Mutants_cDNA_P Parameter: Tissue Value: Aerial
  misc_feature: MA Experiment 20000069 PARAMETER Experiment Name: At_100uM_ABA_Mutants_cDNA_P Parameter: Treatment Value: 100uM ABA vs. No Treatment
  misc_feature: MA Experiment ID: 20000070 Result: Down-regulated in Transcription
  misc_feature: MA Experiment 20000070 PARAMETER Experiment Name: At_100uM_ABA_Mutants_cDNA_P Parameter: Plant Line Value: CS24
  misc_feature: MA Experiment 20000070 PARAMETER Experiment Name: At_100uM_ABA_Mutants_cDNA_P Parameter: Timepoint (hr) Value: 6
  misc_feature: MA Experiment 20000070 PARAMETER Experiment Name: At_100uM_ABA_Mutants_cDNA_P Parameter: Tissue Value: Aerial
  misc_feature: MA Experiment 20000070 PARAMETER Experiment Name: At_100uM_ABA_Mutants_cDNA_P Parameter: Treatment Value: 100uM ABA vs. No Treatment
  misc_feature: MA Experiment ID: 20000072 Result: Down-regulated in Transcription
  misc_feature: MA Experiment 20000072 PARAMETER Experiment Name: At_100uM_ABA_Mutants_cDNA_P Parameter: Plant Line Value: CS8105
  misc_feature: MA Experiment 20000072 PARAMETER Experiment Name: At_100uM_ABA_Mutants_cDNA_P Parameter: Timepoint (hr) Value: 6
  misc_feature: MA Experiment 20000072 PARAMETER Experiment Name: At_100uM_ABA_Mutants_cDNA_P Parameter: Tissue Value: Aerial
  misc_feature: MA Experiment 20000072 PARAMETER Experiment Name: At_100uM_ABA_Mutants_cDNA_P Parameter: Treatment Value: 100uM ABA vs. No Treatment
  misc_feature: MA Experiment ID: 20000087 Result: Down-regulated in Transcription
  misc_feature: MA Experiment 20000087 PARAMETER Experiment Name: At_100uM_ABA_Mutants_cDNA_P Parameter: Plant Line Value: WS
  misc_feature: MA Experiment 20000087 PARAMETER Experiment Name: At_100uM_ABA_Mutants_cDNA_P Parameter: Timepoint (hr) Value: 6
  misc_feature: MA Experiment 20000087 PARAMETER Experiment Name: At_100uM_ABA_Mutants_cDNA_P Parameter: Tissue Value: Aerial
  misc_feature: MA Experiment 20000087 PARAMETER Experiment Name: At_100uM_ABA_Mutants_cDNA_P Parameter: Treatment Value: 100uM ABA vs. No Treatment
  misc_feature: MA Experiment ID: 20000088 Result: Down-regulated in Transcription
  misc_feature: MA Experiment 20000088 PARAMETER Experiment Name: At_100uM_ABA_Mutants_cDNA_P Parameter: Plant Line Value: Landsberg
  misc_feature: MA Experiment 20000088 PARAMETER Experiment Name: At_100uM_ABA_Mutants_cDNA_P Parameter: Timepoint (hr) Value: 6
  misc_feature: MA Experiment 20000088 PARAMETER Experiment Name: At_100uM_ABA_Mutants_cDNA_P Parameter: Tissue Value: Aerial
  misc_feature: MA Experiment 20000088 PARAMETER Experiment Name: At_100uM_ABA_Mutants_cDNA_P Parameter: Treatment Value: 100uM ABA vs. No Treatment
  misc_feature: MA Experiment ID: 20000090 Result: Down-regulated in Transcription
  misc_feature: MA Experiment ID: 20000113 Result: Up-regulated in Transcription
  misc_feature: MA Experiment 20000113 PARAMETER Experiment Name: At_42deg_Heat_cDNA_P Parameter: Temperature (deg C) Value: 42 vs. 22
  misc_feature: MA Experiment 20000113 PARAMETER Experiment Name: At_42deg_Heat_cDNA_P Parameter: Timepoint (hr) Value: 8
  misc_feature: MA Experiment 20000113 PARAMETER Experiment Name: At_42deg_Heat_cDNA_P Parameter: Tissue Value: Aerial
  misc_feature: MA Experiment ID: 20000117 Result: Down-regulated in Transcription
  misc_feature: MA Experiment 20000117 PARAMETER Experiment Name: At_100uM_ABA_Mutants_cDNA_P Parameter: Plant Line Value: Columbia
  misc_feature: MA Experiment 20000117 PARAMETER Experiment Name: At_100uM_ABA_Mutants_cDNA_P Parameter: Timepoint (hr) Value: 6
  misc_feature: MA Experiment 20000117 PARAMETER Experiment Name: At_100uM_ABA_Mutants_cDNA_P Parameter: Tissue Value: Aerial
  misc_feature: MA Experiment 20000117 PARAMETER Experiment Name: At_100uM_ABA_Mutants_cDNA_P Parameter: Treatment Value: 100uM ABA vs. No Treatment
attattcacttaagtatatagtagcttccataagagtcttagttctaactataaatacacatatctcactctctctgatctccgcttctcttcgccaacaaatgtcgaccgctcctctctccggcttctttctcacttcactttctccttctcaatcttctctccagaaactctctcttcgtacttcttccaccgtcgcttgcctcccacccgcctcttcttcttcctcatcttcctcctcctcgtcttcccgttccgttccaacgcttatccgtaacgagccagtttttgccgctcctgctcctatcattgccccttattggagtgaagagatgggaaccgaagcatacgacgaggctattgaagctctcaagaagcttctcatcgagaaggaagagctaaagacggttgcagcggcaaaggtggagcagatcacagcggctcttcagacaggtacttcatccgacaagaaagctttcgaccccgtcgaaaccattaagcagggcttcatcaaattcaagaaggagaaatacgaaaccaaccctgctttgtacggtgagctcgcaaagggtcaaagtcctaagtacatggtgtttgcttgttcagactcacgtgtgtgtccatcacacgttctggactttcagccaggagatgccttcgtggtccgtaacatagccaacatggttcctcctttcgacaaggtcaaatacggtggcgttggagcagccattgaatacgcggtcttacaccttaaggtggagaacattgtggtgataggacacagtgcatgtggtgggatcaaagggcttatgtctttccccttagatggaaacaactccactgacttcatagaggactgggtcaaaatctgtttaccagccaagtcaaaggttatatcagaacttggagattcagcctttgaagatcaatgtggccgatgtgaaagggaggcggtgaatgtttcactagcaaacctattgacatatccatttgtgagagaaggacttgtgaagggaacacttgctttgaagggaggctactatgacttcgtcaagggtgcttttgagctttggggacttgaatttggcctctccgaaactagctctgttaaagatgtggctaccatactacattggaagctgtaggaaactctttgaagccttacccgatttcacattgtcaattcaataacaccaagttgttgtttacatgcagatcttgatgaaactggtttttgattttac

SEQ ID NO: 85372 - protein, 380 aa, Arabidopsis thaliana
  peptide (1)..(380): Ceres Seq. ID no. 12680199
  misc_feature (34)..(380): Homolog of NCBI NO: 30678350 NR Description: carbonic anhydrase, chloroplast precursor thaliana] >gi|16226255|gb|AAL16116.1|AF428284_1 AT3g01500/F4P13_5 thaliana] >gi|16226669|gb|AAL16228.1|AF428459_1 AT3g01500/F4P13_5
  misc_feature (34)..(369): Homolog of NCBI NO: 30678353 NR Description: carbonic anhydrase, chloroplast precursor thaliana] >gi|115470|sp|P27140|CAHC_ARATH Carbonic anhydrase, precursor (Carbonate dehydratase) >gi|320554|pir||S28412
  misc_feature (111)..(380): Homolog of NCBI NO: 30678347 NR Description: carbonic anhydrase, chloroplast precursor thaliana] >gi|20259533|gb|AAM13886.1| putative carbonic
  misc_feature (34)..(369): Homolog of NCBI NO: 7436820 NR Description: carbonate dehydratase (EC 4.2.1.1) 1b - Populus x Populus tremuloides >gi|1354517|gb|AAB65822.1| carbonic
  misc_feature (34)..(369): Homolog of NCBI NO: 7436819 NR Description: carbonate dehydratase (EC 4.2.1.1) 1a - Populus x Populus tremuloides >gi|1354515|gb|AAC49785.1| carbonic
  misc_feature (111)..(369): Homolog of NCBI NO: 21903379 NR Description: Carbonic anhydrase 2 (Carbonate dehydratase 2) AT5g14740 [Arabidopsis thaliana]
  misc_feature (111)..(369): Homolog of NCBI NO: 30685030 NR Description: CARBONIC ANHYDRASE 2 [Arabidopsis thaliana]
  misc_feature (111)..(369): Homolog of NCBI NO: 438449 NR Description: carbonic anhydrase
  misc_feature (34)..(369): Homolog of NCBI NO: 1168738 NR Description: CARBONIC ANHYDRASE 1 (CARBONATE DEHYDRATASE 1)
  misc_feature (34)..(369): Homolog of NCBI NO: 1168746 NR Description: CARBONIC ANHYDRASE (CARBONATE DEHYDRATASE)
YSLKYIVASIRVLVLTINTHISLSLISASLRQQMSTAPLSGFFLTSLSPSQSSLQKLSLRTSSTVACLPPASSSSSSSSSSSSRSVPTLIRNEPVFAAPAPIIAPYWSEEMGTEAYDEAIEALKKLLIEKEELKTVAAAKVEQITAALQTGTSSDKKAFDPVETIKQGFIKFKKEKYETNPALYGELAKGQSPKYMVFACSDSRVCPSHVLDFQPGDAFVVRNIANMVPPFDKVKYGGVGAAIEYAVLHLKVENIVVIGHSACGGIKGLMSFPLDGNNSTDFIEDWVKICLPAKSKVISELGDSAFEDQCGRCEREAVNVSLANLLTYPFVREGLVKGTLALKGGYYDFVKGAFELWGLEFGLSETSSVKDVATILHWKL

SEQ ID NO: 85373 - protein, 347 aa, Arabidopsis thaliana; identical to SEQ ID NO: 77839
  peptide (1)..(347): Ceres Seq. ID no. 12680200
  misc_feature (1)..(347): Homolog of NCBI NO: 30678350 NR Description: carbonic anhydrase, chloroplast precursor thaliana] >gi|16226255|gb|AAL16116.1|AF428284_1 AT3g01500/F4P13_5 thaliana] >gi|16226669|gb|AAL16228.1|AF428459_1 AT3g01500/F4P13_5
  misc_feature (1)..(336): Homolog of NCBI NO: 30678353 NR Description: carbonic anhydrase, chloroplast precursor thaliana] >gi|115470|sp|P27140|CAHC_ARATH Carbonic anhydrase, precursor (Carbonate dehydratase) >gi|320554|pir||S28412
  misc_feature (78)..(347): Homolog of NCBI NO: 30678347 NR Description: carbonic anhydrase, chloroplast precursor thaliana] >gi|20259533|gb|AAM13886.1| putative carbonic
  misc_feature (1)..(336): Homolog of NCBI NO: 7436820 NR Description: carbonate dehydratase (EC 4.2.1.1) 1b - Populus x Populus tremuloides >gi|1354517|gb|AAB65822.1| carbonic
  misc_feature (1)..(336): Homolog of NCBI NO: 7436819 NR Description: carbonate dehydratase (EC 4.2.1.1) 1a - Populus x Populus tremuloides >gi|1354515|gb|AAC49785.1| carbonic
  misc_feature (78)..(336): Homolog of NCBI NO: 21903379 NR Description: Carbonic anhydrase 2 (Carbonate dehydratase 2) AT5g14740 [Arabidopsis thaliana]
  misc_feature (78)..(336): Homolog of NCBI NO: 30685030 NR Description: CARBONIC ANHYDRASE 2 [Arabidopsis thaliana]
  misc_feature (78)..(336): Homolog of NCBI NO: 438449 NR Description: carbonic anhydrase
  misc_feature (1)..(336): Homolog of NCBI NO: 1168738 NR Description: CARBONIC ANHYDRASE 1 (CARBONATE DEHYDRATASE 1)
  misc_feature (1)..(336): Homolog of NCBI NO: 1168746 NR Description: CARBONIC ANHYDRASE (CARBONATE DEHYDRATASE)

SEQ ID NO: 85374 - protein, 270 aa, Arabidopsis thaliana; identical to SEQ ID NO: 77840
  peptide (1)..(270): Ceres Seq. ID no. 12680201
  misc_feature (1)..(270): Homolog of NCBI NO: 30678350 NR Description: carbonic anhydrase, chloroplast precursor thaliana] >gi|16226255|gb|AAL16116.1|AF428284_1 AT3g01500/F4P13_5 thaliana] >gi|16226669|gb|AAL16228.1|AF428459_1 AT3g01500/F4P13_5
  misc_feature (1)..(259): Homolog of NCBI NO: 30678353 NR Description: carbonic anhydrase, chloroplast precursor thaliana] >gi|115470|sp|P27140|CAHC_ARATH Carbonic anhydrase, precursor (Carbonate dehydratase) >gi|320554|pir||S28412
  misc_feature (1)..(270): Homolog of NCBI NO: 30678347 NR Description: carbonic anhydrase, chloroplast precursor thaliana] >gi|20259533|gb|AAM13886.1| putative carbonic
  misc_feature (1)..(259): Homolog of NCBI NO: 7436820 NR Description: carbonate dehydratase (EC 4.2.1.1) 1b - Populus x Populus tremuloides >gi|1354517|gb|AAB65822.1| carbonic
  misc_feature (1)..(259): Homolog of NCBI NO: 7436819 NR Description: carbonate dehydratase (EC 4.2.1.1) 1a - Populus x Populus tremuloides >gi|1354515|gb|AAC49785.1| carbonic
  misc_feature (1)..(259): Homolog of NCBI NO: 21903379 NR Description: Carbonic anhydrase 2 (Carbonate dehydratase 2) AT5g14740 [Arabidopsis thaliana]
  misc_feature (1)..(259): Homolog of NCBI NO: 30685030 NR Description: CARBONIC ANHYDRASE 2 [Arabidopsis thaliana]
  misc_feature (1)..(259): Homolog of NCBI NO: 438449 NR Description: carbonic anhydrase
  misc_feature (1)..(259): Homolog of NCBI NO: 1168738 NR Description: CARBONIC ANHYDRASE 1 (CARBONATE DEHYDRATASE 1)
  misc_feature (1)..(259): Homolog of NCBI NO: 1168746 NR Description: CARBONIC ANHYDRASE (CARBONATE DEHYDRATASE)

SEQ ID NO: 85375 - DNA, 1844 bp, Arabidopsis thaliana
  misc_feature (1)..(1844): Ceres Seq. ID no. 12680210
  misc_feature: MA Experiment ID: 20000171 Result: Down-regulated in Transcription
  misc_feature: MA Experiment 20000171 PARAMETER Experiment Name: At_42deg_Heat_P Parameter: Age (day) Value: 14
  misc_feature: MA Experiment 20000171 PARAMETER Experiment Name: At_42deg_Heat_P Parameter: Organism Value: A. thaliana
  misc_feature: MA Experiment 20000171 PARAMETER Experiment Name: At_42deg_Heat_P Parameter: Plant Line Value: WS
  misc_feature: MA Experiment 20000171 PARAMETER Experiment Name: At_42deg_Heat_P Parameter: Temperature (deg C) Value: 42 vs. 22
  misc_feature: MA Experiment 20000171 PARAMETER Experiment Name: At_42deg_Heat_P Parameter: Timepoint (hr) Value: 1
  misc_feature: MA Experiment 20000171 PARAMETER Experiment Name: At_42deg_Heat_P Parameter: Tissue Value: Aerial
  misc_feature: MA Experiment ID: 20000794 Result: Up-regulated in Transcription
  misc_feature: MA Experiment 20000794 PARAMETER Experiment Name: At_Petals_P Parameter: Age (day) Value: 23-25 days
  misc_feature: MA Experiment 20000794 PARAMETER Experiment Name: At_Petals_P Parameter: Plant Line Value: WS
  misc_feature: MA Experiment 20000794 PARAMETER Experiment Name: At_Petals_P Parameter: Tissue Value: Petals vs. Whole plant
  misc_feature: MA Experiment ID: 20001451 Result: Up-regulated in Transcription
  misc_feature: MA Experiment 20001451 PARAMETER Experiment Name: At_Far-red-induction_P Parameter: Age (day) Value: 7
  misc_feature: MA Experiment 20001451 PARAMETER Experiment Name: At_Far-red-induction_P Parameter: Light Value: Far-red vs. White
  misc_feature: MA Experiment 20001451 PARAMETER Experiment Name: At_Far-red-induction_P Parameter: Organism Value: A. thaliana
  misc_feature: MA Experiment 20001451 PARAMETER Experiment Name: At_Far-red-induction_P Parameter: Plant Line Value: Columbia
  misc_feature: MA Experiment 20001451 PARAMETER Experiment Name: At_Far-red-induction_P Parameter: Timepoint (hr) Value: 24
  misc_feature: MA Experiment 20001451 PARAMETER Experiment Name: At_Far-red-induction_P Parameter: Tissue Value: Whole Plant
aatccacctttcgatcggaaaatccttctgtttgcgaatctattgggtatatatctctccttgatgatttgatttgattctattgcattgagattgatatcttgttgcaggggaactctggttccatgtgttaggtattttcctttcgtcgacctgattcatcttgtgcatgtcgattctgaataatgaacgaagaaggctgcgtcccgcacaactctggttagtctgtgtacctaatagtaattcgtaaccctccacagagcttactcatccgccgcttttgtattctctttgttgtagatgttgttaaacaaaagtctatagatcaaagagcccctctttccggggaacctaaatgtgttatctgcagtcgttatggtgagtacatatgtgacgagaccaatgatgacgtctgcagcctcgagtgtaagcaagcactcctgagaagggttgacagcgctagagtttttcctgccacagatgagtgcttctatgttagagacccaggatcttcttcccacgatgctcaactacttagaagaaagcttgatattcatgtccaaggacaaggatcagcagtccctccacctgtcttgactttcacttcatgtggacttcctcctaagcttcttctcaacttagaaacggctggctatgactttcctactcctatccagatgcaagcaattccagctgctttaaccggcaaaagtctgctcgcctcagccgacaccggctctgggaaaacagcttcttttcttgttcctattatttctcgttgcacaacgtatcactctgagcatccctcagaccagaggaggaaccccttggctatggttttggctccaacgagagagctctgtgtccaagttgaagatcaggcaaaaatgctcggaaagggactgccatttaagactgcactcgttgtaggtggtgatcccatgtctggacaactctaccgcattcagcaaggtgttgaattgatcattggtaccccaggccgggtggtggaccttctatcaaagcacaccattgaactagataacatcatgacgtttgtgctggatgaagttgactgcatgcttcagagaggcttcagagatcaggtgatgcagatatttcaggccttgtcacaaccacaggtcttgctgttctctgcgacgatctcaagagaggtggagaaggtgggagggtctctagccaaggaaatcattttggtatccataggtaatcccaacaagcctaacaaggctgtcaaccaattggccatctgggtagatgcaaagcaaaagaaacagaagctgtttgatatactcagaagtcaaaaccatttcaagccccccgctgttgtttatgtgagttcgagagttggagcagatctcctggctaatgccataactgttgtcacgggggtaaaagctctatcgatccatggggagaagccaatgaaggagaggagagacgtaatgggatcgtttttgggtggagaggtgccagttcttgtatcaacgggagttctaggccgaggagttgacctattggtggtaaggcaggtgatagtgtttgacatgcctagtaccatcaaggagtacatacatgtaattggcagggcctctaggatgggagagaagggcactgccattgtgtttgtgaatgaggacgacaggaacctattccctgatttagttgccgctttaaaaagtagtggagcagccatacctaaggaacttatcaatttgacatccagggaaatgcacaacaagaagagaagggttgggtactgagatgtatgacctggatccgaatgttgttgtaaattaagaaagaaaggaagacttgagagc

SEQ ID NO: 85376 - protein, 368 aa, Arabidopsis thaliana; identical to SEQ ID NO: 39212
  peptide (1)..(368): Ceres Seq. ID no. 12680211
  misc_feature (2)..(196): Pfam Name: DEAD/DEAH box helicase Pfam Description: DEAD/DEAH box helicase
  misc_feature (1)..(368): Homolog of NCBI NO: 30678477 NR Description: ATP dependent RNA helicase GB:227525 [Arabidopsis >gi|17473849|gb|AAL38348.1| unknown protein [Arabidopsis >gi|24899713|gb|AAN65071.1| unknown protein [Arabidopsis
  misc_feature (48)..(365): Homolog of NCBI NO: 34880424 NR Description: similar to RIKEN cDNA 1210002B07 [Rattus
  misc_feature (1)..(47): Homolog of NCBI NO: 34880424 NR Description: similar to RIKEN cDNA 1210002B07 [Rattus
  misc_feature (1)..(365): Homolog of NCBI NO: 13385988 NR Description: RIKEN cDNA 1210002B07 [Mus musculus] unnamed protein product [Mus musculus]
  misc_feature (1)..(365): Homolog of NCBI NO: 27469538 NR Description: Similar to hypothetical protein DKFZp564B1023
  misc_feature (1)..(307): Homolog of NCBI NO: 13775232 NR Description: hypothetical protein DKFZp564B1023 [Homo sapiens]
  misc_feature (1)..(367): Homolog of NCBI NO: 17985987 NR Description: belle CG9748-PA >gi|7299061|gb|AAF54262.1|
  misc_feature (1)..(367): Homolog of NCBI NO: 19528473 NR Description: RE28061p [Drosophila melanogaster]
  misc_feature (1)..(367): Homolog of NCBI NO: 15227951 NR Description: DEAD/DEAH box RNA helicase, putative; protein id:
  misc_feature (1)..(367): Homolog of NCBI NO: 28393424 NR Description: putative DEAD/DEAH box RNA helicase [Arabidopsis

SEQ ID NO: 85377 - protein, 316 aa, Arabidopsis thaliana; identical to SEQ ID NO: 39213
  peptide (1)..(316): Ceres Seq. ID no. 12680212
  misc_feature (1)..(144): Pfam Name: DEAD/DEAH box helicase Pfam Description: DEAD/DEAH box helicase
  misc_feature (1)..(316): Homolog of NCBI NO: 30678477 NR Description: ATP dependent RNA helicase GB:227525 [Arabidopsis >gi|17473849|gb|AAL38348.1| unknown protein [Arabidopsis >gi|24899713|gb|AAN65071.1| unknown protein [Arabidopsis
  misc_feature (1)..(313): Homolog of NCBI NO: 34880424 NR Description: similar to RIKEN cDNA 1210002B07 [Rattus
  misc_feature (1)..(313): Homolog of NCBI NO: 13385988 NR Description: RIKEN cDNA 1210002B07 [Mus musculus] unnamed protein product [Mus musculus]
  misc_feature (1)..(313): Homolog of NCBI NO: 27469538 NR Description: Similar to hypothetical protein DKFZp564B1023
  misc_feature (1)..(255): Homolog of NCBI NO: 13775232 NR Description: hypothetical protein DKFZp564B1023 [Homo sapiens]
  misc_feature (1)..(315): Homolog of NCBI NO: 17985987 NR Description: belle CG9748-PA >gi|7299061|gb|AAF54262.1|
  misc_feature (1)..(315): Homolog of NCBI NO: 19528473 NR Description: RE28061p [Drosophila melanogaster]
  misc_feature (1)..(315): Homolog of NCBI NO: 15227951 NR Description: DEAD/DEAH box RNA helicase, putative; protein id:
  misc_feature (1)..(315): Homolog of NCBI NO: 28393424 NR Description: putative DEAD/DEAH box RNA helicase [Arabidopsis
  misc_feature (1)..(315): Homolog of NCBI NO: 15231074 NR Description: DEAD/DEAH box RNA helicase protein, putative; id: At3g58570.1, supported by cDNA: 4158., supported by cDNA:

SEQ ID NO: 85378 - protein, 298 aa, Arabidopsis thaliana
  peptide (1)..(298): Ceres Seq. ID no. 12680213
  misc_feature (1)..(126): Pfam Name: DEAD/DEAH box helicase Pfam Description: DEAD/DEAH box helicase
  misc_feature (1)..(298): Homolog of NCBI NO: 30678477 NR Description: ATP dependent RNA helicase GB:227525 [Arabidopsis >gi|17473849|gb|AAL38348.1| unknown protein [Arabidopsis >gi|24899713|gb|AAN65071.1| unknown protein [Arabidopsis
  misc_feature (1)..(295): Homolog of NCBI NO: 34880424 NR Description: similar to RIKEN cDNA 1210002B07 [Rattus
  misc_feature (1)..(295): Homolog of NCBI NO: 13385988 NR Description: RIKEN cDNA 1210002B07 [Mus musculus] unnamed protein product [Mus musculus]
  misc_feature (1)..(295): Homolog of NCBI NO: 27469538 NR Description: Similar to hypothetical protein DKFZp564B1023
  misc_feature (1)..(237): Homolog of NCBI NO: 13775232 NR Description: hypothetical protein DKFZp564B1023 [Homo sapiens]
  misc_feature (1)..(297): Homolog of NCBI NO: 17985987 NR Description: belle CG9748-PA >gi|7299061|gb|AAF54262.1|
  misc_feature (1)..(297): Homolog of NCBI NO: 19528473 NR Description: RE28061p [Drosophila melanogaster]
  misc_feature (1)..(297): Homolog of NCBI NO: 15227951 NR Description: DEAD/DEAH box RNA helicase, putative; protein id:
  misc_feature (1)..(297): Homolog of NCBI NO: 28393424 NR Description: putative DEAD/DEAH box RNA helicase [Arabidopsis
  misc_feature (1)..(297): Homolog of NCBI NO: 15231074 NR Description: DEAD/DEAH box RNA helicase protein, putative; id: At3g58570.1, supported by cDNA: 4158., supported by cDNA:
MLGKGLPFKTALVVGGDPMSGQLYRIQQGVELIIGTPGRVVDLLSKHTIELDNIMTFVLDEVDCMLQRGFRDQVMQIFQALSQPQVLLFSATISREVEKVGGSLAKEIILVSIGNPNKPNKAVNQLAIWVDAKQKKQKLFDILRSQNHFKPPAVVYVSSRVGADLLANAITVVTGVKALSIHGEKPMKERRDVMGSFLGGEVPVLVSTGVLGRGVDLLVVRQVIVFDMPSTIKEYIHVIGRASRMGEKGTAIVFVNEDDRNLFPDLVAALKSSGAAIPKELINLTSREMHNKKRRVGY

SEQ ID NO: 85379 - DNA, 1075 bp, Arabidopsis thaliana
  misc_feature (1)..(1075): Ceres Seq. ID no. 12680226
  misc_feature: MA Experiment ID: 108595 Result: Down-regulated in Transcription
  misc_feature: MA Experiment 108595 PARAMETER Experiment Name: At_Ler-pi_Ovule_cDNA_P Parameter: Plant Line Value: null
aatcgtcatttcctcggtatctcctcctcgaaagaagaatgcctggaattagaggtccttcggaatactcgcaggaaccacctcgtcacccttctctcaaggtcaacgccaaggaacctttcaacgccgagcctccccgctcggccttagtctcatcttatgtcactcccgtcgaccttttctacaagaattgttgatctgggggcccttataaggcgtcaatcactctaagtcaagccacaaatcctgaagcggatgttctactcgcttatgagatgaatggagagaccctgaacagggatcacggatttccgttaagggtggttgtccctggtgtgattggtgctcgttcggtcaaatggcttgattccatcaatgtcatcgctgaagaaagccagggattcttcatgcaaaaagattacaaaatgtttccaccctctgtcaattgggataatatcaactggtcctctaggagaccgcaaatggatttccctgttcagagtgcaatctgctctgtggaggatgtgcaaatggtgaagcctggaaaggtaagtatcaaaggatatgcggtttcaggaggtggacgcgggatagaaagagtggacatatccctggatggaggcaaaaactgggtggaagcttctagaacgcaggaaccaggaaagcagtacatctcagaacacagctccagtgacaaatgggcatgggtgttgtttgaagccaccattgatgtttcacagactacagaggtcatcgccaaagcggttgattcggcggcgaatgttcaaccggaaaatgtggagtcggtgtggaacctaagaggggttctcaacacttcgtggcaccgtgtccttctccggcttggccactctaacttgtagaccaagttaccactatgcgtctggtctctctttatcttttctttaagaactaaaacatccttgaatatgcttgtccttgtggatctgtgagagcaaaatactgtttatagttaaataaaatgggaaaacccatctgttgtcatgtggtggattataaattatttatttatatgatagaactgttattcattatt

SEQ ID NO: 85380 - protein, 201 aa, Arabidopsis thaliana; identical to SEQ ID NO: 26546
  peptide (1)..(201): Ceres Seq. ID no. 12680227
  misc_feature (66)..(197): Pfam Name: Mo-co oxidoreductase dimerisation domain Pfam Description: Mo-co oxidoreductase dimerisation domain
  misc_feature (1)..(201): Homolog of NCBI NO: 15232230 NR Description: putative sulfite oxidase; protein id: supported by cDNA: gi_13430669, supported by cDNA: gi_6468007 thaliana] >gi|6091746|gb|AAF03458.1|AC010797_34 putative sulfite
  misc_feature (1)..(201): Homolog of NCBI NO: 6468008 NR Description: sulfite oxidase [Arabidopsis thaliana]
  misc_feature (1)..(195): Homolog of NCBI NO: 22759584 NR Description: Moco containing protein [Oryza sativa (japonica
  misc_feature (1)..(192): Homolog of NCBI NO: 3212610 NR Description: Chain A, Sulfite Oxidase From Chicken Liver
  misc_feature (1)..(192): Homolog of NCBI NO: 30424565 NR Description: sulfite oxidase [Mus musculus] Sulfite oxidase, mitochondrial precursor
  misc_feature (1)..(192): Homolog of NCBI NO: 586053 NR Description: Sulfite oxidase, mitochondrial precursor
  misc_feature (1)..(192): Homolog of NCBI NO: 40254758 NR Description: sulfite oxidase [Rattus norvegicus]
  misc_feature (1)..(192): Homolog of NCBI NO: 4557867 NR Description: SUOX gene product [Homo sapiens] Sulfite oxidase, mitochondrial precursor >gi|1362942|pir||S55874
  misc_feature (1)..(191): Homolog of NCBI NO: 86440 NR Description: sulfite oxidase (EC 1.8.3.1), hepatic - chicken
  misc_feature (1)..(191): Homolog of NCBI NO: 28558813 NR Description: Sulfite oxidase

SEQ ID NO: 85381 - protein, 157 aa, Arabidopsis thaliana; identical to SEQ ID NO: 37425
  peptide (1)..(157): Ceres Seq. ID no. 12680228
  misc_feature (22)..(153): Pfam Name: Mo-co oxidoreductase dimerisation domain Pfam Description: Mo-co oxidoreductase dimerisation domain
  misc_feature (1)..(157): Homolog of NCBI NO: 15232230 NR Description: putative sulfite oxidase; protein id: supported by cDNA: gi_13430669, supported by cDNA: gi_6468007 thaliana] >gi|6091746|gb|AAF03458.1|AC010797_34 putative sulfite
  misc_feature (1)..(157): Homolog of NCBI NO: 6468008 NR Description: sulfite oxidase [Arabidopsis thaliana]
  misc_feature (1)..(151): Homolog of NCBI NO: 22759584 NR Description: Moco containing protein [Oryza sativa (japonica
  misc_feature (1)..(148): Homolog of NCBI NO: 3212610 NR Description: Chain A, Sulfite Oxidase From Chicken Liver
  misc_feature (1)..(148): Homolog of NCBI NO: 30424565 NR Description: sulfite oxidase [Mus musculus] Sulfite oxidase, mitochondrial precursor
  misc_feature (1)..(148): Homolog of NCBI NO: 586053 NR Description: Sulfite oxidase, mitochondrial precursor
  misc_feature (1)..(148): Homolog of NCBI NO: 40254758 NR Description: sulfite oxidase [Rattus norvegicus]
  misc_feature (1)..(148): Homolog of NCBI NO: 4557867 NR Description: SUOX gene product [Homo sapiens] Sulfite oxidase, mitochondrial precursor >gi|1362942|pir||S55874
  misc_feature (1)..(147): Homolog of NCBI NO: 86440 NR Description: sulfite oxidase (EC 1.8.3.1), hepatic - chicken
  misc_feature (1)..(147): Homolog of NCBI NO: 28558813 NR Description: Sulfite oxidase

SEQ ID NO: 85382 - protein, 151 aa, Arabidopsis thaliana; identical to SEQ ID NO: 37426
  peptide (1)..(151): Ceres Seq. ID no. 12680229
  misc_feature (16)..(147): Pfam Name: Mo-co oxidoreductase dimerisation domain Pfam Description: Mo-co oxidoreductase dimerisation domain
  misc_feature (1)..(151): Homolog of NCBI NO: 15232230 NR Description: putative sulfite oxidase; protein id: supported by cDNA: gi_13430669, supported by cDNA: gi_6468007 thaliana] >gi|6091746|gb|AAF03458.1|AC010797_34 putative sulfite
  misc_feature (1)..(151): Homolog of NCBI NO: 6468008 NR Description: sulfite oxidase [Arabidopsis thaliana]
  misc_feature (1)..(145): Homolog of NCBI NO: 22759584 NR Description: Moco containing protein [Oryza sativa (japonica
  misc_feature (1)..(142): Homolog of NCBI NO: 3212610 NR Description: Chain A, Sulfite Oxidase From Chicken Liver
  misc_feature (1)..(142): Homolog of NCBI NO: 30424565 NR Description: sulfite oxidase [Mus musculus] Sulfite oxidase, mitochondrial precursor
  misc_feature (1)..(142): Homolog of NCBI NO: 586053 NR Description: Sulfite oxidase, mitochondrial precursor
  misc_feature (1)..(142): Homolog of NCBI NO: 40254758 NR Description: sulfite oxidase [Rattus norvegicus]
  misc_feature (1)..(142): Homolog of NCBI NO: 4557867 NR Description: SUOX gene product [Homo sapiens] Sulfite oxidase, mitochondrial precursor >gi|1362942|pir||S55874
  misc_feature (1)..(141): Homolog of NCBI NO: 86440 NR Description: sulfite oxidase (EC 1.8.3.1), hepatic - chicken
  misc_feature (1)..(141): Homolog of NCBI NO: 28558813 NR Description: Sulfite oxidase

SEQ ID NO: 85383 - DNA, 1940 bp, Arabidopsis thaliana
  misc_feature (1)..(1940): Ceres Seq. ID no. 12680234
  misc_feature: MA Experiment ID: 20000307 Result: Up-regulated in Transcription
  misc_feature: MA Experiment 20000307 PARAMETER Experiment Name: At_Germinating_Seeds_Sub_P Parameter: Age (hr) Value: 24 vs. 0
  misc_feature: MA Experiment 20000307 PARAMETER Experiment Name: At_Germinating_Seeds_Sub_P Parameter: Organism Value: A. thaliana
  misc_feature: MA Experiment 20000307 PARAMETER Experiment Name: At_Germinating_Seeds_Sub_P Parameter: Plant Line Value: WS
  misc_feature: MA Experiment 20000307 PARAMETER Experiment Name: At_Germinating_Seeds_Sub_P Parameter: Tissue Value: Germinating Seeds
  misc_feature: MA Experiment ID: 20000315 Result: Down-regulated in Transcription
  misc_feature: MA Experiment 20000315 PARAMETER Experiment Name: At_14day_Shoots-Roots_Sub_P Parameter: Age (day) Value: 14
  misc_feature: MA Experiment 20000315 PARAMETER Experiment Name: At_14day_Shoots-Roots_Sub_P Parameter: Organism Value: A. thaliana
  misc_feature: MA Experiment 20000315 PARAMETER Experiment Name: At_14day_Shoots-Roots_Sub_P Parameter: Plant Line Value: WS
  misc_feature: MA Experiment 20000315 PARAMETER Experiment Name: At_14day_Shoots-Roots_Sub_P Parameter: Tissue Value: Shoots vs. Whole Plant
  misc_feature: MA Experiment ID: 20000327 Result: Down-regulated in Transcription
  misc_feature: MA Experiment 20000327 PARAMETER Experiment Name: At_42deg_Heat_Sub_P Parameter: Age (day) Value: 14
  misc_feature: MA Experiment 20000327 PARAMETER Experiment Name: At_42deg_Heat_Sub_P Parameter: Organism Value: A. thaliana
  misc_feature: MA Experiment 20000327 PARAMETER Experiment Name: At_42deg_Heat_Sub_P Parameter: Plant Line Value: WS
  misc_feature: MA Experiment 20000327 PARAMETER Experiment Name: At_42deg_Heat_Sub_P Parameter: Temperature (deg C) Value: 42 vs. 22
  misc_feature: MA Experiment 20000327 PARAMETER Experiment Name: At_42deg_Heat_Sub_P Parameter: Timepoint (hr) Value: 1
  misc_feature: MA Experiment 20000327 PARAMETER Experiment Name: At_42deg_Heat_Sub_P Parameter: Tissue Value: Aerial
  misc_feature: MA Experiment ID: 20000328 Result: Down-regulated in Transcription
  misc_feature: MA Experiment 20000328 PARAMETER Experiment Name: At_42deg_Heat_Sub_P Parameter: Age (day) Value: 14
  misc_feature: MA Experiment 20000328 PARAMETER Experiment Name: At_42deg_Heat_Sub_P Parameter: Organism Value: A. thaliana
  misc_feature: MA Experiment 20000328 PARAMETER Experiment Name: At_42deg_Heat_Sub_P Parameter: Plant Line Value: WS
  misc_feature: MA Experiment 20000328 PARAMETER Experiment Name: At_42deg_Heat_Sub_P Parameter: Temperature (deg C) Value: 42 vs. 22
  misc_feature: MA Experiment 20000328 PARAMETER Experiment Name: At_42deg_Heat_Sub_P Parameter: Timepoint (hr) Value: 6
  misc_feature: MA Experiment 20000328 PARAMETER Experiment Name: At_42deg_Heat_Sub_P Parameter: Tissue Value: Aerial
  misc_feature: MA Experiment ID: 20000355 Result: Down-regulated in Transcription
  misc_feature: MA Experiment 20000355 PARAMETER Experiment Name: At_Siliques_Sub_P Parameter: Age (day) Value: 21
  misc_feature: MA Experiment 20000355 PARAMETER Experiment Name: At_Siliques_Sub_P Parameter: Organism Value: A. thaliana
  misc_feature: MA Experiment 20000355 PARAMETER Experiment Name: At_Siliques_Sub_P Parameter: Plant Line Value: WS
  misc_feature: MA Experiment 20000355 PARAMETER Experiment Name: At_Siliques_Sub_P Parameter: Tissue Value: Less Than 5mm Siliques vs. Whole Plant
  misc_feature: MA Experiment ID: 20001807 Result: Down-regulated in Transcription
  misc_feature: MA Experiment 20001807 PARAMETER Experiment Name: At_50mM_NH4NO3_L-to-H_Sub_P Parameter: Timepoint (hr) Value: 6
  misc_feature: MA Experiment 20001807 PARAMETER Experiment Name: At_50mM_NH4NO3_L-to-H_Sub_P Parameter: Tissue Value: Leaf
  misc_feature: MA Experiment 20001807 PARAMETER Experiment Name: At_50mM_NH4NO3_L-to-H_Sub_P Parameter: Treatment Value: 50mM NH4NO3 vs 100mM Mannitol
tgaggttttttgagaatttgcgtaaaggaagaaactttttcaaaacttttttttgcatcaatggagaacataaccgcgcagctcaaacgaggtatctcaagacaattctcaactggttcgattcgtcgaacattgagccgacagttcacgcgtcagtcatctcttgaccctcgtaggaccaacatgaggtttagtttcggtcgtcagtcttctctcgatccgatcaggaggagtcctgattcttccaagagtgatgacgagccacatatgtcggtaccggagaatctcgattcgacgatgcagcttctctttatggctagcaaaggtgatgtcagaggaatcgaggagcttcttgacgaaggaattgatgttaatagcatcgatcttgatggccggacggcgcttcacatcgccgcttgtgagggacatcttggtgtcgttaaggctcttcttagccggagagctaacattgatgctcgtgatcgatggggaagtacggcggctgctgatgcaaagtactatgggaatttagatgtttacaatctcttgaaggctcgaggagctaaagttccgaaaactaggaagactccgatgactgtgtcgaatccacgagaagttcctgagtatgagcttaatccacttgaggttcaagtcaggaaatctgatggcatctcaaagggagcatatcaagtagctaaatggaatggcacgcgggtttcagtcaaaatacttgataaagatagttactcagacccggaacgcataaacgcatttagacatgaattgacgttgctagaaaaagtccggcatccaaatgttatccagtttgttggagctgtcactcagaatataccgatgatgattgtagtcgagtataatccgaaaggagatttaagtgtatatctccaaaagaaaggacgtctttctccatccaaggcacttagatttgctcttgatattgccagaggcatgaactacctccatgaatgtaaaccagatccaatcattcactgtgatctaaagccaaagtaagagaattaaaggcatatgtcgattagatacgttaaaagcttttggtacatactcattgagatgtttcttttcgtttaatttttcgaaatttttcgtaaggtgtcagaaatattttgctggatagaggagggcaattaaagatctcaggatttggtatgataagattgtcgaaaatttcacaagacaaggcgaaagtagcaaaccacaaagcacatatagatctctctaattactacattgcaccagaggtttataaagacgaaatattcgacctaagggttgatgcacactcctttggtgtcattttatacgagataacagagggagtaccagttttccatccgagacctcctgaagaagttgcgagaatgatgtgcttagaaggaaagagacctgtattcaaaactaagtcaagaagttaccctccagatataaaagagttgatcgagaaatgttggcatccagaagcgggtattagaccgacattctctgaaattattattcgacttgacaaaatagtagcaaattgctctaaacaaggatggtggaaagacacattcaagttcccttggaaataaaaggggaagaagaaggagggagaaacaagaagagcgtgagatttgtggacaaaatccgattcagtgtttctcagtcatatgaacatggacaaactcacttgctatgtatattttttgtgtagaacaaaaaacagaagataatttcttctttttgtcattccacatctttatggggctgtatgcataagtttgtatagtttataaacgcgttactgtataacaaacacaagaactccggctcgttgcaattagaggatgaacaaacaacagatgaagaatcattttgaaaggttttattgaaatatccatcaagagatataaaatctttgc

SEQ ID NO: 85384 - protein, 323 aa, Arabidopsis thaliana
  peptide (1)..(323): Ceres Seq. ID no. 12680235
  misc_feature (143)..(175): Pfam Name: Ankyrin repeat Pfam Description: Ankyrin repeat
  misc_feature (1)..(323): Homolog of NCBI NO: 30689517 NR Description: protein kinase -related [Arabidopsis thaliana]
  misc_feature (1)..(323): Homolog of NCBI NO: 25408910 NR Description: probable protein kinase [imported] - Arabidopsis >gi|6598341|gb|AAF18591.1| putative protein kinase [Arabidopsis
  misc_feature (1)..(323): Homolog of NCBI NO: 15232181 NR Description: putative protein; protein id: At3g59830.1
  misc_feature (1)..(323): Homolog of NCBI NO: 18700701 NR Description: ankyrin-kinase [Medicago truncatula]
  misc_feature (1)..(323): Homolog of NCBI NO: 18700703 NR Description: putative ankyrin-kinase [Medicago sativa]
  misc_feature (1)..(323): Homolog of NCBI NO: 15225139 NR Description: putative protein kinase; protein id: At2g31800.1
  misc_feature (218)..(323): Homolog of NCBI NO: 22652536 NR Description: ankyrin-kinase protein [Arabidopsis thaliana]
  misc_feature (8)..(323): Homolog of NCBI NO: 34907560 NR Description: ankyrin-kinase -like protein [Oryza sativa
  misc_feature (197)..(323): Homolog of NCBI NO: 22652534 NR Description: ankyrin-kinase protein [Arabidopsis thaliana]
  misc_feature (43)..(322): Homolog of NCBI NO: 18415205 NR Description: protein kinase - like protein; protein id: supported by cDNA: 38712., supported by cDNA: gi_16648823 thaliana] >gi|16648824|gb|AAL25602.1| AT4g18950/F13C5_120
MENITAQLKRGISRQFSTGSIRRTLSRQFTRQSSLDPRRTNMRFSFGRQSSLDPIRRSPDSSKSDDEPHMSVPENLDSTMQLLFMASKGDVRGIEELLDEGIDVNSIDLDGRTALHIAACEGHLGVVKALLSRRANIDARDRWGSTAAADAKYYGNLDVYNLLKARGAKVPKTRKTPMTVSNPREVPEYELNPLEVQVRKSDGISKGAYQVAKWNGTRVSVKILDKDSYSDPERINAFRHELTLLEKVRHPNVIQFVGAVTQNIPMMIVVEYNPKGDLSVYLQKKGRLSPSKALRFALDIARGMNYLHECKPDPIIHCDLKPK

SEQ ID NO: 85385 - protein, 282 aa, Arabidopsis thaliana
  peptide (1)..(282): Ceres Seq. ID no. 12680236
  misc_feature (102)..(134): Pfam Name: Ankyrin repeat Pfam Description: Ankyrin repeat
  misc_feature (1)..(282): Homolog of NCBI NO: 30689517 NR Description: protein kinase -related [Arabidopsis thaliana]
  misc_feature (1)..(282): Homolog of NCBI NO: 25408910 NR Description: probable protein kinase [imported] - Arabidopsis >gi|6598341|gb|AAF18591.1| putative protein kinase [Arabidopsis
  misc_feature (1)..(282): Homolog of NCBI NO: 15232181 NR Description: putative protein; protein id: At3g59830.1
  misc_feature (1)..(282): Homolog of NCBI NO: 18700701 NR Description: ankyrin-kinase [Medicago truncatula]
  misc_feature (1)..(282): Homolog of NCBI NO: 18700703 NR Description: putative ankyrin-kinase [Medicago sativa]
  misc_feature (1)..(282): Homolog of NCBI NO: 15225139 NR Description: putative protein kinase; protein id: At2g31800.1
  misc_feature (177)..(282): Homolog of NCBI NO: 22652536 NR Description: ankyrin-kinase protein [Arabidopsis thaliana]
  misc_feature (1)..(282): Homolog of NCBI NO: 34907560 NR Description: ankyrin-kinase -like protein [Oryza sativa
  misc_feature (156)..(282): Homolog of NCBI NO: 22652534 NR Description: ankyrin-kinase protein [Arabidopsis thaliana]
  misc_feature (2)..(281): Homolog of NCBI NO: 18415205 NR Description: protein kinase - like protein; protein id: supported by cDNA: 38712., supported by cDNA: gi_16648823 thaliana] >gi|16648824|gb|AAL25602.1| AT4g18950/F13C5_120
MRFSFGRQSSLDPIRRSPDSSKSDDEPHMSVPENLDSTMQLLFMASKGDVRGIEELLDEGIDVNSIDLDGRTALHIAACEGHLGVVKALLSRRANIDARDRWGSTAAADAKYYGNLDVYNLLKARGAKVPKTRKTPMTVSNPREVPEYELNPLEVQVRKSDGISKGAYQVAKWNGTRVSVKILDKDSYSDPERINAFRHELTLLEKVRHPNVIQFVGAVTQNIPMMIVVEYNPKGDLSVYLQKKGRLSPSKALRFALDIARGMNYLHECKPDPIIHCDLKPK

SEQ ID NO: 85386 - protein, 254 aa, Arabidopsis thaliana
  peptide (1)..(254): Ceres Seq. ID no. 12680237
  misc_feature (74)..(106): Pfam Name: Ankyrin repeat Pfam Description: Ankyrin repeat
  misc_feature (1)..(254): Homolog of NCBI NO: 30689517 NR Description: protein kinase -related [Arabidopsis thaliana]
  misc_feature (1)..(254): Homolog of NCBI NO: 25408910 NR Description: probable protein kinase [imported] - Arabidopsis >gi|6598341|gb|AAF18591.1| putative protein kinase [Arabidopsis
  misc_feature (1)..(254): Homolog of NCBI NO: 15232181 NR Description: putative protein; protein id: At3g59830.1
  misc_feature (1)..(254): Homolog of NCBI NO: 18700701 NR Description: ankyrin-kinase [Medicago truncatula]
  misc_feature (1)..(254): Homolog of NCBI NO: 18700703 NR Description: putative ankyrin-kinase [Medicago sativa]
  misc_feature (1)..(254): Homolog of NCBI NO: 15225139 NR Description: putative protein kinase; protein id: At2g31800.1
  misc_feature (149)..(254): Homolog of NCBI NO: 22652536 NR Description: ankyrin-kinase protein [Arabidopsis thaliana]
  misc_feature (1)..(254): Homolog of NCBI NO: 34907560 NR Description: ankyrin-kinase -like protein [Oryza sativa
  misc_feature (128)..(254): Homolog of NCBI NO: 22652534 NR Description: ankyrin-kinase protein [Arabidopsis thaliana]
  misc_feature (1)..(253): Homolog of NCBI NO: 18415205 NR Description: protein kinase - like protein; protein id: supported by cDNA: 38712., supported by cDNA: gi_16648823 thaliana] >gi|16648824|gb|AAL25602.1| AT4g18950/F13C5_120
MSVPENLDSTMQLLFMASKGDVRGIEELLDEGIDVNSIDLDGRTALHIAACEGHLGVVKALLSRRANIDARDRWGSTAAADAKYYGNLDVYNLLKARGAKVPKTRKTPMTVSNPREVPEYELNPLEVQVRKSDGISKGAYQVAKWNGTRVSVKILDKDSYSDPERINAFRHELTLLEKVRHPNVIQFVGAVTQNIPMMIVVEYNPKGDLSVYLQKKGRLSPSKALRFALDIARGMNYLHECKPDPIIHCDLKPK

SEQ ID NO: 85387 - DNA, 1125 bp, Arabidopsis thaliana
  misc_feature (1)..(1125): Ceres Seq. ID no. 12680238
  misc_feature: MA Experiment ID: 20000307 Result: Up-regulated in Transcription
  misc_feature: MA Experiment 20000307 PARAMETER Experiment Name: At_Germinating_Seeds_Sub_P Parameter: Age (hr) Value: 24 vs. 0
  misc_feature: MA Experiment 20000307 PARAMETER Experiment Name: At_Germinating_Seeds_Sub_P Parameter: Organism Value: A. thaliana
  misc_feature: MA Experiment 20000307 PARAMETER Experiment Name: At_Germinating_Seeds_Sub_P Parameter: Plant Line Value: WS
  misc_feature: MA Experiment 20000307 PARAMETER Experiment Name: At_Germinating_Seeds_Sub_P Parameter: Tissue Value: Germinating Seeds
  misc_feature: MA Experiment ID: 20000315 Result: Down-regulated in Transcription
  misc_feature: MA Experiment 20000315 PARAMETER Experiment Name: At_14day_Shoots-Roots_Sub_P Parameter: Age (day) Value: 14
  misc_feature: MA Experiment 20000315 PARAMETER Experiment Name: At_14day_Shoots-Roots_Sub_P Parameter: Organism Value: A. thaliana
  misc_feature: MA Experiment 20000315 PARAMETER Experiment Name: At_14day_Shoots-Roots_Sub_P Parameter: Plant Line Value: WS
  misc_feature: MA Experiment 20000315 PARAMETER Experiment Name: At_14day_Shoots-Roots_Sub_P Parameter: Tissue Value: Shoots vs. Whole Plant
  misc_feature: MA Experiment ID: 20000327 Result: Down-regulated in Transcription
  misc_feature: MA Experiment 20000327 PARAMETER Experiment Name: At_42deg_Heat_Sub_P Parameter: Age (day) Value: 14
  misc_feature: MA Experiment 20000327 PARAMETER Experiment Name: At_42deg_Heat_Sub_P Parameter: Organism Value: A. thaliana
  misc_feature: MA Experiment 20000327 PARAMETER Experiment Name: At_42deg_Heat_Sub_P Parameter: Plant Line Value: WS
  misc_feature: MA Experiment 20000327 PARAMETER Experiment Name: At_42deg_Heat_Sub_P Parameter: Temperature (deg C) Value: 42 vs. 22
  misc_feature: MA Experiment 20000327 PARAMETER Experiment Name: At_42deg_Heat_Sub_P Parameter: Timepoint (hr) Value: 1
  misc_feature: MA Experiment 20000327 PARAMETER Experiment Name: At_42deg_Heat_Sub_P Parameter: Tissue Value: Aerial
  misc_feature: MA Experiment ID: 20000328 Result: Down-regulated in Transcription
  misc_feature: MA Experiment 20000328 PARAMETER Experiment Name: At_42deg_Heat_Sub_P Parameter: Age (day) Value: 14
  misc_feature: MA Experiment 20000328 PARAMETER Experiment Name: At_42deg_Heat_Sub_P Parameter: Organism Value: A. thaliana
  misc_feature: MA Experiment 20000328 PARAMETER Experiment Name: At_42deg_Heat_Sub_P Parameter: Plant Line Value: WS
  misc_feature: MA Experiment 20000328 PARAMETER Experiment Name: At_42deg_Heat_Sub_P Parameter: Temperature (deg C) Value: 42 vs. 22
  misc_feature: MA Experiment 20000328 PARAMETER Experiment Name: At_42deg_Heat_Sub_P Parameter: Timepoint (hr) Value: 6
  misc_feature: MA Experiment 20000328 PARAMETER Experiment Name: At_42deg_Heat_Sub_P Parameter: Tissue Value: Aerial
  misc_feature: MA Experiment ID: 20000355 Result: Down-regulated in Transcription
  misc_feature: MA Experiment 20000355 PARAMETER Experiment Name: At_Siliques_Sub_P Parameter: Age (day) Value: 21
  misc_feature: MA Experiment 20000355 PARAMETER Experiment Name: At_Siliques_Sub_P Parameter: Organism Value: A. thaliana
  misc_feature: MA Experiment 20000355 PARAMETER Experiment Name: At_Siliques_Sub_P Parameter: Plant Line Value: WS
  misc_feature: MA Experiment 20000355 PARAMETER Experiment Name: At_Siliques_Sub_P Parameter: Tissue Value: Less Than 5mm Siliques vs. Whole Plant
  misc_feature: MA Experiment ID: 20001807 Result: Down-regulated in Transcription
  misc_feature: MA Experiment 20001807 PARAMETER Experiment Name: At_50mM_NH4NO3_L-to-H_Sub_P Parameter: Timepoint (hr) Value: 6
  misc_feature: MA Experiment 20001807 PARAMETER Experiment Name: At_50mM_NH4NO3_L-to-H_Sub_P Parameter: Tissue Value: Leaf
  misc_feature: MA Experiment 20001807 PARAMETER Experiment Name: At_50mM_NH4NO3_L-to-H_Sub_P Parameter: Treatment Value: 50mM NH4NO3 vs 100mM Mannitol
gcgggtttcagtcaaaatacttgataaagatagttactcagacccggaacgcataaacgcatttagacatgaattgacgttgctagaaaaagtccggcatccaaatgttatccagtttgttggagctgtcactcagaatataccgatgatgattgtagtcgagtataatccgaaaggagatttaagtgtatatctccaaaagaaaggacgtctttctccatccaaggcacttagatttgctcttgatattgccagaggcatgaactacctccatgaatgtaaaccagatccaatcattcactgtgatctaaagccaaaaaatattttgctggatagaggagggcaattaaagatctcaggatttggtatgataagattgtcgaaaatttcacaagacaaggcgaaagtagcaaaccacaaagcacatatagatctctctaattactacattgcaccagaggtttataaagacgaaatattcgacctaagggttgatgcacactcctttggtgtcattttatacgagataacagagggagtaccagttttccatccgagacctcctgaagaagttgcgagaatgatgtgcttagaaggaaagagacctgtattcaaaactaagtcaagaagttaccctccagatataaaagagttgatcgagaaatgttggcatccagaagcgggtattagaccgacattctctgaaattattattcgacttgacaaaatagtagcaaattgctctaaacaaggatggtggaaagacacattcaagttcccttggaaataaaaggggaagaagaaggagggagaaacaagaagagcgtgagatttgtggacaaaatccgattcagtgtttctcagtcatatgaacatggacaaactcacttgctatgtatattttttgtgtagaacaaaaaacagaagataatttcttctttttgtcattccacatctttatggggctgtatgcataagtttgtatagtttataaacgcgttactgtataacaaacacaagaactccggctcgttgcaattagaggatgaacaaacaacagatgaagaatcattttgaaaggttttattgaaatatccatcaagagatataaaatctttgctactt

SEQ ID NO: 85388 - protein, 262 aa, Arabidopsis thaliana
  peptide (1)..(262): Ceres Seq. ID no. 12680239
  misc_feature (1)..(262): Homolog of NCBI NO: 30689517 NR Description: protein kinase -related [Arabidopsis thaliana]
  misc_feature (1)..(262): Homolog of NCBI NO: 22652536 NR Description: ankyrin-kinase protein [Arabidopsis thaliana]
  misc_feature (1)..(262): Homolog of NCBI NO: 25408910 NR Description: probable protein kinase [imported] - Arabidopsis >gi|6598341|gb|AAF18591.1| putative protein kinase [Arabidopsis
  misc_feature (1)..(261): Homolog of NCBI NO: 15232181 NR Description: putative protein; protein id: At3g59830.1
  misc_feature (1)..(262): Homolog of NCBI NO: 22652534 NR Description: ankyrin-kinase protein [Arabidopsis thaliana]
  misc_feature (1)..(262): Homolog of NCBI NO: 18700703 NR Description: putative ankyrin-kinase [Medicago sativa]
  misc_feature (1)..(262): Homolog of NCBI NO: 18700701 NR Description: ankyrin-kinase [Medicago truncatula]
  misc_feature (1)..(261): Homolog of NCBI NO: 15225139 NR Description: putative protein kinase; protein id: At2g31800.1
  misc_feature (1)..(235): Homolog of NCBI NO: 34907560 NR Description: ankyrin-kinase -like protein [Oryza sativa
  misc_feature (2)..(254): Homolog of NCBI NO: 18411024 NR Description: putative protein; protein id: At3g58760.1
RVSVKILDKDSYSDPERINAFRHELTLLEKVRHPNVIQFVGAVTQNIPMMIVVEYNPKGDLSVYLQKKGRLSPSKALRFALDIARGMNYLHECKPDPIIHCDLKPKNILLDRGGQLKISGFGMIRLSKISQDKAKVANHKAHIDLSNYYIAPEVYKDEIFDLRVDAHSFGVILYEITEGVPVFHPRPPEEVARMMCLEGKRPVFKTKSRSYPPDIKELIEKCWHPEAGIRPTFSEIIIRLDKIVANCSKQGWWKDTFKFPWK

SEQ ID NO: 85389 - protein, 214 aa, Arabidopsis thaliana
  peptide (1)..(214): Ceres Seq. ID no. 12680240
  misc_feature (1)..(214): Homolog of NCBI NO: 30689517 NR Description: protein kinase -related [Arabidopsis thaliana]
  misc_feature (1)..(214): Homolog of NCBI NO: 22652536 NR Description: ankyrin-kinase protein [Arabidopsis thaliana]
  misc_feature (1)..(214): Homolog of NCBI NO: 25408910 NR Description: probable protein kinase [imported] - Arabidopsis >gi|6598341|gb|AAF18591.1| putative protein kinase [Arabidopsis
  misc_feature (1)..(213): Homolog of NCBI NO: 15232181 NR Description: putative protein; protein id: At3g59830.1
  misc_feature (1)..(214): Homolog of NCBI NO: 22652534 NR Description: ankyrin-kinase protein [Arabidopsis thaliana]
  misc_feature (1)..(214): Homolog of NCBI NO: 18700703 NR Description: putative ankyrin-kinase [Medicago sativa]
  misc_feature (1)..(214): Homolog of NCBI NO: 18700701 NR Description: ankyrin-kinase [Medicago truncatula]
  misc_feature (1)..(213): Homolog of NCBI NO: 15225139 NR Description: putative protein kinase; protein id: At2g31800.1
  misc_feature (1)..(187): Homolog of NCBI NO: 34907560 NR Description: ankyrin-kinase -like protein [Oryza sativa
  misc_feature (1)..(206): Homolog of NCBI NO: 18411024 NR Description: putative protein; protein id: At3g58760.1
MMIVVEYNPKGDLSVYLQKKGRLSPSKALRFALDIARGMNYLHECKPDPIIHCDLKPKNILLDRGGQLKISGFGMIRLSKISQDKAKVANHKAHIDLSNYYIAPEVYKDEIFDLRVDAHSFGVILYEITEGVPVFHPRPPEEVARMMCLEGKRPVFKTKSRSYPPDIKELIEKCWHPEAGIRPTFSEIIIRLDKIVANCSKQGWWKDTFKFPWK

SEQ ID NO: 85390 - protein, 213 aa, Arabidopsis thaliana
  peptide (1)..(213): Ceres Seq. ID no. 12680241
  misc_feature (1)..(213): Homolog of NCBI NO: 30689517 NR Description: protein kinase -related [Arabidopsis thaliana]
  misc_feature (1)..(213): Homolog of NCBI NO: 22652536 NR Description: ankyrin-kinase protein [Arabidopsis thaliana]
  misc_feature (1)..(213): Homolog of NCBI NO: 25408910 NR Description: probable protein kinase [imported] - Arabidopsis >gi|6598341|gb|AAF18591.1| putative protein kinase [Arabidopsis
  misc_feature (1)..(212): Homolog of NCBI NO: 15232181 NR Description: putative protein; protein id: At3g59830.1
  misc_feature (1)..(213): Homolog of NCBI NO: 22652534 NR Description: ankyrin-kinase protein [Arabidopsis thaliana]
  misc_feature (1)..(213): Homolog of NCBI NO: 18700703 NR Description: putative ankyrin-kinase [Medicago sativa]
  misc_feature (1)..(213): Homolog of NCBI NO: 18700701 NR Description: ankyrin-kinase [Medicago truncatula]
  misc_feature (1)..(212): Homolog of NCBI NO: 15225139 NR Description: putative protein kinase; protein id: At2g31800.1
  misc_feature (1)..(186): Homolog of NCBI NO: 34907560 NR Description: ankyrin-kinase -like protein [Oryza sativa
  misc_feature (1)..(205): Homolog of NCBI NO: 18411024 NR Description: putative protein; protein id: At3g58760.1
MIVVEYNPKGDLSVYLQKKGRLSPSKALRFALDIARGMNYLHECKPDPIIHCDLKPKNILLDRGGQLKISGFGMIRLSKISQDKAKVANHKAHIDLSNYYIAPEVYKDEIFDLRVDAHSFGVILYEITEGVPVFHPRPPEEVARMMCLEGKRPVFKTKSRSYPPDIKELIEKCWHPEAGIRPTFSEIIIRLDKIVANCSKQGWWKDTFKFPWK

SEQ ID NO: 85391 - DNA, 607 bp, Arabidopsis thaliana
  misc_feature (1)..(607): Ceres Seq. ID no. 12680249
  misc_feature: MA Experiment ID: 108434 Result: Up-regulated in Transcription
  misc_feature: MA Experiment 108434 PARAMETER Experiment Name: At_Root_Tips_cDNA_P Parameter: Tissue Value: Root Tips
  misc_feature: MA Experiment ID: 20000184 Result: Down-regulated in Transcription
  misc_feature: MA Experiment 20000184 PARAMETER Experiment Name: At_Shoots__P Parameter: Age (day) Value: 7
  misc_feature: MA Experiment 20000184 PARAMETER Experiment Name: At_Shoots__P Parameter: Tissue Value: Shoots vs. Whole Plant
  misc_feature: MA Experiment ID: 20000224 Result: Up-regulated in Transcription
  misc_feature: MA Experiment ID: 20001451 Result: Up-regulated in Transcription
  misc_feature: MA Experiment 20001451 PARAMETER Experiment Name: At_Far-red-induction_P Parameter: Age (day) Value: 7
  misc_feature: MA Experiment 20001451 PARAMETER Experiment Name: At_Far-red-induction_P Parameter: Light Value: Far-red vs. White
  misc_feature: MA Experiment 20001451 PARAMETER Experiment Name: At_Far-red-induction_P Parameter: Organism Value: A. thaliana
  misc_feature: MA Experiment 20001451 PARAMETER Experiment Name: At_Far-red-induction_P Parameter: Plant Line Value: Columbia
  misc_feature: MA Experiment 20001451 PARAMETER Experiment Name: At_Far-red-induction_P Parameter: Timepoint (hr) Value: 24
  misc_feature: MA Experiment 20001451 PARAMETER Experiment Name: At_Far-red-induction_P Parameter: Tissue Value: Whole Plant
  misc_feature: MA Experiment ID: 20001560 Result: Up-regulated in Transcription
  misc_feature: MA Experiment 20001560 PARAMETER Experiment Name: At_Drought_Soil_Dry_P Parameter: Age (day) Value: 28
  misc_feature: MA Experiment 20001560 PARAMETER Experiment Name: At_Drought_Soil_Dry_P Parameter: Organism Value: A. thaliana
  misc_feature: MA Experiment 20001560 PARAMETER Experiment Name: At_Drought_Soil_Dry_P Parameter: Plant Line Value: WS
  misc_feature: MA Experiment 20001560 PARAMETER Experiment Name: At_Drought_Soil_Dry_P Parameter: Post Timepoint (hr) Value: None
  misc_feature: MA Experiment 20001560 PARAMETER Experiment Name: At_Drought_Soil_Dry_P Parameter: Post-Treatment Value: None
  misc_feature: MA Experiment 20001560 PARAMETER Experiment Name: At_Drought_Soil_Dry_P Parameter: Timepoint (day) Value: 14
  misc_feature: MA Experiment 20001560 PARAMETER Experiment Name: At_Drought_Soil_Dry_P Parameter: Treatment Value: Drought vs. No Drought
gatctgcaaaagatatccatctgcggtttaacaatggttctattacagttggatccattcctcaatgaactcacgagcatgtttgagaaaagcaaagagaagggttctgtgtgggttactttgaaaagatcatctctcaagtctaaggtgcagaagaggaaactgagctcagttggagaatccattgaatacagatgccttattcgagcaaccgatggaaagaaaactgtttctacttcggttggtgctaaggatcaccagagatttcaagcatcatatgccaccattcttaaggcccacatgactgctttgaagaagagggaaaggaaagaccggaagaaatcgacagaggcagagaagaaagaaagcacttcaaccactaaatctaagaaactttgatttctccttttgtgtttctcattgatttgcaattgctgcttaagagttgaattttgaaagctattgaaagatctaaaagattttgacttgtgttataatagagattttggtttgcatttgcttttccctcgagaatgttcatcgtgtataaataaaccaattccatacaaatgtacgaacataaatccaattcaaagaaactgattct

SEQ ID NO: 85392 - protein, 132 aa, Arabidopsis thaliana
  peptide (1)..(132): Ceres Seq. ID no. 12680250
  misc_feature (15)..(104): Pfam Name: Signal recognition particle 14kD protein Pfam Description: Signal recognition particle 14kD protein
  misc_feature (12)..(132): Homolog of NCBI NO: 15224325 NR Description: putative signal recognition particle protein ATSRP14; protein id: At2g43640.1, supported by cDNA: 97249.
  misc_feature (12)..(132): Homolog of NCBI NO: 6175053 NR Description: Signal recognition particle 14 kDa protein >gi|2208946|emb|CAA71202.1| signal recognition particle subunit
  misc_feature (12)..(131): Homolog of NCBI NO: 6094345 NR Description: SIGNAL RECOGNITION PARTICLE 14 KD PROTEIN (SRP14)
  misc_feature (12)..(122): Homolog of NCBI NO: 5107800 NR Description: Signal Recognition Particle Alu Rna Binding
  misc_feature (12)..(119): Homolog of NCBI NO: 6678133 NR Description: signal recognition particle (homologous Alu RNA
  misc_feature (12)..(118): Homolog of NCBI NO: 1082198 NR Description: Alu RNA-binding protein - human to signal recognition particle 14kDa (homologous Alu RNA binding
  misc_feature (12)..(119): Homolog of NCBI NO: 2507409 NR Description: SIGNAL RECOGNITION PARTICLE 14 KD PROTEIN (SRP14)
  misc_feature (13)..(117): Homolog of NCBI NO: 11513833 NR Description: Chain B, Core Of The Alu Domain Of The Mammalian >gi|11513835|pdb|1E8O|D Chain D, Core Of The Alu Domain Of The Srp >gi|11513839|pdb|1E8S|B Chain B, Alu Domain Of The Mammalian
  misc_feature (12)..(132): Homolog of NCBI NO: 34877748 NR Description: similar to Chain , Signal Recognition Particle
  misc_feature (15)..(114): Homolog of NCBI NO: 37543970 NR Description: similar to signal recognition particle 14kD [Homo
DLQKISICGLTMVLLQLDPFLNELTSMFEKSKEKGSVWVTLKRSSLKSKVQKRKLSSVGESIEYRCLIRATDGKKTVSTSVGAKDHQRFQASYATILKAHMTALKKRERKDRKKSTEAEKKESTSTTKSKKL

SEQ ID NO: 85393 - protein, 121 aa, Arabidopsis thaliana; identical to SEQ ID NO: 38394
  peptide (1)..(121): Ceres Seq. ID no. 12680251
  misc_feature (4)..(93): Pfam Name: Signal recognition particle 14kD protein Pfam Description: Signal recognition particle 14kD protein
  misc_feature (1)..(121): Homolog of NCBI NO: 15224325 NR Description: putative signal recognition particle protein ATSRP14; protein id: At2g43640.1, supported by cDNA: 97249.
  misc_feature (1)..(121): Homolog of NCBI NO: 6175053 NR Description: Signal recognition particle 14 kDa protein >gi|2208946|emb|CAA71202.1| signal recognition particle subunit
  misc_feature (1)..(120): Homolog of NCBI NO: 6094345 NR Description: SIGNAL RECOGNITION PARTICLE 14 KD PROTEIN (SRP14)
  misc_feature (1)..(111): Homolog of NCBI NO: 5107800 NR Description: Signal Recognition Particle Alu Rna Binding
  misc_feature (1)..(108): Homolog of NCBI NO: 6678133 NR Description: signal recognition particle (homologous Alu RNA
  misc_feature (1)..(107): Homolog of NCBI NO: 1082198 NR Description: Alu RNA-binding protein - human to signal recognition particle 14kDa (homologous Alu RNA binding
  misc_feature (1)..(108): Homolog of NCBI NO: 2507409 NR Description: SIGNAL RECOGNITION PARTICLE 14 KD PROTEIN (SRP14)
  misc_feature (2)..(106): Homolog of NCBI NO: 11513833 NR Description: Chain B, Core Of The Alu Domain Of The Mammalian >gi|11513835|pdb|1E8O|D Chain D, Core Of The Alu Domain Of The Srp >gi|11513839|pdb|1E8S|B Chain B, Alu Domain Of The Mammalian
  misc_feature (1)..(121): Homolog of NCBI NO: 34877748 NR Description: similar to Chain , Signal Recognition Particle
  misc_feature (4)..(103): Homolog of NCBI NO: 37543970 NR Description: similar to signal recognition particle 14kD [Homo

SEQ ID NO: 85394 - protein, 106 aa, Arabidopsis thaliana; identical to SEQ ID NO: 38395
  peptide (1)..(106): Ceres Seq. ID no. 12680252
  misc_feature (1)..(78): Pfam Name: Signal recognition particle 14kD protein Pfam Description: Signal recognition particle 14kD protein
  misc_feature (1)..(106): Homolog of NCBI NO: 15224325 NR Description: putative signal recognition particle protein ATSRP14; protein id: At2g43640.1, supported by cDNA: 97249.
  misc_feature (1)..(106): Homolog of NCBI NO: 6175053 NR Description: Signal recognition particle 14 kDa protein >gi|2208946|emb|CAA71202.1| signal recognition particle subunit
  misc_feature (1)..(105): Homolog of NCBI NO: 6094345 NR Description: SIGNAL RECOGNITION PARTICLE 14 KD PROTEIN (SRP14)
  misc_feature (1)..(96): Homolog of NCBI NO: 5107800 NR Description: Signal Recognition Particle Alu Rna Binding
  misc_feature (1)..(93): Homolog of NCBI NO: 6678133 NR Description: signal recognition particle (homologous Alu RNA
  misc_feature (1)..(92): Homolog of NCBI NO: 1082198 NR Description: Alu RNA-binding protein - human to signal recognition particle 14kDa (homologous Alu RNA binding
  misc_feature (1)..(93): Homolog of NCBI NO: 2507409 NR Description: SIGNAL RECOGNITION PARTICLE 14 KD PROTEIN (SRP14)
  misc_feature (1)..(91): Homolog of NCBI NO: 11513833 NR Description: Chain B, Core Of The Alu Domain Of The Mammalian >gi|11513835|pdb|1E8O|D Chain D, Core Of The Alu Domain Of The Srp >gi|11513839|pdb|1E8S|B Chain B, Alu Domain Of The Mammalian
  misc_feature (1)..(106): Homolog of NCBI NO: 34877748 NR Description: similar to Chain , Signal Recognition Particle
  misc_feature (1)..(88): Homolog of NCBI NO: 37543970 NR Description: similar to signal recognition particle 14kD [Homo

SEQ ID NO: 85395 - DNA, 2068 bp, Arabidopsis thaliana
  misc_feature (1)..(2068): Ceres Seq. ID no. 12680253
  misc_feature: MA Experiment ID: 108434 Result: Down-regulated in Transcription
  misc_feature: MA Experiment 108434 PARAMETER Experiment Name: At_Root_Tips_cDNA_P Parameter: Tissue Value: Root Tips
  misc_feature: MA Experiment ID: 108488 Result: Down-regulated in Transcription
  misc_feature: MA Experiment ID: 108489 Result: Up-regulated in Transcription
  misc_feature: MA Experiment ID: 108573 Result: Up-regulated in Transcription
  misc_feature: MA Experiment 108573 PARAMETER Experiment Name: At_Drought_cDNA_P Parameter: Timepoint (hr) Value: 6
  misc_feature: MA Experiment 108573 PARAMETER Experiment Name: At_Drought_cDNA_P Parameter: Tissue Value: Aerial
  misc_feature: MA Experiment 108573 PARAMETER Experiment Name: At_Drought_cDNA_P Parameter: Treatment Value: Drought vs. No Drought
  misc_feature: MA Experiment ID: 108605 Result: Up-regulated in Transcription
  misc_feature: MA Experiment 108605 PARAMETER Experiment Name: At_100uM_ABA_cDNA_P Parameter: Timepoint (hr) Value: 6
  misc_feature: MA Experiment 108605 PARAMETER Experiment Name: At_100uM_ABA_cDNA_P Parameter: Tissue Value: Aerial
  misc_feature: MA Experiment 108605 PARAMETER Experiment Name: At_100uM_ABA_cDNA_P Parameter: Treatment Value: 100uM ABA vs. No Treatment
  misc_feature: MA Experiment ID: 108607 Result: Up-regulated in Transcription
  misc_feature: MA Experiment 108607 PARAMETER Experiment Name: At_100uM_ABA_cDNA_P Parameter: Timepoint (hr) Value: 4
  misc_feature: MA Experiment 108607 PARAMETER Experiment Name: At_100uM_ABA_cDNA_P Parameter: Tissue Value: Aerial
  misc_feature: MA Experiment 108607 PARAMETER Experiment Name: At_100uM_ABA_cDNA_P Parameter: Treatment Value: 100uM ABA vs. No Treatment
  misc_feature: MA Experiment ID: 20000070 Result: Up-regulated in Transcription
  misc_feature: MA Experiment 20000070 PARAMETER Experiment Name: At_100uM_ABA_Mutants_cDNA_P Parameter: Plant Line Value: CS24
  misc_feature: MA Experiment 20000070 PARAMETER Experiment Name: At_100uM_ABA_Mutants_cDNA_P Parameter: Timepoint (hr) Value: 6
  misc_feature: MA Experiment 20000070 PARAMETER Experiment Name: At_100uM_ABA_Mutants_cDNA_P Parameter: Tissue Value: Aerial
  misc_feature: MA Experiment 20000070 PARAMETER Experiment Name: At_100uM_ABA_Mutants_cDNA_P Parameter: Treatment Value: 100uM ABA vs. No Treatment
  misc_feature: MA Experiment ID: 20000072 Result: Up-regulated in Transcription
  misc_feature: MA Experiment 20000072 PARAMETER Experiment Name: At_100uM_ABA_Mutants_cDNA_P Parameter: Plant Line Value: CS8105
  misc_feature: MA Experiment 20000072 PARAMETER Experiment Name: At_100uM_ABA_Mutants_cDNA_P Parameter: Timepoint (hr) Value: 6
  misc_feature: MA Experiment 20000072 PARAMETER Experiment Name: At_100uM_ABA_Mutants_cDNA_P Parameter: Tissue Value: Aerial
  misc_feature: MA Experiment 20000072 PARAMETER Experiment Name: At_100uM_ABA_Mutants_cDNA_P Parameter: Treatment Value: 100uM ABA vs. No Treatment
  misc_feature: MA Experiment ID: 20000087 Result: Up-regulated in Transcription
  misc_feature: MA Experiment 20000087 PARAMETER Experiment Name: At_100uM_ABA_Mutants_cDNA_P Parameter: Plant Line Value: WS
  misc_feature: MA Experiment 20000087 PARAMETER Experiment Name: At_100uM_ABA_Mutants_cDNA_P Parameter: Timepoint (hr) Value: 6
  misc_feature: MA Experiment 20000087 PARAMETER Experiment Name: At_100uM_ABA_Mutants_cDNA_P Parameter: Tissue Value: Aerial
  misc_feature: MA Experiment 20000087 PARAMETER Experiment Name: At_100uM_ABA_Mutants_cDNA_P Parameter: Treatment Value: 100uM ABA vs. No Treatment
  misc_feature: MA Experiment ID: 20000088 Result: Up-regulated in Transcription
  misc_feature: MA Experiment 20000088 PARAMETER Experiment Name: At_100uM_ABA_Mutants_cDNA_P Parameter: Plant Line Value: Landsberg
  misc_feature: MA Experiment 20000088 PARAMETER Experiment Name: At_100uM_ABA_Mutants_cDNA_P Parameter: Timepoint (hr) Value: 6
  misc_feature: MA Experiment 20000088 PARAMETER Experiment Name: At_100uM_ABA_Mutants_cDNA_P Parameter: Tissue Value: Aerial
  misc_feature: MA Experiment 20000088 PARAMETER Experiment Name: At_100uM_ABA_Mutants_cDNA_P Parameter: Treatment Value: 100uM ABA vs. No Treatment
  misc_feature: MA Experiment ID: 20000117 Result: Up-regulated in Transcription
  misc_feature: MA Experiment 20000117 PARAMETER Experiment Name: At_100uM_ABA_Mutants_cDNA_P Parameter: Plant Line Value: Columbia
  misc_feature: MA Experiment 20000117 PARAMETER Experiment Name: At_100uM_ABA_Mutants_cDNA_P Parameter: Timepoint (hr) Value: 6
  misc_feature: MA Experiment 20000117 PARAMETER Experiment Name: At_100uM_ABA_Mutants_cDNA_P Parameter: Tissue Value: Aerial
  misc_feature: MA Experiment 20000117 PARAMETER Experiment Name: At_100uM_ABA_Mutants_cDNA_P Parameter: Treatment Value: 100uM ABA vs. No Treatment
  misc_feature: MA Experiment ID: 20000173 Result: Down-regulated in Transcription
  misc_feature: MA Experiment 20000173 PARAMETER Experiment Name: At_42deg_Heat_P Parameter: Age (day) Value: 14
  misc_feature: MA Experiment 20000173 PARAMETER Experiment Name: At_42deg_Heat_P Parameter: Organism Value: A. thaliana
  misc_feature: MA Experiment 20000173 PARAMETER Experiment Name: At_42deg_Heat_P Parameter: Plant Line Value: WS
  misc_feature: MA Experiment 20000173 PARAMETER Experiment Name: At_42deg_Heat_P Parameter: Temperature (deg C) Value: 42 vs. 22
  misc_feature: MA Experiment 20000173 PARAMETER Experiment Name: At_42deg_Heat_P Parameter: Timepoint (hr) Value: 6
  misc_feature: MA Experiment 20000173 PARAMETER Experiment Name: At_42deg_Heat_P Parameter: Tissue Value: Aerial
  misc_feature: MA Experiment ID: 20000184 Result: Down-regulated in Transcription
  misc_feature: MA Experiment 20000184 PARAMETER Experiment Name: At_Shoots__P Parameter: Age (day) Value: 7
  misc_feature: MA Experiment 20000184 PARAMETER Experiment Name: At_Shoots__P Parameter: Tissue Value: Shoots vs. Whole Plant
  misc_feature: MA Experiment ID: 20000185 Result: Down-regulated in Transcription
  misc_feature: MA Experiment 20000185 PARAMETER Experiment Name: At_Roots__P Parameter: Age (day) Value: 7 vs. 21
  misc_feature: MA Experiment 20000185 PARAMETER Experiment Name: At_Roots__P Parameter: Organism Value: A. thaliana
  misc_feature: MA Experiment 20000185 PARAMETER Experiment Name: At_Roots__P Parameter: Tissue Value: Roots vs. Whole Plant
  misc_feature: MA Experiment ID: 20000227 Result: Up-regulated in Transcription
  misc_feature: MA Experiment 20000227 PARAMETER Experiment Name: At_Root-Tips-vs-Tops_P Parameter: Tissue Value: Root Tips vs. Root Tops
  misc_feature: MA Experiment ID: 20000234 Result: Up-regulated in Transcription
  misc_feature: MA Experiment 20000234 PARAMETER Experiment Name: At_Siliques_P Parameter: Age (day) Value: 21
  misc_feature: MA Experiment 20000234 PARAMETER Experiment Name: At_Siliques_P Parameter: Organism Value: A. thaliana
  misc_feature: MA Experiment 20000234 PARAMETER Experiment Name: At_Siliques_P Parameter: Plant Line Value: WS
  misc_feature: MA Experiment 20000234 PARAMETER Experiment Name: At_Siliques_P Parameter: Tissue Value: Less Than 5mm Siliques vs. Whole Plant
  misc_feature: MA Experiment ID: 20000235 Result: Up-regulated in Transcription
  misc_feature: MA Experiment 20000235 PARAMETER Experiment Name: At_Siliques_P Parameter: Age (day) Value: 21
  misc_feature: MA Experiment 20000235 PARAMETER Experiment Name: At_Siliques_P Parameter: Organism Value: A. thaliana
  misc_feature: MA Experiment 20000235 PARAMETER Experiment Name: At_Siliques_P Parameter: Plant Line Value: WS
  misc_feature: MA Experiment 20000235 PARAMETER Experiment Name: At_Siliques_P Parameter: Tissue Value: 5-10mm Siliques vs. Whole Plant
  misc_feature: MA Experiment ID: 20000438 Result: Down-regulated in Transcription
  misc_feature: MA Experiment 20000438 PARAMETER Experiment Name: At_Shoots__P Parameter: Age (day) Value: 14
  misc_feature: MA Experiment 20000438 PARAMETER Experiment Name: At_Shoots__P Parameter: Tissue Value: Shoots vs. Whole Plant
  misc_feature: MA Experiment ID: 20000439 Result: Down-regulated in Transcription
  misc_feature: MA Experiment 20000439 PARAMETER Experiment Name: At_Roots__P Parameter: Age (day) Value: 14 vs. 21
  misc_feature: MA Experiment 20000439 PARAMETER Experiment Name: At_Roots__P Parameter: Organism Value: A. thaliana
  misc_feature: MA Experiment 20000439 PARAMETER Experiment Name: At_Roots__P Parameter: Tissue Value: Roots vs. Whole Plant
  misc_feature: MA Experiment ID: 20001248 Result: Up-regulated in Transcription
  misc_feature: MA Experiment 20001248 PARAMETER Experiment Name: At_Far-red-induction_P Parameter: Age (day) Value: 7
  misc_feature: MA Experiment 20001248 PARAMETER Experiment Name: At_Far-red-induction_P Parameter: Light Value: Far-red vs. White
  misc_feature: MA Experiment 20001248 PARAMETER Experiment Name: At_Far-red-induction_P Parameter: Organism Value: A. thaliana
  misc_feature: MA Experiment 20001248 PARAMETER Experiment Name: At_Far-red-induction_P Parameter: Plant Line Value: Columbia
  misc_feature: MA Experiment 20001248 PARAMETER Experiment Name: At_Far-red-induction_P Parameter: Timepoint (hr) Value: 4
  misc_feature: MA Experiment 20001248 PARAMETER Experiment Name: At_Far-red-induction_P Parameter: Tissue Value: Whole Plant
  misc_feature: MA Experiment ID: 20001557 Result: Up-regulated in Transcription
  misc_feature: MA Experiment 20001557 PARAMETER Experiment Name: At_Drought_Soil_Dry_P Parameter: Age (day) Value: 27
  misc_feature: MA Experiment 20001557 PARAMETER Experiment Name: At_Drought_Soil_Dry_P Parameter: Organism Value: A. thaliana
  misc_feature: MA Experiment 20001557 PARAMETER Experiment Name: At_Drought_Soil_Dry_P Parameter: Plant Line Value: WS
  misc_feature: MA Experiment 20001557 PARAMETER Experiment Name: At_Drought_Soil_Dry_P Parameter: Post Timepoint (hr) Value: 3
  misc_feature: MA Experiment 20001557 PARAMETER Experiment Name: At_Drought_Soil_Dry_P Parameter: Post-Treatment Value: Re-Water vs. No Drought
  misc_feature: MA Experiment 20001557 PARAMETER Experiment Name: At_Drought_Soil_Dry_P Parameter: Timepoint (day) Value: 13
  misc_feature: MA Experiment 20001557 PARAMETER Experiment Name: At_Drought_Soil_Dry_P Parameter: Treatment Value: Drought vs. No Drought
  misc_feature: MA Experiment ID: 20001905 Result: Down-regulated in Transcription
  misc_feature: MA Experiment 20001905 PARAMETER Experiment Name: At_Drought_Reproduction_P Parameter: Age (day) Value: 40
  misc_feature: MA Experiment 20001905 PARAMETER Experiment Name: At_Drought_Reproduction_P Parameter: Organism Value: A. thaliana
  misc_feature: MA Experiment 20001905 PARAMETER Experiment Name: At_Drought_Reproduction_P Parameter: Plant Line Value: WS
  misc_feature: MA Experiment 20001905 PARAMETER Experiment Name: At_Drought_Reproduction_P Parameter: Timepoint (day) Value: 10
  misc_feature: MA Experiment 20001905 PARAMETER Experiment Name: At_Drought_Reproduction_P Parameter: Tissue Value: Rosettes
  misc_feature: MA Experiment 20001905 PARAMETER Experiment Name: At_Drought_Reproduction_P Parameter: Treatment Value: Drought vs. No Drought
  misc_feature: MA Experiment ID: 20001906 Result: Down-regulated in Transcription
  misc_feature: MA Experiment 20001906 PARAMETER Experiment Name: At_Drought_Reproduction_P Parameter: Age (day) Value: 35
  misc_feature: MA Experiment 20001906 PARAMETER Experiment Name: At_Drought_Reproduction_P Parameter: Organism Value: A. thaliana
  misc_feature: MA Experiment 20001906 PARAMETER Experiment Name: At_Drought_Reproduction_P Parameter: Plant Line Value: WS
  misc_feature: MA Experiment 20001906 PARAMETER Experiment Name: At_Drought_Reproduction_P Parameter: Timepoint (day) Value: 5
  misc_feature: MA Experiment 20001906 PARAMETER Experiment Name: At_Drought_Reproduction_P Parameter: Tissue Value: Siliques
  misc_feature: MA Experiment 20001906 PARAMETER Experiment Name: At_Drought_Reproduction_P Parameter: Treatment Value: Drought vs. No Drought
  misc_feature: MA Experiment ID: 20001908 Result: Down-regulated in Transcription
  misc_feature: MA Experiment 20001908 PARAMETER Experiment Name: At_Drought_Reproduction_P Parameter: Age (day) Value: 40
  misc_feature: MA Experiment 20001908 PARAMETER Experiment Name: At_Drought_Reproduction_P Parameter: Organism Value: A. thaliana
  misc_feature: MA Experiment 20001908 PARAMETER Experiment Name: At_Drought_Reproduction_P Parameter: Plant Line Value: WS
  misc_feature: MA Experiment 20001908 PARAMETER Experiment Name: At_Drought_Reproduction_P Parameter: Timepoint (day) Value: 10
  misc_feature: MA Experiment 20001908 PARAMETER Experiment Name: At_Drought_Reproduction_P Parameter: Tissue Value: Siliques
  misc_feature: MA Experiment 20001908 PARAMETER Experiment Name: At_Drought_Reproduction_P Parameter: Treatment Value: Drought vs. No Drought
cacaaagacaaagatcttctcctccttctcttctctttttcacttttctctcttcccctctctcgaagcttgaaaggtaacaacaatggagaaccctccggatcaaacagagtcaaaggagactcttcaacaacccattacaagaagaagaacaaagggtggtcttctcactatgcccttcatcattgcaaacgaggggttcgagaaagtggcgagctatggattattacagaacatgattctttatctgatgagtgattacagattgggacttgttaaaggacaaactgtcttgttcatgtgggttgctgctactaatttcatgcctctcgttggagcttttctctcagattcatatttgggtcgctttctcaccattgtcattgcttctctctccagtctcctggggatggtggttctatggctaacggcgatgttgccgcaagtaaaaccatcaccgtgtgtagcaacagccggaaccaactgcagttccgcgacatcttctcaattggctctcttgtataccgcattcgcattaatatcgattggatcaggaggaatcaggccatgttctttagcctttggtgctgatcaattggacaacaaagagaatcctaagaacgagagagttcttgagagtttctttggttggtactacgcttcttcatcagttgctgtcttgatcgctttcaccgtcattgtttacattcaagatcatctaggatggaaaatcgggtttggaatacccgcgattctcatgctgctcgcgggtttcttgtttgttttcgcgtctcctctctacgttaagcgcgatgtgagcaagagtctgttcactggtttagctcaagtggttgctgcagcttacgtgaagagaaacttaactttgccggatcatcatgactccagagattgttattaccgtttgaaagattctgaactcaaagctccaagtgacaaattgaggtttttaaacaaagcttgtgccataagtaaccgcgatgaagaccttggttctgatggtttggccttaaaccagtggaggctatgcacaacggaccaagttgagaaactcaaggcgttggtcaaggtgataccggtatggtccacggggataatgatgtcgataaacgttagccagaactcttttcagttgcttcaagctaaatcaatggacagacgtttaagcagcaattcgaccttccaaatcccagctggatcgtttggtatgttcacaatcatagccttaatctcatgggttgttctgtacgaccgcgcaattctccctttagcttcaaagatccgaggcagaccagttagagtcaatgtcaagattcgaatgggattagggctattcatatcattcttagcaatggcggtttccgcaactgttgaacattacagaaggaaaaccgcgataagccaaggactcgcaaacgatgccaactcaacagtgagcatctcagcaatgtggcttgtaccacagtatgtactacacggtttagcagaggccttgaccgggataggacagaccgagtttttctataccgagtttcctaaaagcatgtcgagtatcgcagcttcgttgttcggtctaggaatggcagtggctaatatcttggctagtgtgatcctaaatgcggtaaagaatagctcaaagcagggcaatgtgagctggattgaagataacatcaacaagggtcactatgactattactattgggttttagcgatcttgagcttcgttaatgtcatctactacgttgtgtgtagctggtcctatggtcctacggtggatcaggtgaggaatgataaggttaatggtatgagaaaagaagaagaggaagttattaaattaaactaagaccaattggttgatcataattaaatggtgtacgtgtgttataaaattctatatatttgtatgtaattagattattatatcatggatttggattttcttaggatgtagaggttgatgttaattaatgggtcgtgtgtttatttaattattacaaaaaaaaaaaaaacattgtgtgtatgatatttgattgaagagaatcaaattttc

SEQ ID NO: 85396 - protein, 591 aa, Arabidopsis thaliana; identical to SEQ ID NO: 23568
  peptide (1)..(591): Ceres Seq. ID no. 12680254
  misc_feature (95)..(505): Pfam Name: POT family Pfam Description: POT family
  misc_feature (1)..(591): Homolog of NCBI NO: 15233307 NR Description: putative transport protein; protein id:
  misc_feature (1)..(579): Homolog of NCBI NO: 20466248 NR Description: putative transport protein [Arabidopsis thaliana]
  misc_feature (51)..(591): Homolog of NCBI NO: 9294465 NR Description: peptide/amino acid transporter-like protein
  misc_feature (1)..(590): Homolog of NCBI NO: 15218183 NR Description: peptide transporter, putative; protein id: [Arabidopsis thaliana] >gi|25405532|pir||H96561 probable peptide
  misc_feature (14)..(590): Homolog of NCBI NO: 34909754 NR Description: putative peptide transporter [Oryza sativa
  misc_feature (12)..(566): Homolog of NCBI NO: 34909752 NR Description: putative peptide transporter [Oryza sativa
  misc_feature (1)..(293): Homolog of NCBI NO: 21536862 NR Description: unknown [Arabidopsis thaliana]
  misc_feature (6)..(586): Homolog of NCBI NO: 15391731 NR Description: nitrite transporter [Cucumis sativus]
  misc_feature (1)..(591): Homolog of NCBI NO: 15221439 NR Description: peptide transporter, putative; protein id: supported by cDNA: gi_20147230 [Arabidopsis thaliana]
  misc_feature (316)..(566): Homolog of NCBI NO: 15239084 NR Description: putative oligopeptide transporter protein; id: At5g11570.1 [Arabidopsis thaliana] >gi|11358655|pir||T48516

SEQ ID NO: 85397 - protein, 562 aa, Arabidopsis thaliana; identical to SEQ ID NO: 23569
  peptide (1)..(562): Ceres Seq. ID no. 12680255
  misc_feature (66)..(476): Pfam Name: POT family Pfam Description: POT family
  misc_feature (1)..(562): Homolog of NCBI NO: 15233307 NR Description: putative transport protein; protein id:
  misc_feature (1)..(550): Homolog of NCBI NO: 20466248 NR Description: putative transport protein [Arabidopsis thaliana]
  misc_feature (22)..(562): Homolog of NCBI NO: 9294465 NR Description: peptide/amino acid transporter-like protein
  misc_feature (1)..(561): Homolog of NCBI NO: 15218183 NR Description: peptide transporter, putative; protein id: [Arabidopsis thaliana] >gi|25405532|pir||H96561 probable peptide
  misc_feature (1)..(561): Homolog of NCBI NO: 34909754 NR Description: putative peptide transporter [Oryza sativa
  misc_feature (1)..(537): Homolog of NCBI NO: 34909752 NR Description: putative peptide transporter [Oryza sativa
  misc_feature (1)..(264): Homolog of NCBI NO: 21536862 NR Description: unknown [Arabidopsis thaliana]
  misc_feature (1)..(557): Homolog of NCBI NO: 15391731 NR Description: nitrite transporter [Cucumis sativus]
  misc_feature (1)..(562): Homolog of NCBI NO: 15221439 NR Description: peptide transporter, putative; protein id: supported by cDNA: gi_20147230 [Arabidopsis thaliana]
  misc_feature (287)..(537): Homolog of NCBI NO: 15239084 NR Description: putative oligopeptide transporter protein; id: At5g11570.1 [Arabidopsis thaliana] >gi|11358655|pir||T48516

SEQ ID NO: 85398 - protein, 541 aa, Arabidopsis thaliana; identical to SEQ ID NO: 23570
  peptide (1)..(541): Ceres Seq. ID no. 12680256
  misc_feature (45)..(455): Pfam Name: POT family Pfam Description: POT family
  misc_feature (1)..(541): Homolog of NCBI NO: 15233307 NR Description: putative transport protein; protein id:
  misc_feature (1)..(529): Homolog of NCBI NO: 20466248 NR Description: putative transport protein [Arabidopsis thaliana]
  misc_feature (1)..(541): Homolog of NCBI NO: 9294465 NR Description: peptide/amino acid transporter-like protein
  misc_feature (1)..(540): Homolog of NCBI NO: 15218183 NR Description: peptide transporter, putative; protein id: [Arabidopsis thaliana] >gi|25405532|pir||H96561 probable peptide
  misc_feature (1)..(540): Homolog of NCBI NO: 34909754 NR Description: putative peptide transporter [Oryza sativa
  misc_feature (1)..(516): Homolog of NCBI NO: 34909752 NR Description: putative peptide transporter [Oryza sativa
  misc_feature (1)..(243): Homolog of NCBI NO: 21536862 NR Description: unknown [Arabidopsis thaliana]
  misc_feature (1)..(536): Homolog of NCBI NO: 15391731 NR Description: nitrite transporter [Cucumis sativus]
  misc_feature (1)..(541): Homolog of NCBI NO: 15221439 NR Description: peptide transporter, putative; protein id: supported by cDNA: gi_20147230 [Arabidopsis thaliana]
  misc_feature (266)..(516): Homolog of NCBI NO: 15239084 NR Description: putative oligopeptide transporter protein; id: At5g11570.1 [Arabidopsis thaliana] >gi|11358655|pir||T48516

SEQ ID NO: 85399 - DNA, 745 bp, Arabidopsis thaliana
  misc_feature (1)..(745): Ceres Seq. ID no. 12680257
  misc_feature: MA Experiment ID: 108435 Result: Down-regulated in Transcription
  misc_feature: MA Experiment 108435 PARAMETER Experiment Name: At_stm_Mutants_cDNA_P Parameter: Plant Line Value: wt Landsburg vs stm
  misc_feature: MA Experiment 108435 PARAMETER Experiment Name: At_stm_Mutants_cDNA_P Parameter: Tissue Value: Shoot Apical Meristem Region
  misc_feature: MA Experiment ID: 108462 Result: Up-regulated in Transcription
  misc_feature: MA Experiment 108462 PARAMETER Experiment Name: At_Germinating_Seeds_cDNA_P Parameter: Age (day) Value: 2 vs. 0
  misc_feature: MA Experiment 108462 PARAMETER Experiment Name: At_Germinating_Seeds_cDNA_P Parameter: Tissue Value: Germinating Seeds
  misc_feature: MA Experiment ID: 108463 Result: Up-regulated in Transcription
  misc_feature: MA Experiment 108463 PARAMETER Experiment Name: At_Germinating_Seeds_cDNA_P Parameter: Age (day) Value: 3 vs. 0
  misc_feature: MA Experiment 108463 PARAMETER Experiment Name: At_Germinating_Seeds_cDNA_P Parameter: Tissue Value: Germinating Seeds
  misc_feature: MA Experiment ID: 108489 Result: Down-regulated in Transcription
  misc_feature: MA Experiment ID: 108595 Result: Down-regulated in Transcription
  misc_feature: MA Experiment 108595 PARAMETER Experiment Name: At_Ler-pi_Ovule_cDNA_P Parameter: Plant Line Value: null
  misc_feature: MA Experiment ID: 20000184 Result: Up-regulated in Transcription
  misc_feature: MA Experiment 20000184 PARAMETER Experiment Name: At_Shoots__P Parameter: Age (day) Value: 7
  misc_feature: MA Experiment 20000184 PARAMETER Experiment Name: At_Shoots__P Parameter: Tissue Value: Shoots vs. Whole Plant
  misc_feature: MA Experiment ID: 20000438 Result: Up-regulated in Transcription
  misc_feature: MA Experiment 20000438 PARAMETER Experiment Name: At_Shoots__P Parameter: Age (day) Value: 14
  misc_feature: MA Experiment 20000438 PARAMETER Experiment Name: At_Shoots__P Parameter: Tissue Value: Shoots vs. Whole Plant
  misc_feature: MA Experiment ID: 20000495 Result: Down-regulated in Transcription
  misc_feature: MA Experiment 20000495 PARAMETER Experiment Name: At_Guard_Cells_P Parameter: Harvest Date Value: 8/2/2002
  misc_feature: MA Experiment 20000495 PARAMETER Experiment Name: At_Guard_Cells_P Parameter: Organism Value: A. thaliana
  misc_feature: MA Experiment 20000495 PARAMETER Experiment Name: At_Guard_Cells_P Parameter: Tissue Value: Guard Cells vs. Leaves
atttcctacacaaaattcccactcaccacacacaacaaaagaatagtgatcgaagctcatggcgtctcttgcaaccgtcgccgctgtgaaaccatccgccgccataaaaggactcggcggcagctcactcgccggagctaagctctccatcaagccttcccgcctgagctttaaacccaaatccatccgggctaatggtgtggtggctaagtatggagacaaaagtgtctactttgacttagaagatttgggtaacacaacaggtcaatgggacgtatacggctctgatgctccttctccttacaatcctcttcaggtttcttcatctcataacctaacttgacttttctacttcaatcaaacactattctgagaagagattctcttctactttcgttacttgtagagcaagttctttgagacattcgctgccccattcacaaagagaggattgctcctcaagttcttgatccttggaggaggctctttgcttacttatgtcagcgctacctctaccggcgaagttcttcccatcaagagaggtcctcaggagccgcctaagctcggtcctcgcggcaagctctgatctatattcatgttacctttctcttcttccttctaaaactcatcaacatttctcaatactgcaaacccttttaagtaattttatgtatattctgtttatctgttacatttgaaacgttttttcttcccctaattttacaaaagaaatattttttttttc

SEQ ID NO: 85400 - protein, 94 aa, Arabidopsis thaliana
  peptide (1)..(94): Ceres Seq. ID no. 12680258
  misc_feature (6)..(86): Pfam Name: Photosystem I reaction centre subunit VI Pfam Description: Photosystem I reaction centre subunit VI
  misc_feature (1)..(86): Homolog of NCBI NO: 15233291 NR Description: photosystem I subunit VI precursor; protein id:
  misc_feature (1)..(86): Homolog of NCBI NO: 15218186 NR Description: photosystem I subunit VI precursor; protein id: supported by cDNA: 1440., supported by cDNA: gi_14326517
  misc_feature (1)..(86): Homolog of NCBI NO: 3914442 NR Description: Photosystem I reaction center subunit VI,
  misc_feature (1)..(86): Homolog of NCBI NO: 7443138 NR Description: photosystem I protein psaH precursor - wood
  misc_feature (1)..(86): Homolog of NCBI NO: 131199 NR Description: Photosystem I reaction center subunit VI,
  misc_feature (1)..(86): Homolog of NCBI NO: 33520419 NR Description: photosystem I psaH protein [Trifolium pratense]
  misc_feature (1)..(86): Homolog of NCBI NO: 7443139 NR Description: photosystem I protein psaH precursor - wood
  misc_feature (1)..(86): Homolog of NCBI NO: 7443140 NR Description: photosystem I psaH precursor - wood tobacco
  misc_feature (1)..(86): Homolog of NCBI NO: 445928 NR Description: photosystem I:SUBUNIT=PS I-H
  misc_feature (1)..(86): Homolog of NCBI NO: 445929 NR Description: photosystem I:SUBUNIT=PS I-H
MASLATVAAVKPSAAIKGLGGSSLAGAKLSIKPSRLSFKPKSIRANGVVAKYGDKSVYFDLEDLGNTTGQWDVYGSDAPSPYNPLQVSSSHNLT

SEQ ID NO: 85401 - protein, 66 aa, Arabidopsis thaliana
  peptide (1)..(66): Ceres Seq. ID no. 12680259
MSALPLPAKFFPSREVLRSRLSSVLAASSDLYSCYLSLLPSKTHQHFSILQTLLSNFMYILFICYI

SEQ ID NO: 85402 - DNA, 1747 bp, Arabidopsis thaliana
  misc_feature (1)..(1747): Ceres Seq. ID no. 12680270
  misc_feature: MA Experiment ID: 20000173 Result: Down-regulated in Transcription
  misc_feature: MA Experiment 20000173 PARAMETER Experiment Name: At_42deg_Heat_P Parameter: Age (day) Value: 14
  misc_feature: MA Experiment 20000173 PARAMETER Experiment Name: At_42deg_Heat_P Parameter: Organism Value: A. thaliana
  misc_feature: MA Experiment 20000173 PARAMETER Experiment Name: At_42deg_Heat_P Parameter: Plant Line Value: WS
  misc_feature: MA Experiment 20000173 PARAMETER Experiment Name: At_42deg_Heat_P Parameter: Temperature (deg C) Value: 42 vs. 22
  misc_feature: MA Experiment 20000173 PARAMETER Experiment Name: At_42deg_Heat_P Parameter: Timepoint (hr) Value: 6
  misc_feature: MA Experiment 20000173 PARAMETER Experiment Name: At_42deg_Heat_P Parameter: Tissue Value: Aerial
  misc_feature: MA Experiment ID: 20000184 Result: Down-regulated in Transcription
  misc_feature: MA Experiment 20000184 PARAMETER Experiment Name: At_Shoots__P Parameter: Age (day) Value: 7
  misc_feature: MA Experiment 20000184 PARAMETER Experiment Name: At_Shoots__P Parameter: Tissue Value: Shoots vs. Whole Plant
  misc_feature: MA Experiment ID: 20000794 Result: Up-regulated in Transcription
  misc_feature: MA Experiment 20000794 PARAMETER Experiment Name: At_Petals_P Parameter: Age (day) Value: 23-25 days
  misc_feature: MA Experiment 20000794 PARAMETER Experiment Name: At_Petals_P Parameter: Plant Line Value: WS
  misc_feature: MA Experiment 20000794 PARAMETER Experiment Name: At_Petals_P Parameter: Tissue Value: Petals vs. Whole plant
ggaagatgttcgcttacaggactctgtttaggattgaccgtgtatttgggtttacgagtagatgttttcaatcgaaaccggaatcttttagtatcctgagctttaggggaagtgagaagagtgccatggatggatataagaagcagaagatggtaaatttagtgtggagacccatctccactcaaacctcttcagttattgctgaagctggaaatgaagtccaagaagtagctcagtgtagcaaatcaagtgatgtttctaaggaagttattgaaggagagacagcttcagttgtttcagctggaaagcattcagtttctcttgaggttggggcttctttgattaagttcattagagggaaagaaggaacgacgcagatgaaacttgaagaggaaatgggagtgaagatcattcttccatcatcaaggaacaaagatcatatcagtaagagtttttggaaccaactgtaatgcattgaaggcggttcagtggattgtgtgactaaagcttcaaaaagaatagcaaccattatcgatgaggttgtaaggagtccaagtctcgactactcacactttgtatcacttccattagccatacatcctgagttagtggacaagctagtgaattttcagaattctatcctcgggatccatagcatagctagtgataagcaagacgaccaagctaatagagcaaccacaagtgtggcagttgatctaaaagctaatagtgaaacaaaccaggtcaatgtgggtatcaagagcataccaattgtcagttacccgcctaaggccaaatcaaagtcatctactttattggacttaggaattgaaaagtccatatttattaagccaagtacttttcacttgactgtggttatgctgaagttatggaacaaagatcgtgtcaatgcagcgtgtgatgttctgaagagtatatttcctagtgtgatggatgctttggataacaaaccagtattcattagacttaaaggattggattgtatgagaggaccattagacaagactcgtgttctctatgctcctgttgaagaaattggtgatgaaggccggcttttacgtgcttgtcaagttattactgatgcatttgtgaaagctgggcttgttctcgagaaagatgcaaagcaaagcttgaaggtaaaagctttctgagtatgacgagattgttgcagtcacttaacgttagccaaaggctcagaactaatggaattggaagtagtgaatcgtgcttctgtttcatactttttcctttctttgcagctgcatgtgaccgtgatgaatgcgaggcacaggaaaaggagaaagaacaataagaagaagatggagacgtttgatgcaagagagatacacaaacagtttggaaacgaagactggggagaatatctgatccaagaagctcatctctcacagcgttttgtgttcgaccagaacggttattaccgttgctgtggttcaataccatttccaggagaacagagagcctgagaagaatcatctaaccagcggccacagtctcaaatctcaagcatcttcacaggttttggtcccgtggtatgagcacttacaactttgagaagagaacctgataaaattgtaaagttgtaccggtcatcttgtgttaaccaaatagttgtcttcggtttggttctttcttggtctttgttcaataaaccgagccaaaacgttcttgtactctttctacaaggtaataaaaaggttcttagtac

SEQ ID NO: 85403 - protein, 155 aa, Arabidopsis thaliana
  peptide (1)..(155): Ceres Seq. ID no. 12680271
  misc_feature (42)..(155): Homolog of NCBI NO: 15233319 NR Description: unknown protein; protein id: At3g16230.1
  misc_feature (109)..(155): Homolog of NCBI NO: 9279706 NR Description: gene_id:MYA6.4~unknown protein [Arabidopsis
  misc_feature (35)..(51): Homolog of NCBI NO: 9279706 NR Description: gene_id:MYA6.4~unknown protein [Arabidopsis
  misc_feature (2)..(155): Homolog of NCBI NO: 17065114 NR Description: Unknown protein [Arabidopsis thaliana]
KMFAYRTLFRIDRVFGFTSRCFQSKPESFSILSFRGSEKSAMDGYKKQKMVNLVWRPISTQTSSVIAEAGNEVQEVAQCSKSSDVSKEVIEGETASVVSAGKHSVSLEVGASLIKFIRGKEGTTQMKLEEEMGVKIILPSSRNKDHISKSFWNQL

SEQ ID NO: 85404 - protein, 154 aa, Arabidopsis thaliana
  peptide (1)..(154): Ceres Seq. ID no. 12680272
  misc_feature (41)..(154): Homolog of NCBI NO: 15233319 NR Description: unknown protein; protein id: At3g16230.1
  misc_feature (108)..(154): Homolog of NCBI NO: 9279706 NR Description: gene_id:MYA6.4~unknown protein [Arabidopsis
  misc_feature (34)..(50): Homolog of NCBI NO: 9279706 NR Description: gene_id:MYA6.4~unknown protein [Arabidopsis
  misc_feature (1)..(154): Homolog of NCBI NO: 17065114 NR Description: Unknown protein [Arabidopsis thaliana]
MFAYRTLFRIDRVFGFTSRCFQSKPESFSILSFRGSEKSAMDGYKKQKMVNLVWRPISTQTSSVIAEAGNEVQEVAQCSKSSDVSKEVIEGETASVVSAGKHSVSLEVGASLIKFIRGKEGTTQMKLEEEMGVKIILPSSRNKDHISKSFWNQL

SEQ ID NO: 85405 - protein, 114 aa, Arabidopsis thaliana
  peptide (1)..(114): Ceres Seq. ID no. 12680273
  misc_feature (1)..(114): Homolog of NCBI NO: 15233319 NR Description: unknown protein; protein id: At3g16230.1
  misc_feature (68)..(114): Homolog of NCBI NO: 9279706 NR Description: gene_id:MYA6.4~unknown protein [Arabidopsis
  misc_feature (1)..(114): Homolog of NCBI NO: 17065114 NR Description: Unknown protein [Arabidopsis thaliana]
MDGYKKQKMVNLVWRPISTQTSSVIAEAGNEVQEVAQCSKSSDVSKEVIEGETASVVSAGKHSVSLEVGASLIKFIRGKEGTTQMKLEEEMGVKIILPSSRNKDHISKSFWNQL

SEQ ID NO: 85406 - DNA, 993 bp, Arabidopsis thaliana
  misc_feature (1)..(993): Ceres Seq. ID no. 12680288
  misc_feature: MA Experiment ID: 108461 Result: Up-regulated in Transcription
  misc_feature: MA Experiment 108461 PARAMETER Experiment Name: At_Germinating_Seeds_cDNA_P Parameter: Age (day) Value: 1 vs. 0
  misc_feature: MA Experiment 108461 PARAMETER Experiment Name: At_Germinating_Seeds_cDNA_P Parameter: Tissue Value: Germinating Seeds
  misc_feature: MA Experiment ID: 108462 Result: Up-regulated in Transcription
  misc_feature: MA Experiment 108462 PARAMETER Experiment Name: At_Germinating_Seeds_cDNA_P Parameter: Age (day) Value: 2 vs. 0
  misc_feature: MA Experiment 108462 PARAMETER Experiment Name: At_Germinating_Seeds_cDNA_P Parameter: Tissue Value: Germinating Seeds
  misc_feature: MA Experiment ID: 108463 Result: Up-regulated in Transcription
  misc_feature: MA Experiment 108463 PARAMETER Experiment Name: At_Germinating_Seeds_cDNA_P Parameter: Age (day) Value: 3 vs. 0
  misc_feature: MA Experiment 108463 PARAMETER Experiment Name: At_Germinating_Seeds_cDNA_P Parameter: Tissue Value: Germinating Seeds
  misc_feature: MA Experiment ID: 108464 Result: Up-regulated in Transcription
  misc_feature: MA Experiment 108464 PARAMETER Experiment Name: At_Germinating_Seeds_cDNA_P Parameter: Age (day) Value: 4 vs. 0
  misc_feature: MA Experiment 108464 PARAMETER Experiment Name: At_Germinating_Seeds_cDNA_P Parameter: Tissue Value: Germinating Seeds
  misc_feature: MA Experiment ID: 108488 Result: Up-regulated in Transcription
  misc_feature: MA Experiment ID: 20000069 Result: Down-regulated in Transcription
  misc_feature: MA Experiment 20000069 PARAMETER Experiment Name: At_100uM_ABA_Mutants_cDNA_P Parameter: Plant Line Value: CS23
  misc_feature: MA Experiment 20000069 PARAMETER Experiment Name: At_100uM_ABA_Mutants_cDNA_P Parameter: Timepoint (hr) Value: 6
  misc_feature: MA Experiment 20000069 PARAMETER Experiment Name: At_100uM_ABA_Mutants_cDNA_P Parameter: Tissue Value: Aerial
  misc_feature: MA Experiment 20000069 PARAMETER Experiment Name: At_100uM_ABA_Mutants_cDNA_P Parameter: Treatment Value: 100uM ABA vs. No Treatment
  misc_feature: MA Experiment ID: 20000070 Result: Down-regulated in Transcription
  misc_feature: MA Experiment 20000070 PARAMETER Experiment Name: At_100uM_ABA_Mutants_cDNA_P Parameter: Plant Line Value: CS24
  misc_feature: MA Experiment 20000070 PARAMETER Experiment Name: At_100uM_ABA_Mutants_cDNA_P Parameter: Timepoint (hr) Value: 6
  misc_feature: MA Experiment 20000070 PARAMETER Experiment Name: At_100uM_ABA_Mutants_cDNA_P Parameter: Tissue Value: Aerial
  misc_feature: MA Experiment 20000070 PARAMETER Experiment Name: At_100uM_ABA_Mutants_cDNA_P Parameter: Treatment Value: 100uM ABA vs. No Treatment
  misc_feature: MA Experiment ID: 20000086 Result: Down-regulated in Transcription
  misc_feature: MA Experiment 20000086 PARAMETER Experiment Name: At_100uM_ABA_Mutants_cDNA_P Parameter: Plant Line Value: CS22
  misc_feature: MA Experiment 20000086 PARAMETER Experiment Name: At_100uM_ABA_Mutants_cDNA_P Parameter: Timepoint (hr) Value: 6
  misc_feature: MA Experiment 20000086 PARAMETER Experiment Name: At_100uM_ABA_Mutants_cDNA_P Parameter: Tissue Value: Aerial
  misc_feature: MA Experiment 20000086 PARAMETER Experiment Name: At_100uM_ABA_Mutants_cDNA_P Parameter: Treatment Value: 100uM ABA vs. No Treatment
  misc_feature: MA Experiment ID: 20000088 Result: Down-regulated in Transcription
  misc_feature: MA Experiment 20000088 PARAMETER Experiment Name: At_100uM_ABA_Mutants_cDNA_P Parameter: Plant Line Value: Landsberg
  misc_feature: MA Experiment 20000088 PARAMETER Experiment Name: At_100uM_ABA_Mutants_cDNA_P Parameter: Timepoint (hr) Value: 6
  misc_feature: MA Experiment 20000088 PARAMETER Experiment Name: At_100uM_ABA_Mutants_cDNA_P Parameter: Tissue Value: Aerial
  misc_feature: MA Experiment 20000088 PARAMETER Experiment Name: At_100uM_ABA_Mutants_cDNA_P Parameter: Treatment Value: 100uM ABA vs. No Treatment
  misc_feature: MA Experiment ID: 20000090 Result: Down-regulated in Transcription
  misc_feature: MA Experiment ID: 20000117 Result: Down-regulated in Transcription
  misc_feature: MA Experiment 20000117 PARAMETER Experiment Name: At_100uM_ABA_Mutants_cDNA_P Parameter: Plant Line Value: Columbia
  misc_feature: MA Experiment 20000117 PARAMETER Experiment Name: At_100uM_ABA_Mutants_cDNA_P Parameter: Timepoint (hr) Value: 6
  misc_feature: MA Experiment 20000117 PARAMETER Experiment Name: At_100uM_ABA_Mutants_cDNA_P Parameter: Tissue Value: Aerial
  misc_feature: MA Experiment 20000117 PARAMETER Experiment Name: At_100uM_ABA_Mutants_cDNA_P Parameter: Treatment Value: 100uM ABA vs. No Treatment
  misc_feature: MA Experiment ID: 20000180 Result: Up-regulated in Transcription
  misc_feature: MA Experiment 20000180 PARAMETER Experiment Name: At_Germinating_Seeds_P Parameter: Age (hr) Value: 24 vs. 0
  misc_feature: MA Experiment 20000180 PARAMETER Experiment Name: At_Germinating_Seeds_P Parameter: Tissue Value: Germinating Seeds
  misc_feature: MA Experiment ID: 20000224 Result: Down-regulated in Transcription
  misc_feature: MA Experiment ID: 20000264 Result: Down-regulated in Transcription
  misc_feature: MA Experiment 20000264 PARAMETER Experiment Name: At_Open_Flower_P Parameter: Age (day) Value: 21
  misc_feature: MA Experiment 20000264 PARAMETER Experiment Name: At_Open_Flower_P Parameter: Plant Line Value: WS
  misc_feature: MA Experiment 20000264 PARAMETER Experiment Name: At_Open_Flower_P Parameter: Tissue Value: Open Flower vs. Whole Plant
  misc_feature: MA Experiment ID: 20000267 Result: Down-regulated in Transcription
  misc_feature: MA Experiment 20000267 PARAMETER Experiment Name: At_Drought_P Parameter: Age (day) Value: 7
  misc_feature: MA Experiment 20000267 PARAMETER Experiment Name: At_Drought_P Parameter: Organism Value: A. thaliana
  misc_feature: MA Experiment 20000267 PARAMETER Experiment Name: At_Drought_P Parameter: Plant Line Value: WS
  misc_feature: MA Experiment 20000267 PARAMETER Experiment Name: At_Drought_P Parameter: Timepoint (hr) Value: 6
  misc_feature: MA Experiment 20000267 PARAMETER Experiment Name: At_Drought_P Parameter: Tissue Value: Whole Plant
  misc_feature: MA Experiment 20000267 PARAMETER Experiment Name: At_Drought_P Parameter: Treatment Value: Drought vs. No Drought
  misc_feature: MA Experiment ID: 20000268 Result: Down-regulated in Transcription
  misc_feature: MA Experiment 20000268 PARAMETER Experiment Name: At_100mM_NaCl__P Parameter: Age (day) Value: 14
  misc_feature: MA Experiment 20000268 PARAMETER Experiment Name: At_100mM_NaCl__P Parameter: Organism Value: A. thaliana
  misc_feature: MA Experiment 20000268 PARAMETER Experiment Name: At_100mM_NaCl__P Parameter: Plant Line Value: WS
  misc_feature: MA Experiment 20000268 PARAMETER Experiment Name: At_100mM_NaCl__P Parameter: Timepoint (hr) Value: 6
  misc_feature: MA Experiment 20000268 PARAMETER Experiment Name: At_100mM_NaCl__P Parameter: Tissue Value: Whole Plant
  misc_feature: MA Experiment 20000268 PARAMETER Experiment Name: At_100mM_NaCl__P Parameter: Treatment Value: 100mM NaCl vs. No Treatment
  misc_feature: MA Experiment ID: 20000436 Result: Down-regulated in Transcription
  misc_feature: MA Experiment 20000436 PARAMETER Experiment Name: At_Drought_P Parameter: Age (day) Value: 7
  misc_feature: MA Experiment 20000436 PARAMETER Experiment Name: At_Drought_P Parameter: Organism Value: A. thaliana
  misc_feature: MA Experiment 20000436 PARAMETER Experiment Name: At_Drought_P Parameter: Plant Line Value: WS
  misc_feature: MA Experiment 20000436 PARAMETER Experiment Name: At_Drought_P Parameter: Timepoint (hr) Value: 12
  misc_feature: MA Experiment 20000436 PARAMETER Experiment Name: At_Drought_P Parameter: Tissue Value: Whole Plant
  misc_feature: MA Experiment 20000436 PARAMETER Experiment Name: At_Drought_P Parameter: Treatment Value: Drought vs. No Drought
  misc_feature: MA Experiment ID: 20000437 Result: Down-regulated in Transcription
  misc_feature: MA Experiment 20000437 PARAMETER Experiment Name: At_Drought_P Parameter: Age (day) Value: 8
  misc_feature: MA Experiment 20000437 PARAMETER Experiment Name: At_Drought_P Parameter: Organism Value: A. thaliana
  misc_feature: MA Experiment 20000437 PARAMETER Experiment Name: At_Drought_P Parameter: Plant Line Value: WS
  misc_feature: MA Experiment 20000437 PARAMETER Experiment Name: At_Drought_P Parameter: Timepoint (hr) Value: 24
  misc_feature: MA Experiment 20000437 PARAMETER Experiment Name: At_Drought_P Parameter: Tissue Value: Whole Plant
  misc_feature: MA Experiment 20000437 PARAMETER Experiment Name: At_Drought_P Parameter: Treatment Value: Drought vs. No Drought
  misc_feature: MA Experiment ID: 20000439 Result: Down-regulated in Transcription
  misc_feature: MA Experiment 20000439 PARAMETER Experiment Name: At_Roots__P Parameter: Age (day) Value: 14 vs. 21
  misc_feature: MA Experiment 20000439 PARAMETER Experiment Name: At_Roots__P Parameter: Organism Value: A. thaliana
  misc_feature: MA Experiment 20000439 PARAMETER Experiment Name: At_Roots__P Parameter: Tissue Value: Roots vs. Whole Plant
  misc_feature: MA Experiment ID: 20000794 Result: Down-regulated in Transcription
  misc_feature: MA Experiment 20000794 PARAMETER Experiment Name: At_Petals_P Parameter: Age (day) Value: 23-25 days
  misc_feature: MA Experiment 20000794 PARAMETER Experiment Name: At_Petals_P Parameter: Plant Line Value: WS
  misc_feature: MA Experiment 20000794 PARAMETER Experiment Name: At_Petals_P Parameter: Tissue Value: Petals vs. Whole plant
  misc_feature: MA Experiment ID: 20001247 Result: Up-regulated in Transcription
  misc_feature: MA Experiment 20001247 PARAMETER Experiment Name: At_Far-red-induction_P Parameter: Age (day) Value: 7
  misc_feature: MA Experiment 20001247 PARAMETER Experiment Name: At_Far-red-induction_P Parameter: Light Value: Far-red vs. White
  misc_feature: MA Experiment 20001247 PARAMETER Experiment Name: At_Far-red-induction_P Parameter: Organism Value: A. thaliana
  misc_feature: MA Experiment 20001247 PARAMETER Experiment Name: At_Far-red-induction_P Parameter: Plant Line Value: Columbia
  misc_feature: MA Experiment 20001247 PARAMETER Experiment Name: At_Far-red-induction_P Parameter: Timepoint (hr) Value: 1
  misc_feature: MA Experiment 20001247 PARAMETER Experiment Name: At_Far-red-induction_P Parameter: Tissue Value: Whole Plant
  misc_feature: MA Experiment ID: 20001450 Result: Up-regulated in Transcription
  misc_feature: MA Experiment 20001450 PARAMETER Experiment Name: At_Far-red-induction_P Parameter: Age (day) Value: 7
  misc_feature: MA Experiment 20001450 PARAMETER Experiment Name: At_Far-red-induction_P Parameter: Light Value: Far-red vs. White
  misc_feature: MA Experiment 20001450 PARAMETER Experiment Name: At_Far-red-induction_P Parameter: Organism Value: A. thaliana
  misc_feature: MA Experiment 20001450 PARAMETER Experiment Name: At_Far-red-induction_P Parameter: Plant Line Value: Columbia
  misc_feature: MA Experiment 20001450 PARAMETER Experiment Name: At_Far-red-induction_P Parameter: Timepoint (hr) Value: 8
  misc_feature: MA Experiment 20001450 PARAMETER Experiment Name: At_Far-red-induction_P Parameter: Tissue Value: Whole Plant
  misc_feature: MA Experiment ID: 20001451 Result: Up-regulated in Transcription
  misc_feature: MA Experiment 20001451 PARAMETER Experiment Name: At_Far-red-induction_P Parameter: Age (day) Value: 7
  misc_feature: MA Experiment 20001451 PARAMETER Experiment Name: At_Far-red-induction_P Parameter: Light Value: Far-red vs. White
  misc_feature: MA Experiment 20001451 PARAMETER Experiment Name: At_Far-red-induction_P Parameter: Organism Value: A. thaliana
  misc_feature: MA Experiment 20001451 PARAMETER Experiment Name: At_Far-red-induction_P Parameter: Plant Line Value: Columbia
  misc_feature: MA Experiment 20001451 PARAMETER Experiment Name: At_Far-red-induction_P Parameter: Timepoint (hr) Value: 24
  misc_feature: MA Experiment 20001451 PARAMETER Experiment Name: At_Far-red-induction_P Parameter: Tissue Value: Whole Plant
  misc_feature: MA Experiment ID: 20001554 Result: Down-regulated in Transcription
  misc_feature: MA Experiment 20001554 PARAMETER Experiment Name: At_Drought_Soil_Dry_P Parameter: Age (day) Value: 21
  misc_feature: MA Experiment 20001554 PARAMETER Experiment Name: At_Drought_Soil_Dry_P Parameter: Organism Value: A. thaliana
  misc_feature: MA Experiment 20001554 PARAMETER Experiment Name: At_Drought_Soil_Dry_P Parameter: Plant Line Value: WS
  misc_feature: MA Experiment 20001554 PARAMETER Experiment Name: At_Drought_Soil_Dry_P Parameter: Post Timepoint (hr) Value: None
  misc_feature: MA Experiment 20001554 PARAMETER Experiment Name: At_Drought_Soil_Dry_P Parameter: Post-Treatment Value: None
  misc_feature: MA Experiment 20001554 PARAMETER Experiment Name: At_Drought_Soil_Dry_P Parameter: Timepoint (day) Value: 7
  misc_feature: MA Experiment 20001554 PARAMETER Experiment Name: At_Drought_Soil_Dry_P Parameter: Treatment Value: Drought vs. No Drought
  misc_feature: MA Experiment ID: 20001555 Result: Down-regulated in Transcription
  misc_feature: MA Experiment 20001555 PARAMETER Experiment Name: At_Drought_Soil_Dry_P Parameter: Age (day) Value: 24
  misc_feature: MA Experiment 20001555 PARAMETER Experiment Name: At_Drought_Soil_Dry_P Parameter: Organism Value: A. thaliana
  misc_feature: MA Experiment 20001555 PARAMETER Experiment Name: At_Drought_Soil_Dry_P Parameter: Plant Line Value: WS
  misc_feature: MA Experiment 20001555 PARAMETER Experiment Name: At_Drought_Soil_Dry_P Parameter: Post Timepoint (hr) Value: None
  misc_feature: MA Experiment 20001555 PARAMETER Experiment Name: At_Drought_Soil_Dry_P Parameter: Post-Treatment Value: None
  misc_feature: MA Experiment 20001555 PARAMETER Experiment Name: At_Drought_Soil_Dry_P Parameter: Timepoint (day) Value: 10
  misc_feature: MA Experiment 20001555 PARAMETER Experiment Name: At_Drought_Soil_Dry_P Parameter: Treatment Value: Drought vs. No Drought
  misc_feature: MA Experiment ID: 20001556 Result: Down-regulated in Transcription
  misc_feature: MA Experiment 20001556 PARAMETER Experiment Name: At_Drought_Soil_Dry_P Parameter: Age (day) Value: 26
  misc_feature: MA Experiment 20001556 PARAMETER Experiment Name: At_Drought_Soil_Dry_P Parameter: Organism Value: A. thaliana
  misc_feature: MA Experiment 20001556 PARAMETER Experiment Name: At_Drought_Soil_Dry_P Parameter: Plant Line Value: WS
  misc_feature: MA Experiment 20001556 PARAMETER Experiment Name: At_Drought_Soil_Dry_P Parameter: Post Timepoint (hr) Value: None
  misc_feature: MA Experiment 20001556 PARAMETER Experiment Name: At_Drought_Soil_Dry_P Parameter: Post-Treatment Value: None
  misc_feature: MA Experiment 20001556 PARAMETER Experiment Name: At_Drought_Soil_Dry_P Parameter: Timepoint (day) Value: 12
  misc_feature: MA Experiment 20001556 PARAMETER Experiment Name: At_Drought_Soil_Dry_P Parameter: Treatment Value: Drought vs. No Drought
  misc_feature: MA Experiment ID: 20001558 Result: Up-regulated in Transcription
  misc_feature: MA Experiment 20001558 PARAMETER Experiment Name: At_Drought_Soil_Dry_P Parameter: Age (day) Value: 27
  misc_feature: MA Experiment 20001558 PARAMETER Experiment Name: At_Drought_Soil_Dry_P Parameter: Organism Value: A. thaliana
  misc_feature: MA Experiment 20001558 PARAMETER Experiment Name: At_Drought_Soil_Dry_P Parameter: Plant Line Value: WS
  misc_feature: MA Experiment 20001558 PARAMETER Experiment Name: At_Drought_Soil_Dry_P Parameter: Post Timepoint (hr) Value: 6
  misc_feature: MA Experiment 20001558 PARAMETER Experiment Name: At_Drought_Soil_Dry_P Parameter: Post-Treatment Value: Re-Water vs. No Drought
  misc_feature: MA Experiment 20001558 PARAMETER Experiment Name: At_Drought_Soil_Dry_P Parameter: Timepoint (day) Value: 13
  misc_feature: MA Experiment 20001558 PARAMETER Experiment Name: At_Drought_Soil_Dry_P Parameter: Treatment Value: Drought vs. No Drought
  misc_feature: MA Experiment ID: 20001559 Result: Down-regulated in Transcription
  misc_feature: MA Experiment 20001559 PARAMETER Experiment Name: At_Drought_Soil_Dry_P Parameter: Age (day) Value: 28
  misc_feature: MA Experiment 20001559 PARAMETER Experiment Name: At_Drought_Soil_Dry_P Parameter: Organism Value: A. thaliana
  misc_feature: MA Experiment 20001559 PARAMETER Experiment Name: At_Drought_Soil_Dry_P Parameter: Plant Line Value: WS
  misc_feature: MA Experiment 20001559 PARAMETER Experiment Name: At_Drought_Soil_Dry_P Parameter: Post Timepoint (hr) Value: 29
  misc_feature: MA Experiment 20001559 PARAMETER Experiment Name: At_Drought_Soil_Dry_P Parameter: Post-Treatment Value: Re-Water vs. No Drought
  misc_feature: MA Experiment 20001559 PARAMETER Experiment Name: At_Drought_Soil_Dry_P Parameter: Timepoint (day) Value: 14
  misc_feature: MA Experiment 20001559 PARAMETER Experiment Name: At_Drought_Soil_Dry_P Parameter: Treatment Value: Drought vs. No Drought
  misc_feature: MA Experiment ID: 20001560 Result: Up-regulated in Transcription
  misc_feature: MA Experiment 20001560 PARAMETER Experiment Name: At_Drought_Soil_Dry_P Parameter: Age (day) Value: 28
  misc_feature: MA Experiment 20001560 PARAMETER Experiment Name: At_Drought_Soil_Dry_P Parameter: Organism Value: A. thaliana
  misc_feature: MA Experiment 20001560 PARAMETER Experiment Name: At_Drought_Soil_Dry_P Parameter: Plant Line Value: WS
  misc_feature: MA Experiment 20001560 PARAMETER Experiment Name: At_Drought_Soil_Dry_P Parameter: Post Timepoint (hr) Value: None
  misc_feature: MA Experiment 20001560 PARAMETER Experiment Name: At_Drought_Soil_Dry_P Parameter: Post-Treatment Value: None
  misc_feature: MA Experiment 20001560 PARAMETER Experiment Name: At_Drought_Soil_Dry_P Parameter: Timepoint (day) Value: 14
  misc_feature: MA Experiment 20001560 PARAMETER Experiment Name: At_Drought_Soil_Dry_P Parameter: Treatment Value: Drought vs. No Drought
  misc_feature: MA Experiment ID: 20001757 Result: Up-regulated in Transcription
  misc_feature: MA Experiment 20001757 PARAMETER Experiment Name: At_50mM_NH4NO3_L-to-H_P Parameter: Timepoint (hr) Value: 6
  misc_feature: MA Experiment 20001757 PARAMETER Experiment Name: At_50mM_NH4NO3_L-to-H_P Parameter: Tissue Value: Leaf
  misc_feature: MA Experiment 20001757 PARAMETER Experiment Name: At_50mM_NH4NO3_L-to-H_P Parameter: Treatment Value: 50mM NH4NO3 vs 100mM Mannitol
  misc_feature: MA Experiment ID: 20001904 Result: Down-regulated in Transcription
  misc_feature: MA Experiment 20001904 PARAMETER Experiment Name: At_Drought_Reproduction_P Parameter: Age (day) Value: 37
  misc_feature: MA Experiment 20001904 PARAMETER Experiment Name: At_Drought_Reproduction_P Parameter: Organism Value: A. thaliana
  misc_feature: MA Experiment 20001904 PARAMETER Experiment Name: At_Drought_Reproduction_P Parameter: Plant Line Value: WS
  misc_feature: MA Experiment 20001904 PARAMETER Experiment Name: At_Drought_Reproduction_P Parameter: Timepoint (day) Value: 7
  misc_feature: MA Experiment 20001904 PARAMETER Experiment Name: At_Drought_Reproduction_P Parameter: Tissue Value: Rosettes
  misc_feature: MA Experiment 20001904 PARAMETER Experiment Name: At_Drought_Reproduction_P Parameter: Treatment Value: Drought vs. No Drought
  misc_feature: MA Experiment ID: 20001905 Result: Down-regulated in Transcription
  misc_feature: MA Experiment 20001905 PARAMETER Experiment Name: At_Drought_Reproduction_P Parameter: Age (day) Value: 40
  misc_feature: MA Experiment 20001905 PARAMETER Experiment Name: At_Drought_Reproduction_P Parameter: Organism Value: A. thaliana
  misc_feature: MA Experiment 20001905 PARAMETER Experiment Name: At_Drought_Reproduction_P Parameter: Plant Line Value: WS
  misc_feature: MA Experiment 20001905 PARAMETER Experiment Name: At_Drought_Reproduction_P Parameter: Timepoint (day) Value: 10
  misc_feature: MA Experiment 20001905 PARAMETER Experiment Name: At_Drought_Reproduction_P Parameter: Tissue Value: Rosettes
  misc_feature: MA Experiment 20001905 PARAMETER Experiment Name: At_Drought_Reproduction_P Parameter: Treatment Value: Drought vs. No Drought
  misc_feature: MA Experiment ID: 20001906 Result: Down-regulated in Transcription
  misc_feature: MA Experiment 20001906 PARAMETER Experiment Name: At_Drought_Reproduction_P Parameter: Age (day) Value: 35
  misc_feature: MA Experiment 20001906 PARAMETER Experiment Name: At_Drought_Reproduction_P Parameter: Organism Value: A. thaliana
  misc_feature: MA Experiment 20001906 PARAMETER Experiment Name: At_Drought_Reproduction_P Parameter: Plant Line Value: WS
  misc_feature: MA Experiment 20001906 PARAMETER Experiment Name: At_Drought_Reproduction_P Parameter: Timepoint (day) Value: 5
  misc_feature: MA Experiment 20001906 PARAMETER Experiment Name: At_Drought_Reproduction_P Parameter: Tissue Value: Siliques
  misc_feature: MA Experiment 20001906 PARAMETER Experiment Name: At_Drought_Reproduction_P Parameter: Treatment Value: Drought vs. No Drought
  misc_feature: MA Experiment ID: 20001908 Result: Down-regulated in Transcription
  misc_feature: MA Experiment 20001908 PARAMETER Experiment Name: At_Drought_Reproduction_P Parameter: Age (day) Value: 40
  misc_feature: MA Experiment 20001908 PARAMETER Experiment Name: At_Drought_Reproduction_P Parameter: Organism Value: A. thaliana
  misc_feature: MA Experiment 20001908 PARAMETER Experiment Name: At_Drought_Reproduction_P Parameter: Plant Line Value: WS
  misc_feature: MA Experiment 20001908 PARAMETER Experiment Name: At_Drought_Reproduction_P Parameter: Timepoint (day) Value: 10
  misc_feature: MA Experiment 20001908 PARAMETER Experiment Name: At_Drought_Reproduction_P Parameter: Tissue Value: Siliques
  misc_feature: MA Experiment 20001908 PARAMETER Experiment Name: At_Drought_Reproduction_P Parameter: Treatment Value: Drought vs. No Drought
  misc_feature: MA Experiment ID: 20001911 Result: Down-regulated in Transcription
  misc_feature: MA Experiment 20001911 PARAMETER Experiment Name: At_Drought_Reproduction_P Parameter: Age (day) Value: 40
  misc_feature: MA Experiment 20001911 PARAMETER Experiment Name: At_Drought_Reproduction_P Parameter: Organism Value: A. thaliana
  misc_feature: MA Experiment 20001911 PARAMETER Experiment Name: At_Drought_Reproduction_P Parameter: Plant Line Value: WS
  misc_feature: MA Experiment 20001911 PARAMETER Experiment Name: At_Drought_Reproduction_P Parameter: Timepoint (day) Value: 10
  misc_feature: MA Experiment 20001911 PARAMETER Experiment Name: At_Drought_Reproduction_P Parameter: Tissue Value: Flowers
  misc_feature: MA Experiment 20001911 PARAMETER Experiment Name: At_Drought_Reproduction_P Parameter: Treatment Value: Drought vs. No Drought
atcatcttcttcactaaacaaaaaaaaacccttcaaaacatttccttattctttcttcttcatctacaacaatggctggagttgcctttggttcctttgatgattcattcagcttggcttctctaagagcttacctcgctgagttcatctccactttactctttgttttcgctggtgttggctctgccattgcctacgcaaagctgacgtcggacgctgctcttgatacaccgggactagtggccatcgcggtttgtcatggttttgctctcttcgtggccgttgcaatcggagccaacatctccggtggccatgtgaacccagccgtcacttttggtcttgctgtcggtggtcaaatcacagtcatcaccggagttttctactggatcgctcagcttctcggctccaccgccgcttgtttcctccttaaatacgtcaccggtggattggcggttccaacccacagcgttgcggctggactaggatcgatagaaggagtagtgatggagatcatcatcaccttcgctttggtctacactgtctacgccaccgccgctgatcccaagaagggttctctcggaaccatcgctcctctcgccattggtcttatcgttggtgccaacatcctcgccgccggtccattctccggtggatccatgaacccagcacgttcctttggaccagctgttgctgccggagacttctctggtcactgggtctactgggttggaccactcatcggtggtggacttgccggacttatctacggaaatgtcttcatgggttcttccgaacatgttcctcttgcttctgctgatttctaaggaaacaagtgatgattcttgattcatgtttctgtgtttggttactttgcctcgatctttcttgttttgtttggagtttggtccggtttcgttgtaatttttatccaatttgtatgaatattatttaatggatggctgttttggttataaattaactaatggatgtatg

SEQ ID NO: 85407 - protein, 250 aa, Arabidopsis thaliana; identical to SEQ ID NO: 30966
  peptide (1)..(250): Ceres Seq. ID no. 12680289
  misc_feature (1)..(250): Homolog of NCBI NO: 15233320 NR Description: delta tonoplast integral protein (delta-TIP); id: At3g16240.1, supported by cDNA: 19689., supported by cDNA: supported by cDNA: gi_17473871, supported by cDNA: tonoplast
  misc_feature (1)..(250): Homolog of NCBI NO: 17473872 NR Description: delta tonoplast intrinsic protein [Arabidopsis >gi|20148587|gb|AAM10184.1| delta tonoplast intrinsic protein
  misc_feature (1)..(247): Homolog of NCBI NO: 7441258 NR Description: probable water channel protein delta-VM23 - radish
  misc_feature (1)..(250): Homolog of NCBI NO: 7441289 NR Description: tonoplast intrinsic protein, delta type - upland
  misc_feature (1)..(247): Homolog of NCBI NO: 7441281 NR Description: water channel protein - common sunflower
  misc_feature (1)..(247): Homolog of NCBI NO: 7441273 NR Description: aquaporin TIP7 - common sunflower
  misc_feature (1)..(247): Homolog of NCBI NO: 7441271 NR Description: aquaporin TIP18 - common sunflower
  misc_feature (1)..(250): Homolog of NCBI NO: 11276920 NR Description: aquaporin [imported] - Vernicia fordii
  misc_feature (1)..(250): Homolog of NCBI NO: 12006841 NR Description: putative delta TIP [Nicotiana glauca]
  misc_feature (1)..(247): Homolog of NCBI NO: 11276919 NR Description: water channel protein MipK [imported] - common plant >gi|4884868|gb|AAD31848.1|AF133532_1 water channel protein

SEQ ID NO: 85408 - DNA, 1709 bp, Arabidopsis thaliana
  misc_feature (1)..(1709): Ceres Seq. ID no. 12680308
  misc_feature: MA Experiment ID: 20000171 Result: Down-regulated in Transcription
  misc_feature: MA Experiment 20000171 PARAMETER Experiment Name: At_42deg_Heat_P Parameter: Age (day) Value: 14
  misc_feature: MA Experiment 20000171 PARAMETER Experiment Name: At_42deg_Heat_P Parameter: Organism Value: A. thaliana
  misc_feature: MA Experiment 20000171 PARAMETER Experiment Name: At_42deg_Heat_P Parameter: Plant Line Value: WS
  misc_feature: MA Experiment 20000171 PARAMETER Experiment Name: At_42deg_Heat_P Parameter: Temperature (deg C) Value: 42 vs. 22
  misc_feature: MA Experiment 20000171 PARAMETER Experiment Name: At_42deg_Heat_P Parameter: Timepoint (hr) Value: 1
  misc_feature: MA Experiment 20000171 PARAMETER Experiment Name: At_42deg_Heat_P Parameter: Tissue Value: Aerial
  misc_feature: MA Experiment ID: 20000173 Result: Down-regulated in Transcription
  misc_feature: MA Experiment 20000173 PARAMETER Experiment Name: At_42deg_Heat_P Parameter: Age (day) Value: 14
  misc_feature: MA Experiment 20000173 PARAMETER Experiment Name: At_42deg_Heat_P Parameter: Organism Value: A. thaliana
  misc_feature: MA Experiment 20000173 PARAMETER Experiment Name: At_42deg_Heat_P Parameter: Plant Line Value: WS
  misc_feature: MA Experiment 20000173 PARAMETER Experiment Name: At_42deg_Heat_P Parameter: Temperature (deg C) Value: 42 vs. 22
  misc_feature: MA Experiment 20000173 PARAMETER Experiment Name: At_42deg_Heat_P Parameter: Timepoint (hr) Value: 6
  misc_feature: MA Experiment 20000173 PARAMETER Experiment Name: At_42deg_Heat_P Parameter: Tissue Value: Aerial
  misc_feature: MA Experiment ID: 20000182 Result: Down-regulated in Transcription
  misc_feature: MA Experiment 20000182 PARAMETER Experiment Name: At_2mM_SA_P Parameter: Age (day) Value: 14
  misc_feature: MA Experiment 20000182 PARAMETER Experiment Name: At_2mM_SA_P Parameter: Organism Value: A. thaliana
  misc_feature: MA Experiment 20000182 PARAMETER Experiment Name: At_2mM_SA_P Parameter: Plant Line Value: WS
  misc_feature: MA Experiment 20000182 PARAMETER Experiment Name: At_2mM_SA_P Parameter: Timepoint (hr) Value: 6
  misc_feature: MA Experiment 20000182 PARAMETER Experiment Name: At_2mM_SA_P Parameter: Tissue Value: Aerial
  misc_feature: MA Experiment 20000182 PARAMETER Experiment Name: At_2mM_SA_P Parameter: Treatment Value: 2mM SA vs. No Treatment
  misc_feature: MA Experiment ID: 20000184 Result: Down-regulated in Transcription
  misc_feature: MA Experiment 20000184 PARAMETER Experiment Name: At_Shoots__P Parameter: Age (day) Value: 7
  misc_feature: MA Experiment 20000184 PARAMETER Experiment Name: At_Shoots__P Parameter: Tissue Value: Shoots vs. Whole Plant
  misc_feature: MA Experiment ID: 20000185 Result: Down-regulated in Transcription
  misc_feature: MA Experiment 20000185 PARAMETER Experiment Name: At_Roots__P Parameter: Age (day) Value: 7 vs. 21
  misc_feature: MA Experiment 20000185 PARAMETER Experiment Name: At_Roots__P Parameter: Organism Value: A. thaliana
  misc_feature: MA Experiment 20000185 PARAMETER Experiment Name: At_Roots__P Parameter: Tissue Value: Roots vs. Whole Plant
  misc_feature: MA Experiment ID: 20000234 Result: Down-regulated in Transcription
  misc_feature: MA Experiment 20000234 PARAMETER Experiment Name: At_Siliques_P Parameter: Age (day) Value: 21
  misc_feature: MA Experiment 20000234 PARAMETER Experiment Name: At_Siliques_P Parameter: Organism Value: A. thaliana
  misc_feature: MA Experiment 20000234 PARAMETER Experiment Name: At_Siliques_P Parameter: Plant Line Value: WS
  misc_feature: MA Experiment 20000234 PARAMETER Experiment Name: At_Siliques_P Parameter: Tissue Value: Less Than 5mm Siliques vs. Whole Plant
  misc_feature: MA Experiment ID: 20000264 Result: Down-regulated in Transcription
  misc_feature: MA Experiment 20000264 PARAMETER Experiment Name: At_Open_Flower_P Parameter: Age (day) Value: 21
  misc_feature: MA Experiment 20000264 PARAMETER Experiment Name: At_Open_Flower_P Parameter: Plant Line Value: WS
  misc_feature: MA Experiment 20000264 PARAMETER Experiment Name: At_Open_Flower_P Parameter: Tissue Value: Open Flower vs. Whole Plant
  misc_feature: MA Experiment ID: 20000265 Result: Down-regulated in Transcription
  misc_feature: MA Experiment 20000265 PARAMETER Experiment Name: At_Open_Flower_P Parameter: Age (day) Value: 21
  misc_feature: MA Experiment 20000265 PARAMETER Experiment Name: At_Open_Flower_P Parameter: Plant Line Value: WS
  misc_feature: MA Experiment 20000265 PARAMETER Experiment Name: At_Open_Flower_P Parameter: Tissue Value: Closed Flower vs. Whole Plant
  misc_feature: MA Experiment ID: 20000269 Result: Up-regulated in Transcription
  misc_feature: MA Experiment 20000269 PARAMETER Experiment Name: At_1mM_KNO3_L-vs-H_Roots_P Parameter: Age (day) Value: 7,10,12
  misc_feature: MA Experiment 20000269 PARAMETER Experiment Name: At_1mM_KNO3_L-vs-H_Roots_P Parameter: Organism Value: A. thaliana
  misc_feature: MA Experiment 20000269 PARAMETER Experiment Name: At_1mM_KNO3_L-vs-H_Roots_P Parameter: Plant Line Value: WS
  misc_feature: MA Experiment 20000269 PARAMETER Experiment Name: At_1mM_KNO3_L-vs-H_Roots_P Parameter: Timepoint (day) Value: 7,10,12
  misc_feature: MA Experiment 20000269 PARAMETER Experiment Name: At_1mM_KNO3_L-vs-H_Roots_P Parameter: Tissue Value: Roots
  misc_feature: MA Experiment 20000269 PARAMETER Experiment Name: At_1mM_KNO3_L-vs-H_Roots_P Parameter: Treatment Value: 1mM KNO3 vs. 50mM KNO3
  misc_feature: MA Experiment ID: 20000286 Result: Down-regulated in Transcription
  misc_feature: MA Experiment 20000286 PARAMETER Experiment Name: At_Open_Flower_P Parameter: Age (day) Value: 21
  misc_feature: MA Experiment 20000286 PARAMETER Experiment Name: At_Open_Flower_P Parameter: Plant Line Value: WS
  misc_feature: MA Experiment 20000286 PARAMETER Experiment Name: At_Open_Flower_P Parameter: Tissue Value: Half Open vs. Whole Plant
  misc_feature: MA Experiment ID: 20000437 Result: Down-regulated in Transcription
  misc_feature: MA Experiment 20000437 PARAMETER Experiment Name: At_Drought_P Parameter: Age (day) Value: 8
  misc_feature: MA Experiment 20000437 PARAMETER Experiment Name: At_Drought_P Parameter: Organism Value: A. thaliana
  misc_feature: MA Experiment 20000437 PARAMETER Experiment Name: At_Drought_P Parameter: Plant Line Value: WS
  misc_feature: MA Experiment 20000437 PARAMETER Experiment Name: At_Drought_P Parameter: Timepoint (hr) Value: 24
  misc_feature: MA Experiment 20000437 PARAMETER Experiment Name: At_Drought_P Parameter: Tissue Value: Whole Plant
  misc_feature: MA Experiment 20000437 PARAMETER Experiment Name: At_Drought_P Parameter: Treatment Value: Drought vs. No Drought
  misc_feature: MA Experiment ID: 20000439 Result: Down-regulated in Transcription
  misc_feature: MA Experiment 20000439 PARAMETER Experiment Name: At_Roots__P Parameter: Age (day) Value: 14 vs. 21
  misc_feature: MA Experiment 20000439 PARAMETER Experiment Name: At_Roots__P Parameter: Organism Value: A. thaliana
  misc_feature: MA Experiment 20000439 PARAMETER Experiment Name: At_Roots__P Parameter: Tissue Value: Roots vs. Whole Plant
  misc_feature: MA Experiment ID: 20000451 Result: Up-regulated in Transcription
  misc_feature: MA Experiment 20000451 PARAMETER Experiment Name: At_CS6879_Shoots-Roots_P Parameter: Age (day) Value: 14
  misc_feature: MA Experiment 20000451 PARAMETER Experiment Name: At_CS6879_Shoots-Roots_P Parameter: Organism Value: A. thaliana
  misc_feature: MA Experiment 20000451 PARAMETER Experiment Name: At_CS6879_Shoots-Roots_P Parameter: Plant Line Value: CS6879 vs. WS
  misc_feature: MA Experiment 20000451 PARAMETER Experiment Name: At_CS6879_Shoots-Roots_P Parameter: Tissue Value: Roots
  misc_feature: MA Experiment ID: 20000495 Result: Up-regulated in Transcription
  misc_feature: MA Experiment 20000495 PARAMETER Experiment Name: At_Guard_Cells_P Parameter: Harvest Date Value: 8/2/2002
  misc_feature: MA Experiment 20000495 PARAMETER Experiment Name: At_Guard_Cells_P Parameter: Organism Value: A. thaliana
  misc_feature: MA Experiment 20000495 PARAMETER Experiment Name: At_Guard_Cells_P Parameter: Tissue Value: Guard Cells vs. Leaves
  misc_feature: MA Experiment ID: 20000794 Result: Down-regulated in Transcription
  misc_feature: MA Experiment 20000794 PARAMETER Experiment Name: At_Petals_P Parameter: Age (day) Value: 23-25 days
  misc_feature: MA Experiment 20000794 PARAMETER Experiment Name: At_Petals_P Parameter: Plant Line Value: WS
  misc_feature: MA Experiment 20000794 PARAMETER Experiment Name: At_Petals_P Parameter: Tissue Value: Petals vs. Whole plant
  misc_feature: MA Experiment ID: 20001248 Result: Down-regulated in Transcription
  misc_feature: MA Experiment 20001248 PARAMETER Experiment Name: At_Far-red-induction_P Parameter: Age (day) Value: 7
  misc_feature: MA Experiment 20001248 PARAMETER Experiment Name: At_Far-red-induction_P Parameter: Light Value: Far-red vs. White
  misc_feature: MA Experiment 20001248 PARAMETER Experiment Name: At_Far-red-induction_P Parameter: Organism Value: A. thaliana
  misc_feature: MA Experiment 20001248 PARAMETER Experiment Name: At_Far-red-induction_P Parameter: Plant Line Value: Columbia
  misc_feature: MA Experiment 20001248 PARAMETER Experiment Name: At_Far-red-induction_P Parameter: Timepoint (hr) Value: 4
  misc_feature: MA Experiment 20001248 PARAMETER Experiment Name: At_Far-red-induction_P Parameter: Tissue Value: Whole Plant
  misc_feature: MA Experiment ID: 20001450 Result: Down-regulated in Transcription
  misc_feature: MA Experiment 20001450 PARAMETER Experiment Name: At_Far-red-induction_P Parameter: Age (day) Value: 7
  misc_feature: MA Experiment 20001450 PARAMETER Experiment Name: At_Far-red-induction_P Parameter: Light Value: Far-red vs. White
  misc_feature: MA Experiment 20001450 PARAMETER Experiment Name: At_Far-red-induction_P Parameter: Organism Value: A. thaliana
  misc_feature: MA Experiment 20001450 PARAMETER Experiment Name: At_Far-red-induction_P Parameter: Plant Line Value: Columbia
  misc_feature: MA Experiment 20001450 PARAMETER Experiment Name: At_Far-red-induction_P Parameter: Timepoint (hr) Value: 8
  misc_feature: MA Experiment 20001450 PARAMETER Experiment Name: At_Far-red-induction_P Parameter: Tissue Value: Whole Plant
  misc_feature: MA Experiment ID: 20001451 Result: Down-regulated in Transcription
  misc_feature: MA Experiment 20001451 PARAMETER Experiment Name: At_Far-red-induction_P Parameter: Age (day) Value: 7
  misc_feature: MA Experiment 20001451 PARAMETER Experiment Name: At_Far-red-induction_P Parameter: Light Value: Far-red vs. White
  misc_feature: MA Experiment 20001451 PARAMETER Experiment Name: At_Far-red-induction_P Parameter: Organism Value: A. thaliana
  misc_feature: MA Experiment 20001451 PARAMETER Experiment Name: At_Far-red-induction_P Parameter: Plant Line Value: Columbia
  misc_feature: MA Experiment 20001451 PARAMETER Experiment Name: At_Far-red-induction_P Parameter: Timepoint (hr) Value: 24
  misc_feature: MA Experiment 20001451 PARAMETER Experiment Name: At_Far-red-induction_P Parameter: Tissue Value: Whole Plant
  misc_feature: MA Experiment ID: 20001757 Result: Up-regulated in Transcription
  misc_feature: MA Experiment 20001757 PARAMETER Experiment Name: At_50mM_NH4NO3_L-to-H_P Parameter: Timepoint (hr) Value: 6
  misc_feature: MA Experiment 20001757 PARAMETER Experiment Name: At_50mM_NH4NO3_L-to-H_P Parameter: Tissue Value: Leaf
  misc_feature: MA Experiment 20001757 PARAMETER Experiment Name: At_50mM_NH4NO3_L-to-H_P Parameter: Treatment Value: 50mM NH4NO3 vs 100mM Mannitol
  misc_feature: MA Experiment ID: 20001905 Result: Down-regulated in Transcription
  misc_feature: MA Experiment 20001905 PARAMETER Experiment Name: At_Drought_Reproduction_P Parameter: Age (day) Value: 40
  misc_feature: MA Experiment 20001905 PARAMETER Experiment Name: At_Drought_Reproduction_P Parameter: Organism Value: A. thaliana
  misc_feature: MA Experiment 20001905 PARAMETER Experiment Name: At_Drought_Reproduction_P Parameter: Plant Line Value: WS
  misc_feature: MA Experiment 20001905 PARAMETER Experiment Name: At_Drought_Reproduction_P Parameter: Timepoint (day) Value: 10
  misc_feature: MA Experiment 20001905 PARAMETER Experiment Name: At_Drought_Reproduction_P Parameter: Tissue Value: Rosettes
  misc_feature: MA Experiment 20001905 PARAMETER Experiment Name: At_Drought_Reproduction_P Parameter: Treatment Value: Drought vs. No Drought
  misc_feature: MA Experiment ID: 20001910 Result: Down-regulated in Transcription
  misc_feature: MA Experiment 20001910 PARAMETER Experiment Name: At_Drought_Reproduction_P Parameter: Age (day) Value: 37
  misc_feature: MA Experiment 20001910 PARAMETER Experiment Name: At_Drought_Reproduction_P Parameter: Organism Value: A. thaliana
  misc_feature: MA Experiment 20001910 PARAMETER Experiment Name: At_Drought_Reproduction_P Parameter: Plant Line Value: WS
  misc_feature: MA Experiment 20001910 PARAMETER Experiment Name: At_Drought_Reproduction_P Parameter: Timepoint (day) Value: 7
  misc_feature: MA Experiment 20001910 PARAMETER Experiment Name: At_Drought_Reproduction_P Parameter: Tissue Value: Flowers
  misc_feature: MA Experiment 20001910 PARAMETER Experiment Name: At_Drought_Reproduction_P Parameter: Treatment Value: Drought vs. No Drought
  misc_feature: MA Experiment ID: 20001911 Result: Down-regulated in Transcription
  misc_feature: MA Experiment 20001911 PARAMETER Experiment Name: At_Drought_Reproduction_P Parameter: Age (day) Value: 40
  misc_feature: MA Experiment 20001911 PARAMETER Experiment Name: At_Drought_Reproduction_P Parameter: Organism Value: A. thaliana
  misc_feature: MA Experiment 20001911 PARAMETER Experiment Name: At_Drought_Reproduction_P Parameter: Plant Line Value: WS
  misc_feature: MA Experiment 20001911 PARAMETER Experiment Name: At_Drought_Reproduction_P Parameter: Timepoint (day) Value: 10
  misc_feature: MA Experiment 20001911 PARAMETER Experiment Name: At_Drought_Reproduction_P Parameter: Tissue Value: Flowers
  misc_feature: MA Experiment 20001911 PARAMETER Experiment Name: At_Drought_Reproduction_P Parameter: Treatment Value: Drought vs. No Drought
aaaagtagtaacaactaagaatggaagatatcatcatcggcgtggtggctctcgccgcggttctccttttcttcctctaccaaaaaccgaaaaccaaacggtacaagctacctccagggccatcaccacttccggtgatcggaaacctccttcagcttcagaagcttaacccacaacgcttcttcgctggatgggccaaaaaatacggtccaatcttgtcatacaggataggaagcagaacaatggtggtgatatcttcagctgagctagctaaagagcttctcaagacgcaagatgtcaactttgcggaccggcctccacatcgtggccatgagttcatatcctacggcaggcgtgacatggcattaaaccactacacaccgtattaccgagagataaggaagatggggatgaaccacttgttctcaccaacacgtgtggccacctttaagcatgtacgagaggaagaggctaggaggatgatggataagatcaacaaggccgcggataaatccgaagtagtcgatataagtgagcttatgttgaccttcacgaactcggttgtgtgtagacaagcgttcgggaagaagtacaatgaagatggagaagagatgaagaggttcatcaagattctttatgggactcaaagcgttttggggaagatctttttctctgattttttcccatattgtggctttcttgatgatttatcaggcctcacagcttatatgaaagagtgtttcgaaagacaagacacttatattcaagaggttgtcaatgagacgcttgatcctaagagagtcaagcccgaaaccgagagcatgattgatctcttgatggggatctacaaagaacaacctttcgcttctgagtttactgtagataatgtcaaagccgtcatcttggtaagtataaatatgttttaaatcgttgcttgcgcttcaagaaaccgtttgcttgtctttcaccttcttttctttttttttggctccaaaaggatattgtagtggcgggaacagatactgcagctgcggcggttgtgtgggggatgacgtatctaatgaagtacccacaagtgttgaagaaagctcaagcagaagtgagagagtatatgaaagagaaaggttcaacgttcgttactgaagacgatgtcaagaaccttccttacttcagagccttagttaaagaaaccctaaggatcgaaccagtgattcctctccttatccctcgtgcttgcattcaagataccaagatcgccggttacgacatccccgcaggaacaacggtcaacgtcaacgcgtgggccgtgtcacgtgacgagaaagaatggggaccgaaccctgatgagtttaggcccgagaggtttcttgagaaggaagttgacttcaaaggcacggactacgagtttataccgttcgggtcaggccggagaatgtgcccgggaatgcgtcttggggccgcgatgcttgaggttccttatgcgaaccttctcctcagcttcaactttaaacttcctaatgggatgaaaccagatgatatcaatatggatgtcatgactggtcttgctatgcacaagtcgcagcatctcaagcttgttccagagaaagtgaacaagtattagctaatatatatcaaataaatctaccttctctgattatatagtatatgttcctccagtgtattctgtttcaatgtttggtttctttctt

SEQ ID NO: 85409 - protein, 301 aa, Arabidopsis thaliana
  peptide (1)..(301): Ceres Seq. ID no. 12680309
  misc_feature (31)..(295): Pfam Name: Cytochrome P450 Pfam Description: Cytochrome P450
  misc_feature (1)..(295): Homolog of NCBI NO: 15236349 NR Description: cytochrome p450 family; protein id: At4g13770.1, by cDNA: gi_16226708, supported by cDNA: gi_18700183, supported cDNA: gi_20857339, supported by cDNA: gi_3164127, supported by
  misc_feature (1)..(295): Homolog of NCBI NO: 619745 NR Description: cytochrome p450 dependent monooxygenase
  misc_feature (4)..(295): Homolog of NCBI NO: 15235968 NR Description: cytochrome p450 family; protein id: At4g31500.1, by cDNA: 13745., supported by cDNA: gi_3164125 [Arabidopsis >gi|13878365|sp|O65782|C831_ARATH Cytochrome P450 83B1 cytochrome
  misc_feature (1)..(301): Homolog of NCBI NO: 16323067 NR Description: AT4g13770/F18A5_160 [Arabidopsis thaliana]
  misc_feature (11)..(295): Homolog of NCBI NO: 16507125 NR Description: cytochrome P450 [Citrus sinensis]
  misc_feature (4)..(295): Homolog of NCBI NO: 25282608 NR Description: cytochrome P-450LXXIA1 [similarity] - avocado
  misc_feature (4)..(299): Homolog of NCBI NO: 15238701 NR Description: cytochrome p450 family; protein id: At5g25120.1
  misc_feature (4)..(299): Homolog of NCBI NO: 15238717 NR Description: cytochrome p450 family; protein id: At5g25130.1 thaliana] >gi|13878407|sp|Q9ZU07|C72C_ARATH Cytochrome P450 71B12
  misc_feature (5)..(295): Homolog of NCBI NO: 1345641 NR Description: Cytochrome P450 71B1 (CYPLXXIB1)
  misc_feature (8)..(295): Homolog of NCBI NO: 15238726 NR Description: cytochrome p450 family; protein id: At5g25180.1
MEDIIIGVVALAAVLLFFLYQKPKTKRYKLPPGPSPLPVIGNLLQLQKLNPQRFFAGWAKKYGPILSYRIGSRTMVVISSAELAKELLKTQDVNFADRPPHRGHEFISYGRRDMALNHYTPYYREIRKMGMNHLFSPTRVATFKHVREEEARRMMDKINKAADKSEVVDISELMLTFTNSVVCRQAFGKKYNEDGEEMKRFIKILYGTQSVLGKIFFSDFFPYCGFLDDLSGLTAYMKECFERQDTYIQEVVNETLDPKRVKPETESMIDLLMGIYKEQPFASEFTVDNVKAVILVSINMF

SEQ ID NO: 85410 - protein, 227 aa, Arabidopsis thaliana
  peptide (1)..(227): Ceres Seq. ID no. 12680310
  misc_feature (1)..(221): Pfam Name: Cytochrome P450 Pfam Description: Cytochrome P450
  misc_feature (1)..(221): Homolog of NCBI NO: 15236349 NR Description: cytochrome p450 family; protein id: At4g13770.1, by cDNA: gi_16226708, supported by cDNA: gi_18700183, supported cDNA: gi_20857339, supported by cDNA: gi_3164127, supported by
  misc_feature (1)..(221): Homolog of NCBI NO: 619745 NR Description: cytochrome p450 dependent monooxygenase
  misc_feature (1)..(221): Homolog of NCBI NO: 15235968 NR Description: cytochrome p450 family; protein id: At4g31500.1, by cDNA: 13745., supported by cDNA: gi_3164125 [Arabidopsis >gi|13878365|sp|O65782|C831_ARATH Cytochrome P450 83B1 cytochrome
  misc_feature (1)..(227): Homolog of NCBI NO: 16323067 NR Description: AT4g13770/F18A5_160 [Arabidopsis thaliana]
  misc_feature (1)..(221): Homolog of NCBI NO: 16507125 NR Description: cytochrome P450 [Citrus sinensis]
  misc_feature (1)..(221): Homolog of NCBI NO: 25282608 NR Description: cytochrome P-450LXXIA1 [similarity] - avocado
  misc_feature (1)..(225): Homolog of NCBI NO: 15238701 NR Description: cytochrome p450 family; protein id: At5g25120.1
  misc_feature (1)..(225): Homolog of NCBI NO: 15238717 NR Description: cytochrome p450 family; protein id: At5g25130.1 thaliana] >gi|13878407|sp|Q9ZU07|C72C_ARATH Cytochrome P450 71B12
  misc_feature (1)..(221): Homolog of NCBI NO: 1345641 NR Description: Cytochrome P450 71B1 (CYPLXXIB1)
  misc_feature (1)..(221): Homolog of NCBI NO: 15238726 NR Description: cytochrome p450 family; protein id: At5g25180.1
MVVISSAELAKELLKTQDVNFADRPPHRGHEFISYGRRDMALNHYTPYYREIRKMGMNHLFSPTRVATFKHVREEEARRMMDKINKAADKSEVVDISELMLTFTNSVVCRQAFGKKYNEDGEEMKRFIKILYGTQSVLGKIFFSDFFPYCGFLDDLSGLTAYMKECFERQDTYIQEVVNETLDPKRVKPETESMIDLLMGIYKEQPFASEFTVDNVKAVILVSINMF

SEQ ID NO: 85411 - protein, 190 aa, Arabidopsis thaliana
  peptide (1)..(190): Ceres Seq. ID no. 12680311
  misc_feature (1)..(183): Pfam Name: Cytochrome P450 Pfam Description: Cytochrome P450
  misc_feature (1)..(190): Homolog of NCBI NO: 15236349 NR Description: cytochrome p450 family; protein id: At4g13770.1, by cDNA: gi_16226708, supported by cDNA: gi_18700183, supported cDNA: gi_20857339, supported by cDNA: gi_3164127, supported by
  misc_feature (1)..(190): Homolog of NCBI NO: 619745 NR Description: cytochrome p450 dependent monooxygenase
  misc_feature (1)..(186): Homolog of NCBI NO: 15235968 NR Description: cytochrome p450 family; protein id: At4g31500.1, by cDNA: 13745., supported by cDNA: gi_3164125 [Arabidopsis >gi|13878365|sp|O65782|C831_ARATH Cytochrome P450 83B1 cytochrome
  misc_feature (1)..(188): Homolog of NCBI NO: 16507125 NR Description: cytochrome P450 [Citrus sinensis]
  misc_feature (1)..(186): Homolog of NCBI NO: 25282608 NR Description: cytochrome P-450LXXIA1 [similarity] - avocado
  misc_feature (1)..(184): Homolog of NCBI NO: 15238701 NR Description: cytochrome p450 family; protein id: At5g25120.1
  misc_feature (1)..(184): Homolog of NCBI NO: 15238717 NR Description: cytochrome p450 family; protein id: At5g25130.1 thaliana] >gi|13878407|sp|Q9ZU07|C72C_ARATH Cytochrome P450 71B12
  misc_feature (1)..(184): Homolog of NCBI NO: 1345641 NR Description: Cytochrome P450 71B1 (CYPLXXIB1)
  misc_feature (1)..(184): Homolog of NCBI NO: 15238726 NR Description: cytochrome p450 family; protein id: At5g25180.1
  misc_feature (1)..(183): Homolog of NCBI NO: 27529812 NR Description: cytochrome P450 [Petunia x hybrida]
MTYLMKYPQVLKKAQAEVREYMKEKGSTFVTEDDVKNLPYFRALVKETLRIEPVIPLLIPRACIQDTKIAGYDIPAGTTVNVNAWAVSRDEKEWGPNPDEFRPERFLEKEVDFKGTDYEFIPFGSGRRMCPGMRLGAAMLEVPYANLLLSFNFKLPNGMKPDDINMDVMTGLAMHKSQHLKLVPEKVNKY

SEQ ID NO: 85412 - DNA, 1679 bp, Arabidopsis thaliana
  misc_feature (1)..(1679): Ceres Seq. ID no. 12680312
  misc_feature: MA Experiment ID: 20000171 Result: Down-regulated in Transcription
  misc_feature: MA Experiment 20000171 PARAMETER Experiment Name: At_42deg_Heat_P Parameter: Age (day) Value: 14
  misc_feature: MA Experiment 20000171 PARAMETER Experiment Name: At_42deg_Heat_P Parameter: Organism Value: A. thaliana
  misc_feature: MA Experiment 20000171 PARAMETER Experiment Name: At_42deg_Heat_P Parameter: Plant Line Value: WS
  misc_feature: MA Experiment 20000171 PARAMETER Experiment Name: At_42deg_Heat_P Parameter: Temperature (deg C) Value: 42 vs. 22
  misc_feature: MA Experiment 20000171 PARAMETER Experiment Name: At_42deg_Heat_P Parameter: Timepoint (hr) Value: 1
  misc_feature: MA Experiment 20000171 PARAMETER Experiment Name: At_42deg_Heat_P Parameter: Tissue Value: Aerial
  misc_feature: MA Experiment ID: 20000173 Result: Down-regulated in Transcription
  misc_feature: MA Experiment 20000173 PARAMETER Experiment Name: At_42deg_Heat_P Parameter: Age (day) Value: 14
  misc_feature: MA Experiment 20000173 PARAMETER Experiment Name: At_42deg_Heat_P Parameter: Organism Value: A. thaliana
  misc_feature: MA Experiment 20000173 PARAMETER Experiment Name: At_42deg_Heat_P Parameter: Plant Line Value: WS
  misc_feature: MA Experiment 20000173 PARAMETER Experiment Name: At_42deg_Heat_P Parameter: Temperature (deg C) Value: 42 vs. 22
  misc_feature: MA Experiment 20000173 PARAMETER Experiment Name: At_42deg_Heat_P Parameter: Timepoint (hr) Value: 6
  misc_feature: MA Experiment 20000173 PARAMETER Experiment Name: At_42deg_Heat_P Parameter: Tissue Value: Aerial
  misc_feature: MA Experiment ID: 20000182 Result: Down-regulated in Transcription
  misc_feature: MA Experiment 20000182 PARAMETER Experiment Name: At_2mM_SA_P Parameter: Age (day) Value: 14
  misc_feature: MA Experiment 20000182 PARAMETER Experiment Name: At_2mM_SA_P Parameter: Organism Value: A. thaliana
  misc_feature: MA Experiment 20000182 PARAMETER Experiment Name: At_2mM_SA_P Parameter: Plant Line Value: WS
  misc_feature: MA Experiment 20000182 PARAMETER Experiment Name: At_2mM_SA_P Parameter: Timepoint (hr) Value: 6
  misc_feature: MA Experiment 20000182 PARAMETER Experiment Name: At_2mM_SA_P Parameter: Tissue Value: Aerial
  misc_feature: MA Experiment 20000182 PARAMETER Experiment Name: At_2mM_SA_P Parameter: Treatment Value: 2mM SA vs. No Treatment
  misc_feature: MA Experiment ID: 20000184 Result: Down-regulated in Transcription
  misc_feature: MA Experiment 20000184 PARAMETER Experiment Name: At_Shoots__P Parameter: Age (day) Value: 7
  misc_feature: MA Experiment 20000184 PARAMETER Experiment Name: At_Shoots__P Parameter: Tissue Value: Shoots vs. Whole Plant
  misc_feature: MA Experiment ID: 20000185 Result: Down-regulated in Transcription
  misc_feature: MA Experiment 20000185 PARAMETER Experiment Name: At_Roots__P Parameter: Age (day) Value: 7 vs. 21
  misc_feature: MA Experiment 20000185 PARAMETER Experiment Name: At_Roots__P Parameter: Organism Value: A. thaliana
  misc_feature: MA Experiment 20000185 PARAMETER Experiment Name: At_Roots__P Parameter: Tissue Value: Roots vs. Whole Plant
  misc_feature: MA Experiment ID: 20000234 Result: Down-regulated in Transcription
  misc_feature: MA Experiment 20000234 PARAMETER Experiment Name: At_Siliques_P Parameter: Age (day) Value: 21
  misc_feature: MA Experiment 20000234 PARAMETER Experiment Name: At_Siliques_P Parameter: Organism Value: A. thaliana
  misc_feature: MA Experiment 20000234 PARAMETER Experiment Name: At_Siliques_P Parameter: Plant Line Value: WS
  misc_feature: MA Experiment 20000234 PARAMETER Experiment Name: At_Siliques_P Parameter: Tissue Value: Less Than 5mm Siliques vs. Whole Plant
  misc_feature: MA Experiment ID: 20000264 Result: Down-regulated in Transcription
  misc_feature: MA Experiment 20000264 PARAMETER Experiment Name: At_Open_Flower_P Parameter: Age (day) Value: 21
  misc_feature: MA Experiment 20000264 PARAMETER Experiment Name: At_Open_Flower_P Parameter: Plant Line Value: WS
  misc_feature: MA Experiment 20000264 PARAMETER Experiment Name: At_Open_Flower_P Parameter: Tissue Value: Open Flower vs. Whole Plant
  misc_feature: MA Experiment ID: 20000265 Result: Down-regulated in Transcription
  misc_feature: MA Experiment 20000265 PARAMETER Experiment Name: At_Open_Flower_P Parameter: Age (day) Value: 21
  misc_feature: MA Experiment 20000265 PARAMETER Experiment Name: At_Open_Flower_P Parameter: Plant Line Value: WS
  misc_feature: MA Experiment 20000265 PARAMETER Experiment Name: At_Open_Flower_P Parameter: Tissue Value: Closed Flower vs. Whole Plant
  misc_feature: MA Experiment ID: 20000269 Result: Up-regulated in Transcription
  misc_feature: MA Experiment 20000269 PARAMETER Experiment Name: At_1mM_KNO3_L-vs-H_Roots_P Parameter: Age (day) Value: 7,10,12
  misc_feature: MA Experiment 20000269 PARAMETER Experiment Name: At_1mM_KNO3_L-vs-H_Roots_P Parameter: Organism Value: A. thaliana
  misc_feature: MA Experiment 20000269 PARAMETER Experiment Name: At_1mM_KNO3_L-vs-H_Roots_P Parameter: Plant Line Value: WS
  misc_feature: MA Experiment 20000269 PARAMETER Experiment Name: At_1mM_KNO3_L-vs-H_Roots_P Parameter: Timepoint (day) Value: 7,10,12
  misc_feature: MA Experiment 20000269 PARAMETER Experiment Name: At_1mM_KNO3_L-vs-H_Roots_P Parameter: Tissue Value: Roots
  misc_feature: MA Experiment 20000269 PARAMETER Experiment Name: At_1mM_KNO3_L-vs-H_Roots_P Parameter: Treatment Value: 1mM KNO3 vs. 50mM KNO3
  misc_feature: MA Experiment ID: 20000286 Result: Down-regulated in Transcription
  misc_feature: MA Experiment 20000286 PARAMETER Experiment Name: At_Open_Flower_P Parameter: Age (day) Value: 21
  misc_feature: MA Experiment 20000286 PARAMETER Experiment Name: At_Open_Flower_P Parameter: Plant Line Value: WS
  misc_feature: MA Experiment 20000286 PARAMETER Experiment Name: At_Open_Flower_P Parameter: Tissue Value: Half Open vs. Whole Plant
  misc_feature: MA Experiment ID: 20000437 Result: Down-regulated in Transcription
  misc_feature: MA Experiment 20000437 PARAMETER Experiment Name: At_Drought_P Parameter: Age (day) Value: 8
  misc_feature: MA Experiment 20000437 PARAMETER Experiment Name: At_Drought_P Parameter: Organism Value: A. thaliana
  misc_feature: MA Experiment 20000437 PARAMETER Experiment Name: At_Drought_P Parameter: Plant Line Value: WS
  misc_feature: MA Experiment 20000437 PARAMETER Experiment Name: At_Drought_P Parameter: Timepoint (hr) Value: 24
  misc_feature: MA Experiment 20000437 PARAMETER Experiment Name: At_Drought_P Parameter: Tissue Value: Whole Plant
  misc_feature: MA Experiment 20000437 PARAMETER Experiment Name: At_Drought_P Parameter: Treatment Value: Drought vs. No Drought
  misc_feature: MA Experiment ID: 20000439 Result: Down-regulated in Transcription
  misc_feature: MA Experiment 20000439 PARAMETER Experiment Name: At_Roots__P Parameter: Age (day) Value: 14 vs. 21
  misc_feature: MA Experiment 20000439 PARAMETER Experiment Name: At_Roots__P Parameter: Organism Value: A. thaliana
  misc_feature: MA Experiment 20000439 PARAMETER Experiment Name: At_Roots__P Parameter: Tissue Value: Roots vs. Whole Plant
  misc_feature: MA Experiment ID: 20000451 Result: Up-regulated in Transcription
  misc_feature: MA Experiment 20000451 PARAMETER Experiment Name: At_CS6879_Shoots-Roots_P Parameter: Age (day) Value: 14
  misc_feature: MA Experiment 20000451 PARAMETER Experiment Name: At_CS6879_Shoots-Roots_P Parameter: Organism Value: A. thaliana
  misc_feature: MA Experiment 20000451 PARAMETER Experiment Name: At_CS6879_Shoots-Roots_P Parameter: Plant Line Value: CS6879 vs. WS
  misc_feature: MA Experiment 20000451 PARAMETER Experiment Name: At_CS6879_Shoots-Roots_P Parameter: Tissue Value: Roots
  misc_feature: MA Experiment ID: 20000495 Result: Up-regulated in Transcription
  misc_feature: MA Experiment 20000495 PARAMETER Experiment Name: At_Guard_Cells_P Parameter: Harvest Date Value: 8/2/2002
  misc_feature: MA Experiment 20000495 PARAMETER Experiment Name: At_Guard_Cells_P Parameter: Organism Value: A. thaliana
  misc_feature: MA Experiment 20000495 PARAMETER Experiment Name: At_Guard_Cells_P Parameter: Tissue Value: Guard Cells vs. Leaves
  misc_feature: MA Experiment ID: 20000794 Result: Down-regulated in Transcription
  misc_feature: MA Experiment 20000794 PARAMETER Experiment Name: At_Petals_P Parameter: Age (day) Value: 23-25 days
  misc_feature: MA Experiment 20000794 PARAMETER Experiment Name: At_Petals_P Parameter: Plant Line Value: WS
  misc_feature: MA Experiment 20000794 PARAMETER Experiment Name: At_Petals_P Parameter: Tissue Value: Petals vs. Whole plant
  misc_feature: MA Experiment ID: 20001248 Result: Down-regulated in Transcription
  misc_feature: MA Experiment 20001248 PARAMETER Experiment Name: At_Far-red-induction_P Parameter: Age (day) Value: 7
  misc_feature: MA Experiment 20001248 PARAMETER Experiment Name: At_Far-red-induction_P Parameter: Light Value: Far-red vs. White
  misc_feature: MA Experiment 20001248 PARAMETER Experiment Name: At_Far-red-induction_P Parameter: Organism Value: A. thaliana
  misc_feature: MA Experiment 20001248 PARAMETER Experiment Name: At_Far-red-induction_P Parameter: Plant Line Value: Columbia
  misc_feature: MA Experiment 20001248 PARAMETER Experiment Name: At_Far-red-induction_P Parameter: Timepoint (hr) Value: 4
  misc_feature: MA Experiment 20001248 PARAMETER Experiment Name: At_Far-red-induction_P Parameter: Tissue Value: Whole Plant
  misc_feature: MA Experiment ID: 20001450 Result: Down-regulated in Transcription
  misc_feature: MA Experiment 20001450 PARAMETER Experiment Name: At_Far-red-induction_P Parameter: Age (day) Value: 7
  misc_feature: MA Experiment 20001450 PARAMETER Experiment Name: At_Far-red-induction_P Parameter: Light Value: Far-red vs. White
  misc_feature: MA Experiment 20001450 PARAMETER Experiment Name: At_Far-red-induction_P Parameter: Organism Value: A. thaliana
  misc_feature: MA Experiment 20001450 PARAMETER Experiment Name: At_Far-red-induction_P Parameter: Plant Line Value: Columbia
  misc_feature: MA Experiment 20001450 PARAMETER Experiment Name: At_Far-red-induction_P Parameter: Timepoint (hr) Value: 8
  misc_feature: MA Experiment 20001450 PARAMETER Experiment Name: At_Far-red-induction_P Parameter: Tissue Value: Whole Plant
  misc_feature: MA Experiment ID: 20001451 Result: Down-regulated in Transcription
  misc_feature: MA Experiment 20001451 PARAMETER Experiment Name: At_Far-red-induction_P Parameter: Age (day) Value: 7
  misc_feature: MA Experiment 20001451 PARAMETER Experiment Name: At_Far-red-induction_P Parameter: Light Value: Far-red vs. White
  misc_feature: MA Experiment 20001451 PARAMETER Experiment Name: At_Far-red-induction_P Parameter: Organism Value: A. thaliana
  misc_feature: MA Experiment 20001451 PARAMETER Experiment Name: At_Far-red-induction_P Parameter: Plant Line Value: Columbia
  misc_feature: MA Experiment 20001451 PARAMETER Experiment Name: At_Far-red-induction_P Parameter: Timepoint (hr) Value: 24
  misc_feature: MA Experiment 20001451 PARAMETER Experiment Name: At_Far-red-induction_P Parameter: Tissue Value: Whole Plant
  misc_feature: MA Experiment ID: 20001757 Result: Up-regulated in Transcription
  misc_feature: MA Experiment 20001757 PARAMETER Experiment Name: At_50mM_NH4NO3_L-to-H_P Parameter: Timepoint (hr) Value: 6
  misc_feature: MA Experiment 20001757 PARAMETER Experiment Name: At_50mM_NH4NO3_L-to-H_P Parameter: Tissue Value: Leaf
  misc_feature: MA Experiment 20001757 PARAMETER Experiment Name: At_50mM_NH4NO3_L-to-H_P Parameter: Treatment Value: 50mM NH4NO3 vs 100mM Mannitol
  misc_feature: MA Experiment ID: 20001905 Result: Down-regulated in Transcription
  misc_feature: MA Experiment 20001905 PARAMETER Experiment Name: At_Drought_Reproduction_P Parameter: Age (day) Value: 40
  misc_feature: MA Experiment 20001905 PARAMETER Experiment Name: At_Drought_Reproduction_P Parameter: Organism Value: A. thaliana
  misc_feature: MA Experiment 20001905 PARAMETER Experiment Name: At_Drought_Reproduction_P Parameter: Plant Line Value: WS
  misc_feature: MA Experiment 20001905 PARAMETER Experiment Name: At_Drought_Reproduction_P Parameter: Timepoint (day) Value: 10
  misc_feature: MA Experiment 20001905 PARAMETER Experiment Name: At_Drought_Reproduction_P Parameter: Tissue Value: Rosettes
  misc_feature: MA Experiment 20001905 PARAMETER Experiment Name: At_Drought_Reproduction_P Parameter: Treatment Value: Drought vs. No Drought
  misc_feature: MA Experiment ID: 20001910 Result: Down-regulated in Transcription
  misc_feature: MA Experiment 20001910 PARAMETER Experiment Name: At_Drought_Reproduction_P Parameter: Age (day) Value: 37
  misc_feature: MA Experiment 20001910 PARAMETER Experiment Name: At_Drought_Reproduction_P Parameter: Organism Value: A. thaliana
  misc_feature: MA Experiment 20001910 PARAMETER Experiment Name: At_Drought_Reproduction_P Parameter: Plant Line Value: WS
  misc_feature: MA Experiment 20001910 PARAMETER Experiment Name: At_Drought_Reproduction_P Parameter: Timepoint (day) Value: 7
  misc_feature: MA Experiment 20001910 PARAMETER Experiment Name: At_Drought_Reproduction_P Parameter: Tissue Value: Flowers
  misc_feature: MA Experiment 20001910 PARAMETER Experiment Name: At_Drought_Reproduction_P Parameter: Treatment Value: Drought vs. No Drought
  misc_feature: MA Experiment ID: 20001911 Result: Down-regulated in Transcription
  misc_feature: MA Experiment 20001911 PARAMETER Experiment Name: At_Drought_Reproduction_P Parameter: Age (day) Value: 40
  misc_feature: MA Experiment 20001911 PARAMETER Experiment Name: At_Drought_Reproduction_P Parameter: Organism Value: A. thaliana
  misc_feature: MA Experiment 20001911 PARAMETER Experiment Name: At_Drought_Reproduction_P Parameter: Plant Line Value: WS
  misc_feature: MA Experiment 20001911 PARAMETER Experiment Name: At_Drought_Reproduction_P Parameter: Timepoint (day) Value: 10
  misc_feature: MA Experiment 20001911 PARAMETER Experiment Name: At_Drought_Reproduction_P Parameter: Tissue Value: Flowers
  misc_feature: MA Experiment 20001911 PARAMETER Experiment Name: At_Drought_Reproduction_P Parameter: Treatment Value: Drought vs. No Drought
caaaagtagtaacaactaagaatggaagatatcatcatcggcgtggtggctctcgccgcggttctccttttcttcctctaccaaaaaccgaaaaccaaacggtacaagctacctccagggccatcaccacttccggtgatcggaaacctccttcagcttcagaagcttaacccacaacgcttcttcgctggatgggccaaaaaatacggtccaatcttgtcatacaggataggaagcagaacaatggtggtgatatcttcagctgagctagctaaagagcttctcaagacgcaagatgtcaactttgcggaccggcctccacatcgtggccatgagttcatatcctacggcaggcgtgacatggcattaaaccactacacaccgtattaccgagagataaggaagatggggatgaaccacttgttctcaccaacacgtgtggccacctttaagcatgtacgagaggaagaggctaggaggatgatggataagatcaacaaggccgcggataaatccgaagtagtcgatataagtgagcttatgttgaccttcacgaactcggttgtgtgtagacaagcgttcgggaagaagtacaatgaagatggagaagagatgaagaggttcatcaagattctttatgggactcaaagcgttttggggaagatctttttctctgattttttcccatattgtggctttcttgatgatttatcaggcctcacagcttatatgaaagagtgtttcgaaagacaagacacttatattcaagaggttgtcaatgagacgcttgatcctaagagagtcaagcccgaaaccgagagcatgattgatctcttgatggggatctacaaagaacaacctttcgcttctgagtttactgtagataatgtcaaagccgtcatcttggatattgtagtggcgggaacagatactgcagctgcggcggttgtgtgggggatgacgtatctaatgaagtacccacaagtgttgaagaaagctcaagcagaagtgagagagtatatgaaagagaaaggttcaacgttcgttactgaagacgatgtcaagaaccttccttacttcagagccttagttaaagaaaccctaaggatcgaaccagtgattcctctccttatccctcgtgcttgcattcaagataccaagatcgccggttacgacatccccgcaggaacaacggtcaacgtcaacgcgtgggccgtgtcacgtgacgagaaagaatggggaccgaaccctgatgagtttaggcccgagaggtttcttgagaaggaagttgacttcaaaggcacggactacgagtttataccgttcgggtcaggccggagaatgtgcccgggaatgcgtcttggggccgcgatgcttgaggttccttatgcgaaccttctcctcagcttcaactttaaacttcctaatgggatgaaaccagatgatatcaatatggatgtcatgactggtcttgctatgcacaagtcgcagcatctcaagcttgttccagagaaagtgaacaagtattagctaatatatatcaaataaatctaccttctctgattatatagtatatgttcctccagtgtattctgtttcaatgtttggtttctttcttaaatggcaatcgtctctctatctttctcttcacattttgatatgaaggaagcaaattcaca

SEQ ID NO: 85413 - protein, 502 aa, Arabidopsis thaliana
  peptide (1)..(502): Ceres Seq. ID no. 12680313
  misc_feature (31)..(495): Pfam Name: Cytochrome P450 Pfam Description: Cytochrome P450
  misc_feature (1)..(502): Homolog of NCBI NO: 15236349 NR Description: cytochrome p450 family; protein id: At4g13770.1, by cDNA: gi_16226708, supported by cDNA: gi_18700183, supported cDNA: gi_20857339, supported by cDNA: gi_3164127, supported by
  misc_feature (1)..(502): Homolog of NCBI NO: 619745 NR Description: cytochrome p450 dependent monooxygenase
  misc_feature (4)..(498): Homolog of NCBI NO: 15235968 NR Description: cytochrome p450 family; protein id: At4g31500.1, by cDNA: 13745., supported by cDNA: gi_3164125 [Arabidopsis >gi|13878365|sp|O65782|C831_ARATH Cytochrome P450 83B1 cytochrome
  misc_feature (1)..(295): Homolog of NCBI NO: 16323067 NR Description: AT4g13770/F18A5_160 [Arabidopsis thaliana]
  misc_feature (11)..(500): Homolog of NCBI NO: 16507125 NR Description: cytochrome P450 [Citrus sinensis]
  misc_feature (4)..(498): Homolog of NCBI NO: 25282608 NR Description: cytochrome P-450LXXIA1 [similarity] - avocado
  misc_feature (4)..(496): Homolog of NCBI NO: 15238701 NR Description: cytochrome p450 family; protein id: At5g25120.1
  misc_feature (5)..(496): Homolog of NCBI NO: 1345641 NR Description: Cytochrome P450 71B1 (CYPLXXIB1)
  misc_feature (4)..(496): Homolog of NCBI NO: 15238717 NR Description: cytochrome p450 family; protein id: At5g25130.1 thaliana] >gi|13878407|sp|Q9ZU07|C72C_ARATH Cytochrome P450 71B12
  misc_feature (8)..(502): Homolog of NCBI NO: 15222174 NR Description: cytochrome p450 family; protein id: At1g13080.1, by cDNA: gi_3164139 [Arabidopsis thaliana]
MEDIIIGVVALAAVLLFFLYQKPKTKRYKLPPGPSPLPVIGNLLQLQKLNPQRFFAGWAKKYGPILSYRIGSRTMVVISSAELAKELLKTQDVNFADRPPHRGHEFISYGRRDMALNHYTPYYREIRKMGMNHLFSPTRVATFKHVREEEARRMMDKINKAADKSEVVDISELMLTFTNSVVCRQAFGKKYNEDGEEMKRFIKILYGTQSVLGKIFFSDFFPYCGFLDDLSGLTAYMKECFERQDTYIQEVVNETLDPKRVKPETESMIDLLMGIYKEQPFASEFTVDNVKAVILDIVVAGTDTAAAAVVWGMTYLMKYPQVLKKAQAEVREYMKEKGSTFVTEDDVKNLPYFRALVKETLRIEPVIPLLIPRACIQDTKIAGYDIPAGTTVNVNAWAVSRDEKEWGPNPDEFRPERFLEKEVDFKGTDYEFIPFGSGRRMCPGMRLGAAMLEVPYANLLLSFNFKLPNGMKPDDINMDVMTGLAMHKSQHLKLVPEKVNKY

SEQ ID NO: 85414 - protein, 428 aa, Arabidopsis thaliana
  peptide (1)..(428): Ceres Seq. ID no. 12680314
  misc_feature (1)..(421): Pfam Name: Cytochrome P450 Pfam Description: Cytochrome P450
  misc_feature (1)..(428): Homolog of NCBI NO: 15236349 NR Description: cytochrome p450 family; protein id: At4g13770.1, by cDNA: gi_16226708, supported by cDNA: gi_18700183, supported cDNA: gi_20857339, supported by cDNA: gi_3164127, supported by
  misc_feature (1)..(428): Homolog of NCBI NO: 619745 NR Description: cytochrome p450 dependent monooxygenase
  misc_feature (1)..(424): Homolog of NCBI NO: 15235968 NR Description: cytochrome p450 family; protein id: At4g31500.1, by cDNA: 13745., supported by cDNA: gi_3164125 [Arabidopsis >gi|13878365|sp|O65782|C831_ARATH Cytochrome P450 83B1 cytochrome
  misc_feature (1)..(221): Homolog of NCBI NO: 16323067 NR Description: AT4g13770/F18A5_160 [Arabidopsis thaliana]
  misc_feature (1)..(426): Homolog of NCBI NO: 16507125 NR Description: cytochrome P450 [Citrus sinensis]
  misc_feature (1)..(424): Homolog of NCBI NO: 25282608 NR Description: cytochrome P-450LXXIA1 [similarity] - avocado
  misc_feature (1)..(422): Homolog of NCBI NO: 15238701 NR Description: cytochrome p450 family; protein id: At5g25120.1
  misc_feature (1)..(422): Homolog of NCBI NO: 1345641 NR Description: Cytochrome P450 71B1 (CYPLXXIB1)
  misc_feature (1)..(422): Homolog of NCBI NO: 15238717 NR Description: cytochrome p450 family; protein id: At5g25130.1 thaliana] >gi|13878407|sp|Q9ZU07|C72C_ARATH Cytochrome P450 71B12
  misc_feature (1)..(428): Homolog of NCBI NO: 15222174 NR Description: cytochrome p450 family; protein id: At1g13080.1, by cDNA: gi_3164139 [Arabidopsis thaliana]
MVVISSAELAKELLKTQDVNFADRPPHRGHEFISYGRRDMALNHYTPYYREIRKMGMNHLFSPTRVATFKHVREEEARRMMDKINKAADKSEVVDISELMLTFTNSVVCRQAFGKKYNEDGEEMKRFIKILYGTQSVLGKIFFSDFFPYCGFLDDLSGLTAYMKECFERQDTYIQEVVNETLDPKRVKPETESMIDLLMGIYKEQPFASEFTVDNVKAVILDIVVAGTDTAAAAVVWGMTYLMKYPQVLKKAQAEVREYMKEKGSTFVTEDDVKNLPYFRALVKETLRIEPVIPLLIPRACIQDTKIAGYDIPAGTTVNVNAWAVSRDEKEWGPNPDEFRPERFLEKEVDFKGTDYEFIPFGSGRRMCPGMRLGAAMLEVPYANLLLSFNFKLPNGMKPDDINMDVMTGLAMHKSQHLKLVPEKVNKY

SEQ ID NO: 85415 - protein, 389 aa, Arabidopsis thaliana
  peptide (1)..(389): Ceres Seq. ID no. 12680315
  misc_feature (1)..(382): Pfam Name: Cytochrome P450 Pfam Description: Cytochrome P450
  misc_feature (1)..(389): Homolog of NCBI NO: 15236349 NR Description: cytochrome p450 family; protein id: At4g13770.1, by cDNA: gi_16226708, supported by cDNA: gi_18700183, supported cDNA: gi_20857339, supported by cDNA: gi_3164127, supported by
  misc_feature (1)..(389): Homolog of NCBI NO: 619745 NR Description: cytochrome p450 dependent monooxygenase
  misc_feature (1)..(385): Homolog of NCBI NO: 15235968 NR Description: cytochrome p450 family; protein id: At4g31500.1, by cDNA: 13745., supported by cDNA: gi_3164125 [Arabidopsis >gi|13878365|sp|O65782|C831_ARATH Cytochrome P450 83B1 cytochrome
  misc_feature (1)..(182): Homolog of NCBI NO: 16323067 NR Description: AT4g13770/F18A5_160 [Arabidopsis thaliana]
  misc_feature (1)..(387): Homolog of NCBI NO: 16507125 NR Description: cytochrome P450 [Citrus sinensis]
  misc_feature (1)..(385): Homolog of NCBI NO: 25282608 NR Description: cytochrome P-450LXXIA1 [similarity] - avocado
  misc_feature (1)..(383): Homolog of NCBI NO: 15238701 NR Description: cytochrome p450 family; protein id: At5g25120.1
  misc_feature (1)..(383): Homolog of NCBI NO: 1345641 NR Description: Cytochrome P450 71B1 (CYPLXXIB1)
  misc_feature (1)..(383): Homolog of NCBI NO: 15238717 NR Description: cytochrome p450 family; protein id: At5g25130.1 thaliana] >gi|13878407|sp|Q9ZU07|C72C_ARATH Cytochrome P450 71B12
  misc_feature (1)..(389): Homolog of NCBI NO: 15222174 NR Description: cytochrome p450 family; protein id: At1g13080.1, by cDNA: gi_3164139 [Arabidopsis thaliana]
MALNHYTPYYREIRKMGMNHLFSPTRVATFKHVREEEARRMMDKINKAADKSEVVDISELMLTFTNSVVCRQAFGKKYNEDGEEMKRFIKILYGTQSVLGKIFFSDFFPYCGFLDDLSGLTAYMKECFERQDTYIQEVVNETLDPKRVKPETESMIDLLMGIYKEQPFASEFTVDNVKAVILDIVVAGTDTAAAAVVWGMTYLMKYPQVLKKAQAEVREYMKEKGSTFVTEDDVKNLPYFRALVKETLRIEPVIPLLIPRACIQDTKIAGYDIPAGTTVNVNAWAVSRDEKEWGPNPDEFRPERFLEKEVDFKGTDYEFIPFGSGRRMCPGMRLGAAMLEVPYANLLLSFNFKLPNGMKPDDINMDVMTGLAMHKSQHLKLVPEKVNKY

SEQ ID NO: 85416 - DNA, 702 bp, Arabidopsis thaliana
  misc_feature (1)..(702): Ceres Seq. ID no. 12680320
  misc_feature: MA Experiment ID: 20000307 Result: Down-regulated in Transcription
  misc_feature: MA Experiment 20000307 PARAMETER Experiment Name: At_Germinating_Seeds_Sub_P Parameter: Age (hr) Value: 24 vs. 0
  misc_feature: MA Experiment 20000307 PARAMETER Experiment Name: At_Germinating_Seeds_Sub_P Parameter: Organism Value: A. thaliana
  misc_feature: MA Experiment 20000307 PARAMETER Experiment Name: At_Germinating_Seeds_Sub_P Parameter: Plant Line Value: WS
  misc_feature: MA Experiment 20000307 PARAMETER Experiment Name: At_Germinating_Seeds_Sub_P Parameter: Tissue Value: Germinating Seeds
  misc_feature: MA Experiment ID: 20000440 Result: Up-regulated in Transcription
  misc_feature: MA Experiment 20000440 PARAMETER Experiment Name: At_Closed-Flower__Sub_P Parameter: Tissue Value: Closed Flower vs. Whole Plant
ttcattctacatttcctctgcctctttctcagatcacaaaaccctaatttcgaatctttattcttcagaatggctttctgtaacaaactcggtggtctattgagacagaacatttcttctaacggaaatgttccggttacgtctatgctcggatctctccggttgatgtctaccaagcttttcatcggaggtctctcatggggaaccgatgacgcatccttaagggatgcttttgctcacttcggtgacgttgttgatgctaaagttatcgttgatagagagacaggaagatcaagggggtttggatttgtcaacttcaatgatgagggtgctgcaactgctgccatatcagagatggacggaaaggaactgaatggtcgtcacatccgagtgaatcctgctaatgatagaccaagtgctccacgggcttatggaggtggtggtggatacagtggtggaggtggaggctacggaggaggtggtggtgggtacggaggaggaggtggtggctatggaggaggtggtgatggtggtggtggtttctaaacagaggaggtgcttgtgaagaagaagagttaatggttctgtttagttggtttcttctattgaatcttatgttagtacaaaacctgaatgggatttgctgaaaactctttactctttttttggttaccaatcaattcggtttaatattttattgcc

SEQ ID NO: 85417 - protein, 181 aa, Arabidopsis thaliana
  peptide (1)..(181): Ceres Seq. ID no. 12680321
  misc_feature (60)..(131): Pfam Name: RNA recognition motif. (a.k.a. RRM, RBD, or RNP domain) Pfam Description: RNA recognition motif. (a.k.a. RRM, RBD, or RNP
  misc_feature (24)..(181): Homolog of NCBI NO: 15236359 NR Description: glycine-rich RNA-binding protein AtGRP2; protein At4g13850.1, supported by cDNA: 16314., supported by cDNA:
  misc_feature (24)..(181): Homolog of NCBI NO: 30682622 NR Description: glycine-rich RNA-binding protein (AtGRP2)
  misc_feature (24)..(171): Homolog of NCBI NO: 2826811 NR Description: AtGRP2 [Arabidopsis thaliana]
  misc_feature (43)..(181): Homolog of NCBI NO: 322514 NR Description: glycine-rich RNA-binding protein (clone A81) -
  misc_feature (24)..(156): Homolog of NCBI NO: 15229525 NR Description: glycine-rich RNA-binding protein; protein id: supported by cDNA: 18903., supported by cDNA: gi_17979515,
  misc_feature (24)..(156): Homolog of NCBI NO: 21553972 NR Description: glycine-rich RNA binding protein, putative
  misc_feature (24)..(172): Homolog of NCBI NO: 7439994 NR Description: glycine-rich RNA-binding protein - garden pea
  misc_feature (24)..(162): Homolog of NCBI NO: 7439995 NR Description: RNA binding protein 3 - wood tobacco
  misc_feature (24)..(180): Homolog of NCBI NO: 15239505 NR Description: glycine-rich RNA-binding protein; protein id: supported by cDNA: gi_16974555 [Arabidopsis thaliana] contains similarity to RNA binding protein~gene_id:MAF19.4
  misc_feature (24)..(173): Homolog of NCBI NO: 34906972 NR Description: putative glycine-rich RNA-binding protein 2
FILHFLCLFLRSQNPNFESLFFRMAFCNKLGGLLRQNISSNGNVPVTSMLGSLRLMSTKLFIGGLSWGTDDASLRDAFAHFGDVVDAKVIVDRETGRSRGFGFVNFNDEGAATAAISEMDGKELNGRHIRVNPANDRPSAPRAYGGGGGYSGGGGGYGGGGGGYGGGGGGYGGGGDGGGGF

SEQ ID NO: 85418 - protein, 158 aa, Arabidopsis thaliana; identical to SEQ ID NO: 30013
  peptide (1)..(158): Ceres Seq. ID no. 12680322
  misc_feature (37)..(108): Pfam Name: RNA recognition motif. (a.k.a. RRM, RBD, or RNP domain) Pfam Description: RNA recognition motif. (a.k.a. RRM, RBD, or RNP
  misc_feature (1)..(158): Homolog of NCBI NO: 15236359 NR Description: glycine-rich RNA-binding protein AtGRP2; protein At4g13850.1, supported by cDNA: 16314., supported by cDNA:
  misc_feature (1)..(158): Homolog of NCBI NO: 30682622 NR Description: glycine-rich RNA-binding protein (AtGRP2)
  misc_feature (1)..(148): Homolog of NCBI NO: 2826811 NR Description: AtGRP2 [Arabidopsis thaliana]
  misc_feature (20)..(158): Homolog of NCBI NO: 322514 NR Description: glycine-rich RNA-binding protein (clone A81) -
  misc_feature (1)..(133): Homolog of NCBI NO: 15229525 NR Description: glycine-rich RNA-binding protein; protein id: supported by cDNA: 18903., supported by cDNA: gi_17979515,
  misc_feature (1)..(133): Homolog of NCBI NO: 21553972 NR Description: glycine-rich RNA binding protein, putative
  misc_feature (1)..(149): Homolog of NCBI NO: 7439994 NR Description: glycine-rich RNA-binding protein - garden pea
  misc_feature (1)..(139): Homolog of NCBI NO: 7439995 NR Description: RNA binding protein 3 - wood tobacco
  misc_feature (1)..(157): Homolog of NCBI NO: 15239505 NR Description: glycine-rich RNA-binding protein; protein id: supported by cDNA: gi_16974555 [Arabidopsis thaliana] contains similarity to RNA binding protein~gene_id:MAF19.4
  misc_feature (1)..(150): Homolog of NCBI NO: 34906972 NR Description: putative glycine-rich RNA-binding protein 2

SEQ ID NO: 85419 - protein, 133 aa, Arabidopsis thaliana; identical to SEQ ID NO: 30014
  peptide (1)..(133): Ceres Seq. ID no. 12680323
  misc_feature (12)..(83): Pfam Name: RNA recognition motif. (a.k.a. RRM, RBD, or RNP domain) Pfam Description: RNA recognition motif. (a.k.a. RRM, RBD, or RNP
  misc_feature (1)..(133): Homolog of NCBI NO: 15236359 NR Description: glycine-rich RNA-binding protein AtGRP2; protein At4g13850.1, supported by cDNA: 16314., supported by cDNA:
  misc_feature (1)..(133): Homolog of NCBI NO: 30682622 NR Description: glycine-rich RNA-binding protein (AtGRP2)
  misc_feature (1)..(123): Homolog of NCBI NO: 2826811 NR Description: AtGRP2 [Arabidopsis thaliana]
  misc_feature (1)..(133): Homolog of NCBI NO: 322514 NR Description: glycine-rich RNA-binding protein (clone A81) -
  misc_feature (1)..(108): Homolog of NCBI NO: 15229525 NR Description: glycine-rich RNA-binding protein; protein id: supported by cDNA: 18903., supported by cDNA: gi_17979515,
  misc_feature (1)..(108): Homolog of NCBI NO: 21553972 NR Description: glycine-rich RNA binding protein, putative
  misc_feature (1)..(124): Homolog of NCBI NO: 7439994 NR Description: glycine-rich RNA-binding protein - garden pea
  misc_feature (1)..(114): Homolog of NCBI NO: 7439995 NR Description: RNA binding protein 3 - wood tobacco
  misc_feature (1)..(132): Homolog of NCBI NO: 15239505 NR Description: glycine-rich RNA-binding protein; protein id: supported by cDNA: gi_16974555 [Arabidopsis thaliana] contains similarity to RNA binding protein~gene_id:MAF19.4
  misc_feature (1)..(125): Homolog of NCBI NO: 34906972 NR Description: putative glycine-rich RNA-binding protein 2

SEQ ID NO: 85420 - DNA, 1692 bp, Arabidopsis thaliana
  misc_feature (1)..(1692): Ceres Seq. ID no. 12680327
  misc_feature: MA Experiment ID: 20000794 Result: Up-regulated in Transcription
  misc_feature: MA Experiment 20000794 PARAMETER Experiment Name: At_Petals_P Parameter: Age (day) Value: 23-25 days
  misc_feature: MA Experiment 20000794 PARAMETER Experiment Name: At_Petals_P Parameter: Plant Line Value: WS
  misc_feature: MA Experiment 20000794 PARAMETER Experiment Name: At_Petals_P Parameter: Tissue Value: Petals vs. Whole plant
atatacacacaattcaatatttgacttcacatagagagagatagagagatggcgacggaaacggaagttgtagctccggtaacggtaagcaacggcggaagcaaaggatgttgcaagtacggtggtcctggttacgcgactcctctcgccgctatgtctggtccatcggagaaacttatctacgtaaccgccgtctacaccggaactggaatagataaaccggattatttggcgacggtggatgtagatccaagctcgccttcgtattcaagtgttattcatagattaccaatgccttttgttggtgatgagcttcatcattctggttggaactcttgtagttcttgccatggtgatgcttctgttgatagacgttatctcgtgttaccgtctcttatatctggtcgcatttatgcgattgatactaaggaaaacccgagggctccgtctttgtataagtatgttgatcctaaagagattgctgataagactggattggcgtttcctcacacggctcattgcctcgccacgggcgagatcttggtgtcctgtcttggagatgaagaggggaatgctaaggggaatgggtttcttcttcttgactctgattttaacatcaagaataggtgggagaaaccaggacatagtcctttgtatgggtatgatttttggtaccaacctcggcacaagaccatgatcagcacatcttggggagcacctaaagccttctctaaaggtttcaatcttcagcacgttgctgatggcttgtatggaagtcatctacatgtttatagttggccaggaggtgaaataaaacaattaattgaccttggaccgactggtctcttacctttggagattagattcttgcatgatccatctaaagatacagggtttgttgggagtgccttgtcgagtaatatgataagatttttcaagaacagtgatgaaacatggagccatgaggttgttatatcggttaaaccgttgaaagtcgaaaactggatacttccagaaatgccggggctaatcaccgacttcttgatctccctcgatgaccgatttatttactttgtgaactggctccatggagacattcgtcagtacaacatagaggaccctaaaaaccctgtattaacagggcaaatttgggttggaggattactacaaaagggcagtcctgttaaggcggttggagaagacggaaacactttccaattcgaggttcctcagatcaaggggaaatctttacgaggtggacctcaaatgattcagctgagcctcgatgggaaacgattgtatgcaacaaactcgctgtttagcgcatgggatcgtcagttttatcctgaaatcatggagaaaggctcacacataattcagattgatgttgatacagaaaaaggtggtctcaccataaaccctgatttctttgtggactttggtgatgaaccagacggtccttcactagcccacgagatgagatatccaggtggagactgcacttccgatatctggatttgaatttggctttgtttagagtgtgttttgtgttaagtttaaattgagttttattatttgttgtgtgtttagtagagttgaataaaaaagggagtaagatgactcagacaattaacacttgtttgtacattttgactcctatgtgtcttaagtaataaaactttctacaattcg

SEQ ID NO: 85421 - protein, 490 aa, Arabidopsis thaliana; identical to SEQ ID NO: 77463
  peptide (1)..(490): Ceres Seq. ID no. 12680328
  misc_feature (22)..(490): Pfam Name: 56kDa selenium binding protein (SBP56) Pfam Description: 56kDa selenium binding protein (SBP56)
  misc_feature (1)..(490): Homolog of NCBI NO: 15236385 NR Description: selenium-binding protein like; protein id:
  misc_feature (25)..(490): Homolog of NCBI NO: 15485232 NR Description: selenium binding protein [Arabidopsis thaliana]
  misc_feature (1)..(490): Homolog of NCBI NO: 15236386 NR Description: selenium-binding protein like; protein id: supported by cDNA: gi_13605824, supported by cDNA: gi_13877734, by cDNA: gi_17473633, supported by cDNA: gi_17473651 [Arabidopsis
  misc_feature (5)..(490): Homolog of NCBI NO: 13605825 NR Description: AT4g14040/dl3061c [Arabidopsis thaliana]
  misc_feature (1)..(490): Homolog of NCBI NO: 22530900 NR Description: selenium-binding protein-like protein
  misc_feature (1)..(490): Homolog of NCBI NO: 25348077 NR Description: selenium-binding protein like [imported] -
  misc_feature (9)..(490): Homolog of NCBI NO: 15485720 NR Description: selenium binding protein [Medicago sativa]
  misc_feature (82)..(490): Homolog of NCBI NO: 20340239 NR Description: putative selenium-binding protein [Thellungiella
  misc_feature (20)..(490): Homolog of NCBI NO: 15485716 NR Description: selenium binding protein [Lotus japonicus]
  misc_feature (15)..(490): Homolog of NCBI NO: 15229520 NR Description: selenium binding protein, putative; protein id:

SEQ ID NO: 85422 - protein, 455 aa, Arabidopsis thaliana; identical to SEQ ID NO: 77464
  peptide (1)..(455): Ceres Seq. ID no. 12680329
  misc_feature (1)..(455): Pfam Name: 56kDa selenium binding protein (SBP56) Pfam Description: 56kDa selenium binding protein (SBP56)
  misc_feature (1)..(455): Homolog of NCBI NO: 15236385 NR Description: selenium-binding protein like; protein id:
  misc_feature (1)..(455): Homolog of NCBI NO: 15485232 NR Description: selenium binding protein [Arabidopsis thaliana]
  misc_feature (1)..(455): Homolog of NCBI NO: 15236386 NR Description: selenium-binding protein like; protein id: supported by cDNA: gi_13605824, supported by cDNA: gi_13877734, by cDNA: gi_17473633, supported by cDNA: gi_17473651 [Arabidopsis
  misc_feature (1)..(455): Homolog of NCBI NO: 13605825 NR Description: AT4g14040/dl3061c [Arabidopsis thaliana]
  misc_feature (1)..(455): Homolog of NCBI NO: 22530900 NR Description: selenium-binding protein-like protein
  misc_feature (1)..(455): Homolog of NCBI NO: 25348077 NR Description: selenium-binding protein like [imported] -
  misc_feature (1)..(455): Homolog of NCBI NO: 15485720 NR Description: selenium binding protein [Medicago sativa]
  misc_feature (47)..(455): Homolog of NCBI NO: 20340239 NR Description: putative selenium-binding protein [Thellungiella
  misc_feature (1)..(455): Homolog of NCBI NO: 15485716 NR Description: selenium binding protein [Lotus japonicus]
  misc_feature (1)..(455): Homolog of NCBI NO: 15229520 NR Description: selenium binding protein, putative; protein id:

SEQ ID NO: 85423 - protein, 409 aa, Arabidopsis thaliana; identical to SEQ ID NO: 77465
  peptide (1)..(409): Ceres Seq. ID no. 12680330
  misc_feature (1)..(409): Pfam Name: 56kDa selenium binding protein (SBP56) Pfam Description: 56kDa selenium binding protein (SBP56)
  misc_feature (1)..(409): Homolog of NCBI NO: 15236385 NR Description: selenium-binding protein like; protein id:
  misc_feature (1)..(409): Homolog of NCBI NO: 15485232 NR Description: selenium binding protein [Arabidopsis thaliana]
  misc_feature (1)..(409): Homolog of NCBI NO: 15236386 NR Description: selenium-binding protein like; protein id: supported by cDNA: gi_13605824, supported by cDNA: gi_13877734, by cDNA: gi_17473633, supported by cDNA: gi_17473651 [Arabidopsis
  misc_feature (1)..(409): Homolog of NCBI NO: 13605825 NR Description: AT4g14040/dl3061c [Arabidopsis thaliana]
  misc_feature (1)..(409): Homolog of NCBI NO: 22530900 NR Description: selenium-binding protein-like protein
  misc_feature (1)..(409): Homolog of NCBI NO: 25348077 NR Description: selenium-binding protein like [imported] -
  misc_feature (1)..(409): Homolog of NCBI NO: 15485720 NR Description: selenium binding protein [Medicago sativa]
  misc_feature (1)..(409): Homolog of NCBI NO: 20340239 NR Description: putative selenium-binding protein [Thellungiella
  misc_feature (1)..(409): Homolog of NCBI NO: 15485716 NR Description: selenium binding protein [Lotus japonicus]
  misc_feature (1)..(409): Homolog of NCBI NO: 15229520 NR Description: selenium binding protein, putative; protein id:

SEQ ID NO: 85424 - DNA, 2422 bp, Arabidopsis thaliana
  misc_feature (1)..(2422): Ceres Seq. ID no. 12680335
  misc_feature: MA Experiment ID: 20000315 Result: Down-regulated in Transcription
  misc_feature: MA Experiment 20000315 PARAMETER Experiment Name: At_14day_Shoots-Roots_Sub_P Parameter: Age (day) Value: 14
  misc_feature: MA Experiment 20000315 PARAMETER Experiment Name: At_14day_Shoots-Roots_Sub_P Parameter: Organism Value: A. thaliana
  misc_feature: MA Experiment 20000315 PARAMETER Experiment Name: At_14day_Shoots-Roots_Sub_P Parameter: Plant Line Value: WS
  misc_feature: MA Experiment 20000315 PARAMETER Experiment Name: At_14day_Shoots-Roots_Sub_P Parameter: Tissue Value: Shoots vs. Whole Plant
  misc_feature: MA Experiment ID: 20000328 Result: Down-regulated in Transcription
  misc_feature: MA Experiment 20000328 PARAMETER Experiment Name: At_42deg_Heat_Sub_P Parameter: Age (day) Value: 14
  misc_feature: MA Experiment 20000328 PARAMETER Experiment Name: At_42deg_Heat_Sub_P Parameter: Organism Value: A. thaliana
  misc_feature: MA Experiment 20000328 PARAMETER Experiment Name: At_42deg_Heat_Sub_P Parameter: Plant Line Value: WS
  misc_feature: MA Experiment 20000328 PARAMETER Experiment Name: At_42deg_Heat_Sub_P Parameter: Temperature (deg C) Value: 42 vs. 22
  misc_feature: MA Experiment 20000328 PARAMETER Experiment Name: At_42deg_Heat_Sub_P Parameter: Timepoint (hr) Value: 6
  misc_feature: MA Experiment 20000328 PARAMETER Experiment Name: At_42deg_Heat_Sub_P Parameter: Tissue Value: Aerial
gtctctgtctttgtgtctgcgtttttgtctcaccatgttgtgttcctaatctgacgcttcttcttcatgttcttcatttcaagcttcgttgagatcgagcttttttgtttcaattgtggtttgttgcattttcgctgactcacaaatagggcttcttgtttgatttcgtatttcccccaattttggtgtacatttggggttttcctctgatttcagatctattaggttttgtgttctactctgaaatgatcatgtgtgagaagcagtatcagtcactagatgcatgacatttgaaagttggagtggaacttgttcttagcgcgtattgaactgtctggtcgcttgtacataaagcttgtaactaaaaatatctggtctgaggggtaagctaaaggggagagaaatggagactgccaaagcttggctgagtaagttaaaatctaaagacaaggtgaaatcttcgaaaaagaaggaagccacaagtaatgtaaaggaaggaccgaaaacagctggaggtgaagaagcactttcaaatataactaaggagaaggctgctgctgcaaaactgtatattgaaaaccattacaaaatgcaaatgcagagtctgcaggaaagaaaggagcgacgcaaaatgctagagaaaaaattagctgctgcagaagtctctgaggaagagcaaaataacttgctaaaggatttggagatgaaggaaactgaatatatgcgccgtcagaggcataaaatgggagctgatgactttgagccattgacaatgattgggaagggtgcattcggagaggttaggatctgtagggagaagggaacaggcaatgtctatgcaatgaagaagcttaagaaatctgagatgcttcgcagaggccaggtggaacatgtaaaagcagagagaaatttacttgcagaagttgatagcaattgcattgtcaaactgtattgttctttccaagatgaagagtacttgtatctcataatggagtatttacctggtggggatatgatgactttacttatgaggaaagacaccctcactgaagacgaggccaggttttatattggggaaactgtcctggctattgagtccattcataagcacaactacattcacagagatatcaagcctgataatctgctacttgacaaagacggccacatgaaattgtcagattttggattatgtaaaccattagactgtagtaatcttcaagagaaagactttacagttgcaagaaacgttagtggggctttacaaagtgatggtcgccctgtggcgacaagacgcacccaacaagagcaattactaaactggcagagaaatagaaggatgcttgcttattccacagttggcactcctgactatattgccccagaagttctgttgaaaaaaggatatggaatggaatgtgattggtggtctcttggcgccattatgtatgaaatgcttgtggggtttccgcccttttattcagatgacccaatgacaacttgtaggaagatagtaaattggagaaattacttgaaattcccagatgaggttagactatcaccagaagccaaggatcttatttgtaggcttttatgcaatgttgaacaaaggcttggaacaaaaggagcagatgaaattaagggtcacccttggtttagaggcacagaatggggaaaattgtatcaaatgaaagctgcctttattccccaagttaatgatgagttggacacccaaaattttgagaaatttgaagagactgacaagcaagttccaaagtcagccaagtcaggtccatggagaaagatgctctcatccaaagacattaactttgttggttatacttacaagaacgtagaaatcgtaaatgatgaccaaataccagggatagctgagttgaagaagaagagcaataagccaaaaaggccgtctattaaatctctctttgaagacgaaacatctggtgggacaacaacccaccaaggaagctttttgaatctactaccgacgcagattgaagatccagagaaagaaggtagtaagtcgagctcatccgggtgaatttcatttgacacattgcacagcctgaaccagaagactcttgttatattaacatgtgtgttgttgatttcgttgaaagccttttgctttctctaaacgactgttaaaagttggagttagcaggggtttttcaacaaagtacagtctctccagtggaagcgaaggctctcccagaggagaaagatggatttgtttaattgttttcaacatagaaaagtgaaaaagtaaatattcttttcggaattggcttgtttatttattttcacagggagagaaggtgagctttggtatttgatttttttttttttggttaatcaaaacttggttgtactactaaacctcaagatgaaatcttcaccctct

SEQ ID NO: 85425 - protein, 551 aa, Arabidopsis thaliana
  peptide (1)..(551): Ceres Seq. ID no. 12680336
  misc_feature (119)..(418): Pfam Name: Protein kinase domain Pfam Description: Protein kinase domain
  misc_feature (1)..(551): Homolog of NCBI NO: 30682806 NR Description: protein kinase [Arabidopsis thaliana] protein kinase [Arabidopsis thaliana] >gi|22135803|gb|AAM91088.1| [Arabidopsis thaliana] >gi|23308449|gb|AAN18194.1|
  misc_feature (1)..(551): Homolog of NCBI NO: 22331282 NR Description: putative protein kinase; protein id: At3g23310.1, by cDNA: gi_20465360 [Arabidopsis thaliana] protein kinase [Arabidopsis thaliana] >gi|17381026|gb|AAL36325.1|
  misc_feature (77)..(551): Homolog of NCBI NO: 25287694 NR Description: protein kinase [imported] - Arabidopsis thaliana protein kinase [Arabidopsis thaliana] >gi|7268140|emb|CAB78477.1|
  misc_feature (77)..(514): Homolog of NCBI NO: 7446413 NR Description: probable protein kinase - Arabidopsis thaliana
  misc_feature (1)..(538): Homolog of NCBI NO: 7339534 NR Description: protein kinase MK6 [Mesembryanthemum crystallinum]
  misc_feature (1)..(518): Homolog of NCBI NO: 1076632 NR Description: protein kinase PKTL7 (EC 2.7.1.-) - common
  misc_feature (1)..(514): Homolog of NCBI NO: 37535354 NR Description: putative protein kinase [Oryza sativa (japonica group)] >gi|13129502|gb|AAK13156.1| putative protein kinase
  misc_feature (80)..(538): Homolog of NCBI NO: 541816 NR Description: protein kinase (EC 2.7.1.-) - common ice plant
  misc_feature (26)..(531): Homolog of NCBI NO: 15219591 NR Description: putative protein kinase; protein id: At1g03920.1,
  misc_feature (26)..(538): Homolog of NCBI NO: 25287691 NR Description: hypothetical protein [imported] - Arabidopsis >gi|4204296|gb|AAD10677.1| putative protien kinase [Arabidopsis
METAKAWLSKLKSKDKVKSSKKKEATSNVKEGPKTAGGEEALSNITKEKAAAAKLYIENHYKMQMQSLQERKERRKMLEKKLAAAEVSEEEQNNLLKDLEMKETEYMRRQRHKMGADDFEPLTMIGKGAFGEVRICREKGTGNVYAMKKLKKSEMLRRGQVEHVKAERNLLAEVDSNCIVKLYCSFQDEEYLYLIMEYLPGGDMMTLLMRKDTLTEDEARFYIGETVLAIESIHKHNYIHRDIKPDNLLLDKDGHMKLSDFGLCKPLDCSNLQEKDFTVARNVSGALQSDGRPVATRRTQQEQLLNWQRNRRMLAYSTVGTPDYIAPEVLLKKGYGMECDWWSLGAIMYEMLVGFPPFYSDDPMTTCRKIVNWRNYLKFPDEVRLSPEAKDLICRLLCNVEQRLGTKGADEIKGHPWFRGTEWGKLYQMKAAFIPQVNDELDTQNFEKFEETDKQVPKSAKSGPWRKMLSSKDINFVGYTYKNVEIVNDDQIPGIAELKKKSNKPKRPSIKSLFEDETSGGTTTHQGSFLNLLPTQIEDPEKEGSKSSSSG

SEQ ID NO: 85426 - protein, 489 aa, Arabidopsis thaliana
  peptide (1)..(489): Ceres Seq. ID no. 12680337
  misc_feature (57)..(356): Pfam Name: Protein kinase domain Pfam Description: Protein kinase domain
  misc_feature (1)..(489): Homolog of NCBI NO: 30682806 NR Description: protein kinase [Arabidopsis thaliana] protein kinase [Arabidopsis thaliana] >gi|22135803|gb|AAM91088.1| [Arabidopsis thaliana] >gi|23308449|gb|AAN18194.1|
  misc_feature (1)..(489): Homolog of NCBI NO: 22331282 NR Description: putative protein kinase; protein id: At3g23310.1, by cDNA: gi_20465360 [Arabidopsis thaliana] protein kinase [Arabidopsis thaliana] >gi|17381026|gb|AAL36325.1|
  misc_feature (15)..(489): Homolog of NCBI NO: 25287694 NR Description: protein kinase [imported] - Arabidopsis thaliana protein kinase [Arabidopsis thaliana] >gi|7268140|emb|CAB78477.1|
  misc_feature (15)..(452): Homolog of NCBI NO: 7446413 NR Description: probable protein kinase - Arabidopsis thaliana
  misc_feature (1)..(476): Homolog of NCBI NO: 7339534 NR Description: protein kinase MK6 [Mesembryanthemum crystallinum]
  misc_feature (1)..(456): Homolog of NCBI NO: 1076632 NR Description: protein kinase PKTL7 (EC 2.7.1.-) - common
  misc_feature (1)..(452): Homolog of NCBI NO: 37535354 NR Description: putative protein kinase [Oryza sativa (japonica group)] >gi|13129502|gb|AAK13156.1| putative protein kinase
  misc_feature (18)..(476): Homolog of NCBI NO: 541816 NR Description: protein kinase (EC 2.7.1.-) - common ice plant
  misc_feature (1)..(469): Homolog of NCBI NO: 15219591 NR Description: putative protein kinase; protein id: At1g03920.1,
  misc_feature (1)..(476): Homolog of NCBI NO: 25287691 NR Description: hypothetical protein [imported] - Arabidopsis >gi|4204296|gb|AAD10677.1| putative protien kinase [Arabidopsis
MQMQSLQERKERRKMLEKKLAAAEVSEEEQNNLLKDLEMKETEYMRRQRHKMGADDFEPLTMIGKGAFGEVRICREKGTGNVYAMKKLKKSEMLRRGQVEHVKAERNLLAEVDSNCIVKLYCSFQDEEYLYLIMEYLPGGDMMTLLMRKDTLTEDEARFYIGETVLAIESIHKHNYIHRDIKPDNLLLDKDGHMKLSDFGLCKPLDCSNLQEKDFTVARNVSGALQSDGRPVATRRTQQEQLLNWQRNRRMLAYSTVGTPDYIAPEVLLKKGYGMECDWWSLGAIMYEMLVGFPPFYSDDPMTTCRKIVNWRNYLKFPDEVRLSPEAKDLICRLLCNVEQRLGTKGADEIKGHPWFRGTEWGKLYQMKAAFIPQVNDELDTQNFEKFEETDKQVPKSAKSGPWRKMLSSKDINFVGYTYKNVEIVNDDQIPGIAELKKKSNKPKRPSIKSLFEDETSGGTTTHQGSFLNLLPTQIEDPEKEGSKSSSSG

SEQ ID NO: 85427 - protein, 487 aa, Arabidopsis thaliana
  peptide (1)..(487): Ceres Seq. ID no. 12680338
  misc_feature (55)..(354): Pfam Name: Protein kinase domain Pfam Description: Protein kinase domain
  misc_feature (1)..(487): Homolog of NCBI NO: 30682806 NR Description: protein kinase [Arabidopsis thaliana] protein kinase [Arabidopsis thaliana] >gi|22135803|gb|AAM91088.1| [Arabidopsis thaliana] >gi|23308449|gb|AAN18194.1|
  misc_feature (1)..(487): Homolog of NCBI NO: 22331282 NR Description: putative protein kinase; protein id: At3g23310.1, by cDNA: gi_20465360 [Arabidopsis thaliana] protein kinase [Arabidopsis thaliana] >gi|17381026|gb|AAL36325.1|
  misc_feature (13)..(487): Homolog of NCBI NO: 25287694 NR Description: protein kinase [imported] - Arabidopsis thaliana protein kinase [Arabidopsis thaliana] >gi|7268140|emb|CAB78477.1|
  misc_feature (13)..(450): Homolog of NCBI NO: 7446413 NR Description: probable protein kinase - Arabidopsis thaliana
  misc_feature (1)..(474): Homolog of NCBI NO: 7339534 NR Description: protein kinase MK6 [Mesembryanthemum crystallinum]
  misc_feature (1)..(454): Homolog of NCBI NO: 1076632 NR Description: protein kinase PKTL7 (EC 2.7.1.-) - common
  misc_feature (1)..(450): Homolog of NCBI NO: 37535354 NR Description: putative protein kinase [Oryza sativa (japonica group)] >gi|13129502|gb|AAK13156.1| putative protein kinase
  misc_feature (16)..(474): Homolog of NCBI NO: 541816 NR Description: protein kinase (EC 2.7.1.-) - common ice plant
  misc_feature (1)..(467): Homolog of NCBI NO: 15219591 NR Description: putative protein kinase; protein id: At1g03920.1,
  misc_feature (1)..(474): Homolog of NCBI NO: 25287691 NR Description: hypothetical protein [imported] - Arabidopsis >gi|4204296|gb|AAD10677.1| putative protien kinase [Arabidopsis
MQSLQERKERRKMLEKKLAAAEVSEEEQNNLLKDLEMKETEYMRRQRHKMGADDFEPLTMIGKGAFGEVRICREKGTGNVYAMKKLKKSEMLRRGQVEHVKAERNLLAEVDSNCIVKLYCSFQDEEYLYLIMEYLPGGDMMTLLMRKDTLTEDEARFYIGETVLAIESIHKHNYIHRDIKPDNLLLDKDGHMKLSDFGLCKPLDCSNLQEKDFTVARNVSGALQSDGRPVATRRTQQEQLLNWQRNRRMLAYSTVGTPDYIAPEVLLKKGYGMECDWWSLGAIMYEMLVGFPPFYSDDPMTTCRKIVNWRNYLKFPDEVRLSPEAKDLICRLLCNVEQRLGTKGADEIKGHPWFRGTEWGKLYQMKAAFIPQVNDELDTQNFEKFEETDKQVPKSAKSGPWRKMLSSKDINFVGYTYKNVEIVNDDQIPGIAELKKKSNKPKRPSIKSLFEDETSGGTTTHQGSFLNLLPTQIEDPEKEGSKSSSSG

SEQ ID NO: 85428 - DNA, 1154 bp, Arabidopsis thaliana
  misc_feature (1)..(1154): Ceres Seq. ID no. 12680339
  misc_feature: MA Experiment ID: 20000234 Result: Down-regulated in Transcription
  misc_feature: MA Experiment 20000234 PARAMETER Experiment Name: At_Siliques_P Parameter: Age (day) Value: 21
  misc_feature: MA Experiment 20000234 PARAMETER Experiment Name: At_Siliques_P Parameter: Organism Value: A. thaliana
  misc_feature: MA Experiment 20000234 PARAMETER Experiment Name: At_Siliques_P Parameter: Plant Line Value: WS
  misc_feature: MA Experiment 20000234 PARAMETER Experiment Name: At_Siliques_P Parameter: Tissue Value: Less Than 5mm Siliques vs. Whole Plant
aatgtatccttctctcgacgatgatttcgtctctgatttgttttgcttcgatcaaagggggaaaggttgtgtcttttgatgataatttgacgaaccctaatgtatctgaaagctgttaaattgaataggagaagaagtagctttatggatgttgttgtttatatttactcctattgatggatgtgaatctttttggtcatgatgactcttgtagcaatggagcagaacttgatgattacacacagtttggtgtaaatttgcagactgatcaagaggatacctttccagattttgtgtcatatggtgtgaatttgcagcaggagccagatgaagtctttagtattggagcttctcaattggatttgtcctcgtataatggagttttgtcgctagagccagaacaggtggggcaacaagattgtgaagttgtgcaggaagaagaagtagagatcaattctggttcatctggtggagctgttaaggaagaacaggaacatttagatgacgattgctccagaaagcgggcaaggactggatcgtgtagcagaggaggaggaactaaagcgtgtcgtgaaaggttgaggagggagaagctaaatgagaggtttatggatttgagctcggttttggagcctgggaggactcctaagactgataaaccggctatactcgatgatgcaatccgtatattgaatcaacttagagatgaagctcttaagcttgaagaaactaaccagaagcttttagaggagatcaagagtctcaaggcggagaagaacgagctgagggaggaaaagctggtgttgaaggcggataaagagaagacagaacaacagttaaagtctatgacggctccatcttcagggttcatacctcatattccagctgcatttaaccacaacaaaatggctgtttatccaagttacggttacatgccaatgtggcattatatgcctcaatccgttcgtgacacatctcgtgatcaagaactcaggcctcctgctgcttaaactctcaattgtttttttttggtacccatagggaactcatagagatttctgaatcacttggtttaggattcttccgtttggcaagtgtaaaagctttactcttgatcttgggttgtatttttcttataaaataaatataactcc

SEQ ID NO: 85429 - protein, 277 aa, Arabidopsis thaliana
  peptide (1)..(277): Ceres Seq. ID no. 12680340
  misc_feature (125)..(176): Pfam Name: Helix-loop-helix DNA-binding domain Pfam Description: Helix-loop-helix DNA-binding domain
  misc_feature (4)..(277): Homolog of NCBI NO: 18414212 NR Description: bHLH protein; protein id: At4g14410.1, supported cDNA: 40736., supported by cDNA: gi_20856628 [Arabidopsis >gi|20856629|gb|AAM26676.1| AT4g14410/dl3245w [Arabidopsis
  misc_feature (1)..(277): Homolog of NCBI NO: 30682847 NR Description: bHLH protein [Arabidopsis thaliana]
  misc_feature (55)..(277): Homolog of NCBI NO: 20127030 NR Description: putative bHLH transcription factor [Arabidopsis
  misc_feature (55)..(277): Homolog of NCBI NO: 22331274 NR Description: bHLH protein; protein id: At3g23210.1, supported cDNA: gi_20466415 [Arabidopsis thaliana] emb|CAB10220.1~gene_id:K14B15.12~similar to unknown protein
  misc_feature (108)..(277): Homolog of NCBI NO: 15223710 NR Description: bHLH protein; protein id: At1g51070.1, supported cDNA: 16284., supported by cDNA: gi_20127114 [Arabidopsis
  misc_feature (87)..(277): Homolog of NCBI NO: 15239706 NR Description: bHLH protein; protein id: At5g54680.1, supported cDNA: 22343., supported by cDNA: gi_15451009, supported by cDNA: [Arabidopsis thaliana] >gi|10176795|dbj|BAB09934.1| thaliana]
  misc_feature (87)..(277): Homolog of NCBI NO: 21592325 NR Description: bHLH transcription factor, putative [Arabidopsis
  misc_feature (108)..(262): Homolog of NCBI NO: 29367409 NR Description: helix-loop-helix-like protein [Oryza sativa
  misc_feature (108)..(262): Homolog of NCBI NO: 38636768 NR Description: helix-loop-helix-like protein [Oryza sativa
  misc_feature (129)..(260): Homolog of NCBI NO: 15230975 NR Description: bHLH protein; protein id: At3g19860.1, supported cDNA: gi_17473643, supported by cDNA: gi_20148748 [Arabidopsis >gi|17473644|gb|AAL38283.1| unknown protein [Arabidopsis
MDVNLFGHDDSCSNGAELDDYTQFGVNLQTDQEDTFPDFVSYGVNLQQEPDEVFSIGASQLDLSSYNGVLSLEPEQVGQQDCEVVQEEEVEINSGSSGGAVKEEQEHLDDDCSRKRARTGSCSRGGGTKACRERLRREKLNERFMDLSSVLEPGRTPKTDKPAILDDAIRILNQLRDEALKLEETNQKLLEEIKSLKAEKNELREEKLVLKADKEKTEQQLKSMTAPSSGFIPHIPAAFNHNKMAVYPSYGYMPMWHYMPQSVRDTSRDQELRPPAA

SEQ ID NO: 85430 - DNA, 1309 bp, Arabidopsis thaliana
  misc_feature (1)..(1309): Ceres Seq. ID no. 12680341
  misc_feature: MA Experiment ID: 108462 Result: Down-regulated in Transcription
  misc_feature: MA Experiment 108462 PARAMETER Experiment Name: At_Germinating_Seeds_cDNA_P Parameter: Age (day) Value: 2 vs. 0
  misc_feature: MA Experiment 108462 PARAMETER Experiment Name: At_Germinating_Seeds_cDNA_P Parameter: Tissue Value: Germinating Seeds
  misc_feature: MA Experiment ID: 108463 Result: Down-regulated in Transcription
  misc_feature: MA Experiment 108463 PARAMETER Experiment Name: At_Germinating_Seeds_cDNA_P Parameter: Age (day) Value: 3 vs. 0
  misc_feature: MA Experiment 108463 PARAMETER Experiment Name: At_Germinating_Seeds_cDNA_P Parameter: Tissue Value: Germinating Seeds
  misc_feature: MA Experiment ID: 108464 Result: Down-regulated in Transcription
  misc_feature: MA Experiment 108464 PARAMETER Experiment Name: At_Germinating_Seeds_cDNA_P Parameter: Age (day) Value: 4 vs. 0
  misc_feature: MA Experiment 108464 PARAMETER Experiment Name: At_Germinating_Seeds_cDNA_P Parameter: Tissue Value: Germinating Seeds
  misc_feature: MA Experiment ID: 20000113 Result: Up-regulated in Transcription
  misc_feature: MA Experiment 20000113 PARAMETER Experiment Name: At_42deg_Heat_cDNA_P Parameter: Temperature (deg C) Value: 42 vs. 22
  misc_feature: MA Experiment 20000113 PARAMETER Experiment Name: At_42deg_Heat_cDNA_P Parameter: Timepoint (hr) Value: 8
  misc_feature: MA Experiment 20000113 PARAMETER Experiment Name: At_42deg_Heat_cDNA_P Parameter: Tissue Value: Aerial
  misc_feature: MA Experiment ID: 20000179 Result: Down-regulated in Transcription
  misc_feature: MA Experiment 20000179 PARAMETER Experiment Name: At_Germinating_Seeds_P Parameter: Age (hr) Value: 6 vs. 0
  misc_feature: MA Experiment 20000179 PARAMETER Experiment Name: At_Germinating_Seeds_P Parameter: Tissue Value: Germinating Seeds
  misc_feature: MA Experiment ID: 20000180 Result: Down-regulated in Transcription
  misc_feature: MA Experiment 20000180 PARAMETER Experiment Name: At_Germinating_Seeds_P Parameter: Age (hr) Value: 24 vs. 0
  misc_feature: MA Experiment 20000180 PARAMETER Experiment Name: At_Germinating_Seeds_P Parameter: Tissue Value: Germinating Seeds
  misc_feature: MA Experiment ID: 20000184 Result: Up-regulated in Transcription
  misc_feature: MA Experiment 20000184 PARAMETER Experiment Name: At_Shoots__P Parameter: Age (day) Value: 7
  misc_feature: MA Experiment 20000184 PARAMETER Experiment Name: At_Shoots__P Parameter: Tissue Value: Shoots vs. Whole Plant
  misc_feature: MA Experiment ID: 20000185 Result: Up-regulated in Transcription
  misc_feature: MA Experiment 20000185 PARAMETER Experiment Name: At_Roots__P Parameter: Age (day) Value: 7 vs. 21
  misc_feature: MA Experiment 20000185 PARAMETER Experiment Name: At_Roots__P Parameter: Organism Value: A. thaliana
  misc_feature: MA Experiment 20000185 PARAMETER Experiment Name: At_Roots__P Parameter: Tissue Value: Roots vs. Whole Plant
  misc_feature: MA Experiment ID: 20000227 Result: Down-regulated in Transcription
  misc_feature: MA Experiment 20000227 PARAMETER Experiment Name: At_Root-Tips-vs-Tops_P Parameter: Tissue Value: Root Tips vs. Root Tops
  misc_feature: MA Experiment ID: 20000286 Result: Down-regulated in Transcription
  misc_feature: MA Experiment 20000286 PARAMETER Experiment Name: At_Open_Flower_P Parameter: Age (day) Value: 21
  misc_feature: MA Experiment 20000286 PARAMETER Experiment Name: At_Open_Flower_P Parameter: Plant Line Value: WS
  misc_feature: MA Experiment 20000286 PARAMETER Experiment Name: At_Open_Flower_P Parameter: Tissue Value: Half Open vs. Whole Plant
  misc_feature: MA Experiment ID: 20000437 Result: Down-regulated in Transcription
  misc_feature: MA Experiment 20000437 PARAMETER Experiment Name: At_Drought_P Parameter: Age (day) Value: 8
  misc_feature: MA Experiment 20000437 PARAMETER Experiment Name: At_Drought_P Parameter: Organism Value: A. thaliana
  misc_feature: MA Experiment 20000437 PARAMETER Experiment Name: At_Drought_P Parameter: Plant Line Value: WS
  misc_feature: MA Experiment 20000437 PARAMETER Experiment Name: At_Drought_P Parameter: Timepoint (hr) Value: 24
  misc_feature: MA Experiment 20000437 PARAMETER Experiment Name: At_Drought_P Parameter: Tissue Value: Whole Plant
  misc_feature: MA Experiment 20000437 PARAMETER Experiment Name: At_Drought_P Parameter: Treatment Value: Drought vs. No Drought
  misc_feature: MA Experiment ID: 20000438 Result: Up-regulated in Transcription
  misc_feature: MA Experiment 20000438 PARAMETER Experiment Name: At_Shoots__P Parameter: Age (day) Value: 14
  misc_feature: MA Experiment 20000438 PARAMETER Experiment Name: At_Shoots__P Parameter: Tissue Value: Shoots vs. Whole Plant
  misc_feature: MA Experiment ID: 20000439 Result: Up-regulated in Transcription
  misc_feature: MA Experiment 20000439 PARAMETER Experiment Name: At_Roots__P Parameter: Age (day) Value: 14 vs. 21
  misc_feature: MA Experiment 20000439 PARAMETER Experiment Name: At_Roots__P Parameter: Organism Value: A. thaliana
  misc_feature: MA Experiment 20000439 PARAMETER Experiment Name: At_Roots__P Parameter: Tissue Value: Roots vs. Whole Plant
  misc_feature: MA Experiment ID: 20000527 Result: Down-regulated in Transcription
  misc_feature: MA Experiment 20000527 PARAMETER Experiment Name: At_10percent_PEG_P Parameter: Age (day) Value: 20
  misc_feature: MA Experiment 20000527 PARAMETER Experiment Name: At_10percent_PEG_P Parameter: Organism Value: A. thaliana
  misc_feature: MA Experiment 20000527 PARAMETER Experiment Name: At_10percent_PEG_P Parameter: Plant Line Value: WS
  misc_feature: MA Experiment 20000527 PARAMETER Experiment Name: At_10percent_PEG_P Parameter: Timepoint (day) Value: 20
  misc_feature: MA Experiment 20000527 PARAMETER Experiment Name: At_10percent_PEG_P Parameter: Tissue Value: Whole Plant
  misc_feature: MA Experiment 20000527 PARAMETER Experiment Name: At_10percent_PEG_P Parameter: Treatment Value: 10percent PEG vs. No Treatment
  misc_feature: MA Experiment ID: 20000573 Result: Down-regulated in Transcription
  misc_feature: MA Experiment 20000573 PARAMETER Experiment Name: At_100uM_ABA_Mutants__P Parameter: Organism Value: A. thaliana
  misc_feature: MA Experiment 20000573 PARAMETER Experiment Name: At_100uM_ABA_Mutants__P Parameter: Plant Line Value: CS22 vs. Ler wt
  misc_feature: MA Experiment 20000573 PARAMETER Experiment Name: At_100uM_ABA_Mutants__P Parameter: Timepoint (hr) Value: N/A
  misc_feature: MA Experiment 20000573 PARAMETER Experiment Name: At_100uM_ABA_Mutants__P Parameter: Tissue Value: Whole Plant
  misc_feature: MA Experiment 20000573 PARAMETER Experiment Name: At_100uM_ABA_Mutants__P Parameter: Treatment Value: None
  misc_feature: MA Experiment ID: 20001247 Result: Up-regulated in Transcription
  misc_feature: MA Experiment 20001247 PARAMETER Experiment Name: At_Far-red-induction_P Parameter: Age (day) Value: 7
  misc_feature: MA Experiment 20001247 PARAMETER Experiment Name: At_Far-red-induction_P Parameter: Light Value: Far-red vs. White
  misc_feature: MA Experiment 20001247 PARAMETER Experiment Name: At_Far-red-induction_P Parameter: Organism Value: A. thaliana
  misc_feature: MA Experiment 20001247 PARAMETER Experiment Name: At_Far-red-induction_P Parameter: Plant Line Value: Columbia
  misc_feature: MA Experiment 20001247 PARAMETER Experiment Name: At_Far-red-induction_P Parameter: Timepoint (hr) Value: 1
  misc_feature: MA Experiment 20001247 PARAMETER Experiment Name: At_Far-red-induction_P Parameter: Tissue Value: Whole Plant
  misc_feature: MA Experiment ID: 20001556 Result: Down-regulated in Transcription
  misc_feature: MA Experiment 20001556 PARAMETER Experiment Name: At_Drought_Soil_Dry_P Parameter: Age (day) Value: 26
  misc_feature: MA Experiment 20001556 PARAMETER Experiment Name: At_Drought_Soil_Dry_P Parameter: Organism Value: A. thaliana
  misc_feature: MA Experiment 20001556 PARAMETER Experiment Name: At_Drought_Soil_Dry_P Parameter: Plant Line Value: WS
  misc_feature: MA Experiment 20001556 PARAMETER Experiment Name: At_Drought_Soil_Dry_P Parameter: Post Timepoint (hr) Value: None
  misc_feature: MA Experiment 20001556 PARAMETER Experiment Name: At_Drought_Soil_Dry_P Parameter: Post-Treatment Value: None
  misc_feature: MA Experiment 20001556 PARAMETER Experiment Name: At_Drought_Soil_Dry_P Parameter: Timepoint (day) Value: 12
  misc_feature: MA Experiment 20001556 PARAMETER Experiment Name: At_Drought_Soil_Dry_P Parameter: Treatment Value: Drought vs. No Drought
  misc_feature: MA Experiment ID: 20001757 Result: Up-regulated in Transcription
  misc_feature: MA Experiment 20001757 PARAMETER Experiment Name: At_50mM_NH4NO3_L-to-H_P Parameter: Timepoint (hr) Value: 6
  misc_feature: MA Experiment 20001757 PARAMETER Experiment Name: At_50mM_NH4NO3_L-to-H_P Parameter: Tissue Value: Leaf
  misc_feature: MA Experiment 20001757 PARAMETER Experiment Name: At_50mM_NH4NO3_L-to-H_P Parameter: Treatment Value: 50mM NH4NO3 vs 100mM Mannitol
agagaaatcgaaacgaaaagataatatttttcaagaaagagctacatatacaccttttgaccttgtaaagttggaaccctagaggcctttcaagcaaatcatcagggtaacaatttcttgatctttctttttagcgaatttccagtttttggtcaatcatggcaaacccttggtggacgaaccagagtggtttagcgggcatggtggaccattcggtctcctcaggccatcaccaaaaccatcaccaccaaagtcttcttaccaaaggagatcttggaatagccatgaatcagagccaagacaacgaccaagacgaagaagatgatcctagagaaggagccgttgaggtggtcaaccgtagaccaagaggtagaccaccaggatccaaaaacaaacccaaagctccaatctttgtgacaagagacagccccaacgcactccgtagccatgtcttggagatctccgacggcagtgacgtcgccgacacaatcgctcacttctcaagacgcaggcaacgcggcgtttgcgttctcagcgggacaggctcagtcgctaacgtcaccctccgccaagccgccgcaccaggaggtgtggtctctctccaaggcaggtttgaaatcttatctttaaccggtgctttcctccctggaccttccccacccgggtcaaccggtttaacggtttacttagccggggtccagggtcaggtcgttggaggtagcgttgtaggcccactcttagccatagggtcggtcatggtgattgctgctactttctctaacgctacttatgagagattgcccatggaagaagaggaagacggtggcggctcaagacagattcacggaggcggtgactcaccgcccagaatcggtagtaacctgcctgatctatcagggatggccgggccaggctacaatatgccgccgcatctgattccaaatggggctggtcagctagggcacgaaccatatacatgggtccacgcaagaccaccttactgactcagtgagccatttctatatataatggtctatataaataaatatatagatgaatataagcaagcaatttgaggtagtctattacaaagcttttgctctggttggaaaaataaataagtatcaaagctttgtttgttcttaatggaaatatagagcttgggaaggtagaaagagacgacattaagggactttcagattttcagtattactactccacgaaattattgaaataaataaacattgtactgtaaattagaatgtttgtctttttgtttttgtgtagtagtatttaactacaatatttg

SEQ ID NO: 85431 - protein, 281 aa, Arabidopsis thaliana; identical to SEQ ID NO: 23662
  peptide (1)..(281): Ceres Seq. ID no. 12680342
  misc_feature (1)..(281): Homolog of NCBI NO: 18414224 NR Description: Expressed protein; protein id: At4g14465.1, by cDNA: 36844. [Arabidopsis thaliana]
  misc_feature (1)..(281): Homolog of NCBI NO: 21593180 NR Description: putative DNA-binding protein [Arabidopsis
  misc_feature (19)..(278): Homolog of NCBI NO: 18396925 NR Description: expressed protein; protein id: At3g04570.1, by cDNA: 15781. [Arabidopsis thaliana] hypothetical protein [Arabidopsis thaliana]
  misc_feature (60)..(281): Homolog of NCBI NO: 15234404 NR Description: putative DNA-binding protein; protein id:
  misc_feature (60)..(281): Homolog of NCBI NO: 15235815 NR Description: putative DNA binding protein; protein id:
  misc_feature (60)..(281): Homolog of NCBI NO: 38346718 NR Description: OSJNBa0086O06.16 [Oryza sativa (japonica
  misc_feature (44)..(280): Homolog of NCBI NO: 15233302 NR Description: putative protein; protein id: At3g55560.1, by cDNA: 207314. [Arabidopsis thaliana] >gi|11281679|pir||T47695
  misc_feature (60)..(262): Homolog of NCBI NO: 15236657 NR Description: hypothetical protein; protein id: At4g17800.1, by cDNA: gi_17933298, supported by cDNA: gi_20453386 [Arabidopsis
  misc_feature (49)..(280): Homolog of NCBI NO: 34902080 NR Description: unknown protein [Oryza sativa (japonica >gi|34902088|ref|NP_912390.1| hypothetical protein [Oryza sativa
  misc_feature (17)..(281): Homolog of NCBI NO: 15226945 NR Description: putative AT-hook DNA-binding protein; protein id:

SEQ ID NO: 85432 - protein, 267 aa, Arabidopsis thaliana; identical to SEQ ID NO: 23663
  peptide (1)..(267): Ceres Seq. ID no. 12680343
  misc_feature (1)..(267): Homolog of NCBI NO: 18414224 NR Description: Expressed protein; protein id: At4g14465.1, by cDNA: 36844. [Arabidopsis thaliana]
  misc_feature (1)..(267): Homolog of NCBI NO: 21593180 NR Description: putative DNA-binding protein [Arabidopsis
  misc_feature (5)..(264): Homolog of NCBI NO: 18396925 NR Description: expressed protein; protein id: At3g04570.1, by cDNA: 15781. [Arabidopsis thaliana] hypothetical protein [Arabidopsis thaliana]
  misc_feature (46)..(267): Homolog of NCBI NO: 15234404 NR Description: putative DNA-binding protein; protein id:
  misc_feature (46)..(267): Homolog of NCBI NO: 15235815 NR Description: putative DNA binding protein; protein id:
  misc_feature (46)..(267): Homolog of NCBI NO: 38346718 NR Description: OSJNBa0086O06.16 [Oryza sativa (japonica
  misc_feature (30)..(266): Homolog of NCBI NO: 15233302 NR Description: putative protein; protein id: At3g55560.1, by cDNA: 207314. [Arabidopsis thaliana] >gi|11281679|pir||T47695
  misc_feature (46)..(248): Homolog of NCBI NO: 15236657 NR Description: hypothetical protein; protein id: At4g17800.1, by cDNA: gi_17933298, supported by cDNA: gi_20453386 [Arabidopsis
  misc_feature (35)..(266): Homolog of NCBI NO: 34902080 NR Description: unknown protein [Oryza sativa (japonica >gi|34902088|ref|NP_912390.1| hypothetical protein [Oryza sativa
  misc_feature (3)..(267): Homolog of NCBI NO: 15226945 NR Description: putative AT-hook DNA-binding protein; protein id:

SEQ ID NO: 85433 - protein, 239 aa, Arabidopsis thaliana; identical to SEQ ID NO: 23664
  peptide (1)..(239): Ceres Seq. ID no. 12680344
  misc_feature (1)..(239): Homolog of NCBI NO: 18414224 NR Description: Expressed protein; protein id: At4g14465.1, by cDNA: 36844. [Arabidopsis thaliana]
  misc_feature (1)..(239): Homolog of NCBI NO: 21593180 NR Description: putative DNA-binding protein [Arabidopsis
  misc_feature (1)..(236): Homolog of NCBI NO: 18396925 NR Description: expressed protein; protein id: At3g04570.1, by cDNA: 15781. [Arabidopsis thaliana] hypothetical protein [Arabidopsis thaliana]
  misc_feature (18)..(239): Homolog of NCBI NO: 15234404 NR Description: putative DNA-binding protein; protein id:
  misc_feature (18)..(239): Homolog of NCBI NO: 15235815 NR Description: putative DNA binding protein; protein id:
  misc_feature (18)..(239): Homolog of NCBI NO: 38346718 NR Description: OSJNBa0086O06.16 [Oryza sativa (japonica
  misc_feature (2)..(238): Homolog of NCBI NO: 15233302 NR Description: putative protein; protein id: At3g55560.1, by cDNA: 207314. [Arabidopsis thaliana] >gi|11281679|pir||T47695
  misc_feature (18)..(220): Homolog of NCBI NO: 15236657 NR Description: hypothetical protein; protein id: At4g17800.1, by cDNA: gi_17933298, supported by cDNA: gi_20453386 [Arabidopsis
  misc_feature (7)..(238): Homolog of NCBI NO: 34902080 NR Description: unknown protein [Oryza sativa (japonica >gi|34902088|ref|NP_912390.1| hypothetical protein [Oryza sativa
  misc_feature (1)..(239): Homolog of NCBI NO: 15226945 NR Description: putative AT-hook DNA-binding protein; protein id:

SEQ ID NO: 85434 - DNA, 1000 bp, Arabidopsis thaliana
  misc_feature (1)..(1000): Ceres Seq. ID no. 12680379
  misc_feature: MA Experiment ID: 108434 Result: Up-regulated in Transcription
  misc_feature: MA Experiment 108434 PARAMETER Experiment Name: At_Root_Tips_cDNA_P Parameter: Tissue Value: Root Tips
  misc_feature: MA Experiment ID: 108435 Result: Up-regulated in Transcription
  misc_feature: MA Experiment 108435 PARAMETER Experiment Name: At_stm_Mutants_cDNA_P Parameter: Plant Line Value: wt Landsburg vs stm
  misc_feature: MA Experiment 108435 PARAMETER Experiment Name: At_stm_Mutants_cDNA_P Parameter: Tissue Value: Shoot Apical Meristem Region
  misc_feature: MA Experiment ID: 108461 Result: Down-regulated in Transcription
  misc_feature: MA Experiment 108461 PARAMETER Experiment Name: At_Germinating_Seeds_cDNA_P Parameter: Age (day) Value: 1 vs. 0
  misc_feature: MA Experiment 108461 PARAMETER Experiment Name: At_Germinating_Seeds_cDNA_P Parameter: Tissue Value: Germinating Seeds
  misc_feature: MA Experiment ID: 108462 Result: Down-regulated in Transcription
  misc_feature: MA Experiment 108462 PARAMETER Experiment Name: At_Germinating_Seeds_cDNA_P Parameter: Age (day) Value: 2 vs. 0
  misc_feature: MA Experiment 108462 PARAMETER Experiment Name: At_Germinating_Seeds_cDNA_P Parameter: Tissue Value: Germinating Seeds
  misc_feature: MA Experiment ID: 108463 Result: Down-regulated in Transcription
  misc_feature: MA Experiment 108463 PARAMETER Experiment Name: At_Germinating_Seeds_cDNA_P Parameter: Age (day) Value: 3 vs. 0
  misc_feature: MA Experiment 108463 PARAMETER Experiment Name: At_Germinating_Seeds_cDNA_P Parameter: Tissue Value: Germinating Seeds
  misc_feature: MA Experiment ID: 108569 Result: Up-regulated in Transcription
  misc_feature: MA Experiment 108569 PARAMETER Experiment Name: At_0.001%_MeJA__cDNA_P Parameter: Timepoint (hr) Value: 6
  misc_feature: MA Experiment 108569 PARAMETER Experiment Name: At_0.001%_MeJA__cDNA_P Parameter: Tissue Value: Aerial
  misc_feature: MA Experiment 108569 PARAMETER Experiment Name: At_0.001%_MeJA__cDNA_P Parameter: Treatment Value: 0.001% MeJA vs. No Treatment
  misc_feature: MA Experiment ID: 108579 Result: Up-regulated in Transcription
  misc_feature: MA Experiment 108579 PARAMETER Experiment Name: At_4deg_Cold_cDNA_P Parameter: Temperature (deg C) Value: 4 vs. 22
  misc_feature: MA Experiment 108579 PARAMETER Experiment Name: At_4deg_Cold_cDNA_P Parameter: Timepoint (hr) Value: 6
  misc_feature: MA Experiment 108579 PARAMETER Experiment Name: At_4deg_Cold_cDNA_P Parameter: Tissue Value: Aerial
  misc_feature: MA Experiment ID: 108595 Result: Up-regulated in Transcription
  misc_feature: MA Experiment 108595 PARAMETER Experiment Name: At_Ler-pi_Ovule_cDNA_P Parameter: Plant Line Value: null
aatcaagcaccaagttctcagcgaaatcaaggaatcgaaaacccagaagaggactcagtgaacaaatttcttcagctgtttcaaaatgtctcggaggtatgatagtcgcaccacgatcttctcaccggaaggtcgtctctaccaggttgaatatgctatggaagctattggcaatgctggttctgccattggaattcttggcaaaagacggagtggtgttggttggtgagaagaaagtcacttctaaacttcttcaaacctcttcatccatggagaaaatgtacaagatcgatgaccatgtggcttgtgcagttgctggtataatgtctgatgccaacattctgattaacactgctcgagttcaagctcagcgttacacctttatgtaccaagagccaatgcccgtttagcagctggttcagtctctttgtgacaccaagcaaggatacacccagtttggtggtctccgcccgtttggagtttcctttctttttgcaggctgggacaggaaccacgggtttcagctgtatatgagtgacccaagtggaaactatggtggatggcaagctgcagctgttggagcaaataatcaagcggctcagtctattcttaagcaagactataaggatgatgcaacgagggaagaagtggttcagctcgctatcaaggttttgagcaagacgatgacagcacgacttgacagctgaaaaactcgagcttgctgagttgtatctgactccttcaaaatgtgttaagtaccatgttcactcgcctgactcgctcactaagctcttggttaagcatggtgtgactcaaccagccgcagaaacttcctaagctagaaactggtgacagttttacctgacccgcctggttactgtagatgtccatttgctttctttccctttggagatatcgtatcagaatcaatttaccactctgattatgtcatgtgattcatttgggttgactatcttttatcttgagattgatcttcttc

SEQ ID NO: 85435 - protein, 135 aa, Arabidopsis thaliana
  peptide (1)..(135): Ceres Seq. ID no. 12680380
  misc_feature (66)..(135): Pfam Name: Proteasome A-type and B-type Pfam Description: Proteasome A-type and B-type
  misc_feature (66)..(135): Homolog of NCBI NO: 15233268 NR Description: 20S proteasome alpha subunit C (PAC1); protein At3g22110.1, supported by cDNA: 19620., supported by cDNA: supported by cDNA: gi_3421076 [Arabidopsis thaliana]
  misc_feature (66)..(135): Homolog of NCBI NO: 2511584 NR Description: multicatalytic endopeptidase [Arabidopsis
  misc_feature (66)..(135): Homolog of NCBI NO: 1709761 NR Description: Proteasome subunit alpha type 4 (20S proteasome
  misc_feature (66)..(135): Homolog of NCBI NO: 6984140 NR Description: proteasome 27 kDa subunit [Euphorbia esula]
  misc_feature (67)..(135): Homolog of NCBI NO: 12229904 NR Description: Proteasome subunit alpha type 4 (20S proteasome
  misc_feature (63)..(135): Homolog of NCBI NO: 34898416 NR Description: ESTs AU058081(E30812),AU058365(E50679), correspond to a region of the predicted gene.~Similar to Spinacia
  misc_feature (63)..(135): Homolog of NCBI NO: 34898458 NR Description: ESTs AU058081(E3082),AU075427(E30384) correspond a region of the predicted gene.~Similar to Spinacia oleracea
  misc_feature (66)..(135): Homolog of NCBI NO: 14594915 NR Description: putative alpha3 proteasome subunit [Nicotiana
  misc_feature (66)..(135): Homolog of NCBI NO: 464458 NR Description: Proteasome subunit alpha type 4 (Proteasome
  misc_feature (87)..(135): Homolog of NCBI NO: 14039743 NR Description: 20S proteasome subunit alpha 3 [Lolium perenne]
SSTKFSAKSRNRKPRRGLSEQISSAVSKCLGGMIVAPRSSHRKVVSTRLNMLWKLLAMLVLPLEFLAKDGVVLVGEKKVTSKLLQTSSSMEKMYKIDDHVACAVAGIMSDANILINTARVQAQRYTFMYQEPMPV

SEQ ID NO: 85436 - protein, 103 aa, Arabidopsis thaliana
  peptide (1)..(103): Ceres Seq. ID no. 12680381
  misc_feature (34)..(103): Pfam Name: Proteasome A-type and B-type Pfam Description: Proteasome A-type and B-type
  misc_feature (34)..(103): Homolog of NCBI NO: 15233268 NR Description: 20S proteasome alpha subunit C (PAC1); protein At3g22110.1, supported by cDNA: 19620., supported by cDNA: supported by cDNA: gi_3421076 [Arabidopsis thaliana]
  misc_feature (34)..(103): Homolog of NCBI NO: 2511584 NR Description: multicatalytic endopeptidase [Arabidopsis
  misc_feature (34)..(103): Homolog of NCBI NO: 1709761 NR Description: Proteasome subunit alpha type 4 (20S proteasome
  misc_feature (34)..(103): Homolog of NCBI NO: 6984140 NR Description: proteasome 27 kDa subunit [Euphorbia esula]
  misc_feature (35)..(103): Homolog of NCBI NO: 12229904 NR Description: Proteasome subunit alpha type 4 (20S proteasome
  misc_feature (31)..(103): Homolog of NCBI NO: 34898416 NR Description: ESTs AU058081(E30812),AU058365(E50679), correspond to a region of the predicted gene.~Similar to Spinacia
  misc_feature (31)..(103): Homolog of NCBI NO: 34898458 NR Description: ESTs AU058081(E3082),AU075427(E30384) correspond a region of the predicted gene.~Similar to Spinacia oleracea
  misc_feature (34)..(103): Homolog of NCBI NO: 14594915 NR Description: putative alpha3 proteasome subunit [Nicotiana
  misc_feature (34)..(103): Homolog of NCBI NO: 464458 NR Description: Proteasome subunit alpha type 4 (Proteasome
  misc_feature (55)..(103): Homolog of NCBI NO: 14039743 NR Description: 20S proteasome subunit alpha 3 [Lolium perenne]
MIVAPRSSHRKVVSTRLNMLWKLLAMLVLPLEFLAKDGVVLVGEKKVTSKLLQTSSSMEKMYKIDDHVACAVAGIMSDANILINTARVQAQRYTFMYQEPMPV

SEQ ID NO: 85437 - protein, 85 aa, Arabidopsis thaliana
  peptide (1)..(85): Ceres Seq. ID no. 12680382
  misc_feature (16)..(85): Pfam Name: Proteasome A-type and B-type Pfam Description: Proteasome A-type and B-type
  misc_feature (16)..(85): Homolog of NCBI NO: 15233268 NR Description: 20S proteasome alpha subunit C (PAC1); protein At3g22110.1, supported by cDNA: 19620., supported by cDNA: supported by cDNA: gi_3421076 [Arabidopsis thaliana]
  misc_feature (16)..(85): Homolog of NCBI NO: 2511584 NR Description: multicatalytic endopeptidase [Arabidopsis
  misc_feature (16)..(85): Homolog of NCBI NO: 1709761 NR Description: Proteasome subunit alpha type 4 (20S proteasome
  misc_feature (16)..(85): Homolog of NCBI NO: 6984140 NR Description: proteasome 27 kDa subunit [Euphorbia esula]
  misc_feature (17)..(85): Homolog of NCBI NO: 12229904 NR Description: Proteasome subunit alpha type 4 (20S proteasome
  misc_feature (13)..(85): Homolog of NCBI NO: 34898416 NR Description: ESTs AU058081(E30812),AU058365(E50679), correspond to a region of the predicted gene.~Similar to Spinacia
  misc_feature (13)..(85): Homolog of NCBI NO: 34898458 NR Description: ESTs AU058081(E3082),AU075427(E30384) correspond a region of the predicted gene.~Similar to Spinacia oleracea
  misc_feature (16)..(85): Homolog of NCBI NO: 14594915 NR Description: putative alpha3 proteasome subunit [Nicotiana
  misc_feature (16)..(85): Homolog of NCBI NO: 464458 NR Description: Proteasome subunit alpha type 4 (Proteasome
  misc_feature (37)..(85): Homolog of NCBI NO: 14039743 NR Description: 20S proteasome subunit alpha 3 [Lolium perenne]
MLWKLLAMLVLPLEFLAKDGVVLVGEKKVTSKLLQTSSSMEKMYKIDDHVACAVAGIMSDANILINTARVQAQRYTFMYQEPMPV

SEQ ID NO: 85438 - DNA, 2316 bp, Arabidopsis thaliana
  misc_feature (1)..(2316): Ceres Seq. ID no. 12680433
  misc_feature: MA Experiment ID: 20000171 Result: Up-regulated in Transcription
  misc_feature: MA Experiment 20000171 PARAMETER Experiment Name: At_42deg_Heat_P Parameter: Age (day) Value: 14
  misc_feature: MA Experiment 20000171 PARAMETER Experiment Name: At_42deg_Heat_P Parameter: Organism Value: A. thaliana
  misc_feature: MA Experiment 20000171 PARAMETER Experiment Name: At_42deg_Heat_P Parameter: Plant Line Value: WS
  misc_feature: MA Experiment 20000171 PARAMETER Experiment Name: At_42deg_Heat_P Parameter: Temperature (deg C) Value: 42 vs. 22
  misc_feature: MA Experiment 20000171 PARAMETER Experiment Name: At_42deg_Heat_P Parameter: Timepoint (hr) Value: 1
  misc_feature: MA Experiment 20000171 PARAMETER Experiment Name: At_42deg_Heat_P Parameter: Tissue Value: Aerial
  misc_feature: MA Experiment ID: 20000173 Result: Up-regulated in Transcription
  misc_feature: MA Experiment 20000173 PARAMETER Experiment Name: At_42deg_Heat_P Parameter: Age (day) Value: 14
  misc_feature: MA Experiment 20000173 PARAMETER Experiment Name: At_42deg_Heat_P Parameter: Organism Value: A. thaliana
  misc_feature: MA Experiment 20000173 PARAMETER Experiment Name: At_42deg_Heat_P Parameter: Plant Line Value: WS
  misc_feature: MA Experiment 20000173 PARAMETER Experiment Name: At_42deg_Heat_P Parameter: Temperature (deg C) Value: 42 vs. 22
  misc_feature: MA Experiment 20000173 PARAMETER Experiment Name: At_42deg_Heat_P Parameter: Timepoint (hr) Value: 6
  misc_feature: MA Experiment 20000173 PARAMETER Experiment Name: At_42deg_Heat_P Parameter: Tissue Value: Aerial
  misc_feature: MA Experiment ID: 20000179 Result: Up-regulated in Transcription
  misc_feature: MA Experiment 20000179 PARAMETER Experiment Name: At_Germinating_Seeds_P Parameter: Age (hr) Value: 6 vs. 0
  misc_feature: MA Experiment 20000179 PARAMETER Experiment Name: At_Germinating_Seeds_P Parameter: Tissue Value: Germinating Seeds
  misc_feature: MA Experiment ID: 20000184 Result: Down-regulated in Transcription
  misc_feature: MA Experiment 20000184 PARAMETER Experiment Name: At_Shoots__P Parameter: Age (day) Value: 7
  misc_feature: MA Experiment 20000184 PARAMETER Experiment Name: At_Shoots__P Parameter: Tissue Value: Shoots vs. Whole Plant
  misc_feature: MA Experiment ID: 20000227 Result: Down-regulated in Transcription
  misc_feature: MA Experiment 20000227 PARAMETER Experiment Name: At_Root-Tips-vs-Tops_P Parameter: Tissue Value: Root Tips vs. Root Tops
  misc_feature: MA Experiment ID: 20000264 Result: Down-regulated in Transcription
  misc_feature: MA Experiment 20000264 PARAMETER Experiment Name: At_Open_Flower_P Parameter: Age (day) Value: 21
  misc_feature: MA Experiment 20000264 PARAMETER Experiment Name: At_Open_Flower_P Parameter: Plant Line Value: WS
  misc_feature: MA Experiment 20000264 PARAMETER Experiment Name: At_Open_Flower_P Parameter: Tissue Value: Open Flower vs. Whole Plant
  misc_feature: MA Experiment ID: 20000438 Result: Down-regulated in Transcription
  misc_feature: MA Experiment 20000438 PARAMETER Experiment Name: At_Shoots__P Parameter: Age (day) Value: 14
  misc_feature: MA Experiment 20000438 PARAMETER Experiment Name: At_Shoots__P Parameter: Tissue Value: Shoots vs. Whole Plant
  misc_feature: MA Experiment ID: 20000495 Result: Down-regulated in Transcription
  misc_feature: MA Experiment 20000495 PARAMETER Experiment Name: At_Guard_Cells_P Parameter: Harvest Date Value: 8/2/2002
  misc_feature: MA Experiment 20000495 PARAMETER Experiment Name: At_Guard_Cells_P Parameter: Organism Value: A. thaliana
  misc_feature: MA Experiment 20000495 PARAMETER Experiment Name: At_Guard_Cells_P Parameter: Tissue Value: Guard Cells vs. Leaves
  misc_feature: MA Experiment ID: 20001248 Result: Up-regulated in Transcription
  misc_feature: MA Experiment 20001248 PARAMETER Experiment Name: At_Far-red-induction_P Parameter: Age (day) Value: 7
  misc_feature: MA Experiment 20001248 PARAMETER Experiment Name: At_Far-red-induction_P Parameter: Light Value: Far-red vs. White
  misc_feature: MA Experiment 20001248 PARAMETER Experiment Name: At_Far-red-induction_P Parameter: Organism Value: A. thaliana
  misc_feature: MA Experiment 20001248 PARAMETER Experiment Name: At_Far-red-induction_P Parameter: Plant Line Value: Columbia
  misc_feature: MA Experiment 20001248 PARAMETER Experiment Name: At_Far-red-induction_P Parameter: Timepoint (hr) Value: 4
  misc_feature: MA Experiment 20001248 PARAMETER Experiment Name: At_Far-red-induction_P Parameter: Tissue Value: Whole Plant
atggcaacactaggagatattggagtagcagcagcaatcaacatactcactgcaatcatcttccttttggcatttgcaatcttgaggattcaaccattcaacgatagggtttatttccctaaatggtatctcaaaggtataagaagcagccctttgcattcaggtgctcttgtcagcaagtttgtcaatgttaacttaggctcatacctccggttcttgaactggatgcccgcggctctaaagatgcctgagcctgagcttattgatcatgctggattggattctgctgtctacttgaggatttacttgatagggcttaagatctttgtaccgatagcgttacttgcttggtcgattcttgtacctgtcaattggactagtcatggtctgcaactagctaagcttcgtaatgtgacatctagtgatattgataagttatccatctcgaatatcgaaaatggatcagacaggttttggactcaccttgtgatggcttacgcattcacattctggacttgctatgttcttatgaaagagtatgagaaagtagctgctatgcgtttggcatttctccagaacgagcaacggcgccctgatcagttcacggttttggttaggaacgtaccagcggacccagatgagtccattagtgacagtgtggaacatttctttctagttaaccatccggaccattatcttacgcatcaggttgtgtacaatgcaaacgatttggcagcattagtagagcagaagaagagcacacagaactggcttgactattaccaattgaagtatacaaggaaccaggaacataagccgaggataaagacgggttttctcgggctatggggaaagaaagttgacgcaatcgatcattatatagctgaaatcgagaaattaaacgagcaaataatggaggagaggaaaaaagtgaagaaagatgatacaagtgtaatgccagccgcttttgtctcgtttaaaacacggtggggtgctgcggttagtgcacagactcaacagtcgagtgatccgactgaatggttaactgaatgggctcccgaggcacgagaagtgttttggtcgaaccttgcaataccttatgtctctttaacagtaagaagacttataatgcacattgcattcttcttcctcactttcttcttcatgattccaatagcctttgttcaatcccttgcaagcatcgaaggcattgagaaaaatgctcctttcctgaaatccatcatcgagaacgatcttttcaaatcggttatccaaggttttcttccgggtatcgtgttaaagctctttctaatatttctgccaagcattttgatggtaatgtcgaagttcgaagggtttgtatcgttatcatcgttagagagaagagcggcttttcgatattatatctttaatctcatcaatgtcttcctcggaagcgtaatcaccggctctgcatttgaacagcttgattctttcctaaaacaatccgcaaaggagattcctaagacggttggggtagcgataccgataaaagcaacgttttttatcacatatataatggtggacggttgggctggtattgcaggggagattctgaggctgaaacctcttatctttttccatataaagaactccttattggtgaaaaccgaaaaggatagagaagaagcaatgaacccgggacagatcaattatcatgcgacagagcctcggattcaactctacttcctcctcggtcttgtctacgctcctgtgactccagttctactccctttcattatcatcttcttcgcattggcttaccttgtctttcgtcatcagatcataaatgtgtataatcaggaatatgaaagcgcggctaggttctggccagatgttcatggtcgtataatatcagcattgatcatcgcacaaatccttttgatgggactattaagcactaagggagctgctcagtccacgcctttcctactcttcttaccgatcataacctttttcttccaccggtactgcaaaggccggtatgaaccagcattcctccgtcaccccttgaaggaagctatggtcaaagatacattggaacgagcaagagaacccaattttaatctgaaaccgtatcttcaaaaagcatacattcatccggttttcaaagacaacgactatgaagatagccggtttgatgaaatatccggttattgcatcgaagattcggatgaagagtgtgttactgtaccgaccaaacgtcagtcccggataaatacgcctgctgttagccatgcaagccgcggttcttcgcgttcaccaccctcaaagtaa

SEQ ID NO: 85439 - protein, 771 aa, Arabidopsis thaliana
  peptide (1)..(771): Ceres Seq. ID no. 12680434
  misc_feature (306)..(728): Pfam Name: Domain of unknown function DUF221 Pfam Description: Domain of unknown function DUF221
  misc_feature (236)..(769): Homolog of NCBI NO: 7486105 NR Description: hypothetical protein F24O1.3 - Arabidopsis
  misc_feature (1)..(159): Homolog of NCBI NO: 7486105 NR Description: hypothetical protein F24O1.3 - Arabidopsis
  misc_feature (1)..(767): Homolog of NCBI NO: 15233476 NR Description: unknown protein; protein id: At4g04340.1, by cDNA: gi_15810532, supported by cDNA: gi_20260619 [Arabidopsis >gi|25407261|pir||H85054 hypothetical protein AT4g04340
  misc_feature (1)..(767): Homolog of NCBI NO: 15810533 NR Description: unknown protein [Arabidopsis thaliana]
  misc_feature (1)..(720): Homolog of NCBI NO: 15233100 NR Description: unknown protein; protein id: At3g21620.1 thaliana] >gi|11994398|dbj|BAB02357.1|
  misc_feature (217)..(769): Homolog of NCBI NO: 15234725 NR Description: putative protein; protein id: At4g22120.1
  misc_feature (1)..(203): Homolog of NCBI NO: 15234725 NR Description: putative protein; protein id: At4g22120.1
  misc_feature (1)..(761): Homolog of NCBI NO: 17381104 NR Description: unknown protein [Arabidopsis thaliana]
  misc_feature (1)..(768): Homolog of NCBI NO: 15236212 NR Description: hypothetical protein; protein id: At4g02900.1
  misc_feature (1)..(722): Homolog of NCBI NO: 15222569 NR Description: hypothetical protein; protein id: At1g32090.1
MATLGDIGVAAAINILTAIIFLLAFAILRIQPFNDRVYFPKWYLKGIRSSPLHSGALVSKFVNVNLGSYLRFLNWMPAALKMPEPELIDHAGLDSAVYLRIYLIGLKIFVPIALLAWSILVPVNWTSHGLQLAKLRNVTSSDIDKLSISNIENGSDRFWTHLVMAYAFTFWTCYVLMKEYEKVAAMRLAFLQNEQRRPDQFTVLVRNVPADPDESISDSVEHFFLVNHPDHYLTHQVVYNANDLAALVEQKKSTQNWLDYYQLKYTRNQEHKPRIKTGFLGLWGKKVDAIDHYIAEIEKLNEQIMEERKKVKKDDTSVMPAAFVSFKTRWGAAVSAQTQQSSDPTEWLTEWAPEAREVFWSNLAIPYVSLTVRRLIMHIAFFFLTFFFMIPIAFVQSLASIEGIEKNAPFLKSIIENDLFKSVIQGFLPGIVLKLFLIFLPSILMVMSKFEGFVSLSSLERRAAFRYYIFNLINVFLGSVITGSAFEQLDSFLKQSAKEIPKTVGVAIPIKATFFITYIMVDGWAGIAGEILRLKPLIFFHIKNSLLVKTEKDREEAMNPGQINYHATEPRIQLYFLLGLVYAPVTPVLLPFIIIFFALAYLVFRHQIINVYNQEYESAARFWPDVHGRIISALIIAQILLMGLLSTKGAAQSTPFLLFLPIITFFFHRYCKGRYEPAFLRHPLKEAMVKDTLERAREPNFNLKPYLQKAYIHPVFKDNDYEDSRFDEISGYCIEDSDEECVTVPTKRQSRINTPAVSHASRGSSRSPPSK

SEQ ID NO: 85440 - protein, 696 aa, Arabidopsis thaliana
  peptide (1)..(696): Ceres Seq. ID no. 12680435
  misc_feature (231)..(653): Pfam Name: Domain of unknown function DUF221 Pfam Description: Domain of unknown function DUF221
  misc_feature (161)..(694): Homolog of NCBI NO: 7486105 NR Description: hypothetical protein F24O1.3 - Arabidopsis
  misc_feature (1)..(84): Homolog of NCBI NO: 7486105 NR Description: hypothetical protein F24O1.3 - Arabidopsis
  misc_feature (1)..(692): Homolog of NCBI NO: 15233476 NR Description: unknown protein; protein id: At4g04340.1, by cDNA: gi_15810532, supported by cDNA: gi_20260619 [Arabidopsis >gi|25407261|pir||H85054 hypothetical protein AT4g04340
  misc_feature (1)..(692): Homolog of NCBI NO: 15810533 NR Description: unknown protein [Arabidopsis thaliana]
  misc_feature (1)..(645): Homolog of NCBI NO: 15233100 NR Description: unknown protein; protein id: At3g21620.1 thaliana] >gi|11994398|dbj|BAB02357.1|
  misc_feature (142)..(694): Homolog of NCBI NO: 15234725 NR Description: putative protein; protein id: At4g22120.1
  misc_feature (1)..(128): Homolog of NCBI NO: 15234725 NR Description: putative protein; protein id: At4g22120.1
  misc_feature (1)..(686): Homolog of NCBI NO: 17381104 NR Description: unknown protein [Arabidopsis thaliana]
  misc_feature (1)..(693): Homolog of NCBI NO: 15236212 NR Description: hypothetical protein; protein id: At4g02900.1
  misc_feature (1)..(647): Homolog of NCBI NO: 15222569 NR Description: hypothetical protein; protein id: At1g32090.1
MPAALKMPEPELIDHAGLDSAVYLRIYLIGLKIFVPIALLAWSILVPVNWTSHGLQLAKLRNVTSSDIDKLSISNIENGSDRFWTHLVMAYAFTFWTCYVLMKEYEKVAAMRLAFLQNEQRRPDQFTVLVRNVPADPDESISDSVEHFFLVNHPDHYLTHQVVYNANDLAALVEQKKSTQNWLDYYQLKYTRNQEHKPRIKTGFLGLWGKKVDAIDHYIAEIEKLNEQIMEERKKVKKDDTSVMPAAFVSFKTRWGAAVSAQTQQSSDPTEWLTEWAPEAREVFWSNLAIPYVSLTVRRLIMHIAFFFLTFFFMIPIAFVQSLASIEGIEKNAPFLKSIIENDLFKSVIQGFLPGIVLKLFLIFLPSILMVMSKFEGFVSLSSLERRAAFRYYIFNLINVFLGSVITGSAFEQLDSFLKQSAKEIPKTVGVAIPIKATFFITYIMVDGWAGIAGEILRLKPLIFFHIKNSLLVKTEKDREEAMNPGQINYHATEPRIQLYFLLGLVYAPVTPVLLPFIIIFFALAYLVFRHQIINVYNQEYESAARFWPDVHGRIISALIIAQILLMGLLSTKGAAQSTPFLLFLPIITFFFHRYCKGRYEPAFLRHPLKEAMVKDTLERAREPNFNLKPYLQKAYIHPVFKDNDYEDSRFDEISGYCIEDSDEECVTVPTKRQSRINTPAVSHASRGSSRSPPSK

SEQ ID NO: 85441 - protein, 690 aa, Arabidopsis thaliana
  peptide (1)..(690): Ceres Seq. ID no. 12680436
  misc_feature (225)..(647): Pfam Name: Domain of unknown function DUF221 Pfam Description: Domain of unknown function DUF221
  misc_feature (155)..(688): Homolog of NCBI NO: 7486105 NR Description: hypothetical protein F24O1.3 - Arabidopsis
  misc_feature (1)..(78): Homolog of NCBI NO: 7486105 NR Description: hypothetical protein F24O1.3 - Arabidopsis
  misc_feature (1)..(686): Homolog of NCBI NO: 15233476 NR Description: unknown protein; protein id: At4g04340.1, by cDNA: gi_15810532, supported by cDNA: gi_20260619 [Arabidopsis >gi|25407261|pir||H85054 hypothetical protein AT4g04340
  misc_feature (1)..(686): Homolog of NCBI NO: 15810533 NR Description: unknown protein [Arabidopsis thaliana]
  misc_feature (1)..(639): Homolog of NCBI NO: 15233100 NR Description: unknown protein; protein id: At3g21620.1 thaliana] >gi|11994398|dbj|BAB02357.1|
  misc_feature (136)..(688): Homolog of NCBI NO: 15234725 NR Description: putative protein; protein id: At4g22120.1
  misc_feature (1)..(122): Homolog of NCBI NO: 15234725 NR Description: putative protein; protein id: At4g22120.1
  misc_feature (1)..(680): Homolog of NCBI NO: 17381104 NR Description: unknown protein [Arabidopsis thaliana]
  misc_feature (1)..(687): Homolog of NCBI NO: 15236212 NR Description: hypothetical protein; protein id: At4g02900.1
  misc_feature (1)..(641): Homolog of NCBI NO: 15222569 NR Description: hypothetical protein; protein id: At1g32090.1
MPEPELIDHAGLDSAVYLRIYLIGLKIFVPIALLAWSILVPVNWTSHGLQLAKLRNVTSSDIDKLSISNIENGSDRFWTHLVMAYAFTFWTCYVLMKEYEKVAAMRLAFLQNEQRRPDQFTVLVRNVPADPDESISDSVEHFFLVNHPDHYLTHQVVYNANDLAALVEQKKSTQNWLDYYQLKYTRNQEHKPRIKTGFLGLWGKKVDAIDHYIAEIEKLNEQIMEERKKVKKDDTSVMPAAFVSFKTRWGAAVSAQTQQSSDPTEWLTEWAPEAREVFWSNLAIPYVSLTVRRLIMHIAFFFLTFFFMIPIAFVQSLASIEGIEKNAPFLKSIIENDLFKSVIQGFLPGIVLKLFLIFLPSILMVMSKFEGFVSLSSLERRAAFRYYIFNLINVFLGSVITGSAFEQLDSFLKQSAKEIPKTVGVAIPIKATFFITYIMVDGWAGIAGEILRLKPLIFFHIKNSLLVKTEKDREEAMNPGQINYHATEPRIQLYFLLGLVYAPVTPVLLPFIIIFFALAYLVFRHQIINVYNQEYESAARFWPDVHGRIISALIIAQILLMGLLSTKGAAQSTPFLLFLPIITFFFHRYCKGRYEPAFLRHPLKEAMVKDTLERAREPNFNLKPYLQKAYIHPVFKDNDYEDSRFDEISGYCIEDSDEECVTVPTKRQSRINTPAVSHASRGSSRSPPSK

SEQ ID NO: 85442 - DNA, 2202 bp, Arabidopsis thaliana
  misc_feature (1)..(2202): Ceres Seq. ID no. 12680474
  misc_feature: MA Experiment ID: 20000182 Result: Up-regulated in Transcription
  misc_feature: MA Experiment 20000182 PARAMETER Experiment Name: At_2mM_SA_P Parameter: Age (day) Value: 14
  misc_feature: MA Experiment 20000182 PARAMETER Experiment Name: At_2mM_SA_P Parameter: Organism Value: A. thaliana
  misc_feature: MA Experiment 20000182 PARAMETER Experiment Name: At_2mM_SA_P Parameter: Plant Line Value: WS
  misc_feature: MA Experiment 20000182 PARAMETER Experiment Name: At_2mM_SA_P Parameter: Timepoint (hr) Value: 6
  misc_feature: MA Experiment 20000182 PARAMETER Experiment Name: At_2mM_SA_P Parameter: Tissue Value: Aerial
  misc_feature: MA Experiment 20000182 PARAMETER Experiment Name: At_2mM_SA_P Parameter: Treatment Value: 2mM SA vs. No Treatment
  misc_feature: MA Experiment ID: 20000184 Result: Down-regulated in Transcription
  misc_feature: MA Experiment 20000184 PARAMETER Experiment Name: At_Shoots__P Parameter: Age (day) Value: 7
  misc_feature: MA Experiment 20000184 PARAMETER Experiment Name: At_Shoots__P Parameter: Tissue Value: Shoots vs. Whole Plant
  misc_feature: MA Experiment ID: 20001248 Result: Up-regulated in Transcription
  misc_feature: MA Experiment 20001248 PARAMETER Experiment Name: At_Far-red-induction_P Parameter: Age (day) Value: 7
  misc_feature: MA Experiment 20001248 PARAMETER Experiment Name: At_Far-red-induction_P Parameter: Light Value: Far-red vs. White
  misc_feature: MA Experiment 20001248 PARAMETER Experiment Name: At_Far-red-induction_P Parameter: Organism Value: A. thaliana
  misc_feature: MA Experiment 20001248 PARAMETER Experiment Name: At_Far-red-induction_P Parameter: Plant Line Value: Columbia
  misc_feature: MA Experiment 20001248 PARAMETER Experiment Name: At_Far-red-induction_P Parameter: Timepoint (hr) Value: 4
  misc_feature: MA Experiment 20001248 PARAMETER Experiment Name: At_Far-red-induction_P Parameter: Tissue Value: Whole Plant
  misc_feature: MA Experiment ID: 20001450 Result: Up-regulated in Transcription
  misc_feature: MA Experiment 20001450 PARAMETER Experiment Name: At_Far-red-induction_P Parameter: Age (day) Value: 7
  misc_feature: MA Experiment 20001450 PARAMETER Experiment Name: At_Far-red-induction_P Parameter: Light Value: Far-red vs. White
  misc_feature: MA Experiment 20001450 PARAMETER Experiment Name: At_Far-red-induction_P Parameter: Organism Value: A. thaliana
  misc_feature: MA Experiment 20001450 PARAMETER Experiment Name: At_Far-red-induction_P Parameter: Plant Line Value: Columbia
  misc_feature: MA Experiment 20001450 PARAMETER Experiment Name: At_Far-red-induction_P Parameter: Timepoint (hr) Value: 8
  misc_feature: MA Experiment 20001450 PARAMETER Experiment Name: At_Far-red-induction_P Parameter: Tissue Value: Whole Plant
atgtcgtactctgactccgattcgtcgtctcatggtggcgagtacaagaatttccgacagattacgcgtgaacgtgagagttcaatggctaagacttgtcgcggaattgcattgggacagttgtttgatgtaatattggggaaatccgttgcttgttacactggtttggtttctaaggactcttgtatgagatgcttagatctgcaaagacagggagctcaaaatccacctggaaggtatgttttccttgtactaatcatggacaaacttactgtcaagataatgtcgtacgcctgcaaaatggctgatatcacacaagaaggagtttcattggttgaagacatatttagacgaagacaaccacttccttcaatggatgcaatatacttcatccagccaactaaagagaatgtcatcatgttcttgtcagacatgtctgggaaatcacccttgtacaagaattcaccggtttccaaggaactggttggtcacatcaagaaagattcgagtgtattacctcggattggagcattgagagagatgaatttggagttttttgccattgatagccagggtttcataaccgatcatgagcgagctttagaggatctttttggtgatgaggaaacttctcgaaaaggcgatgcgtgcttgaatgtgatggcttctcgaattgctacagtctttgcttcgttgcgggaattcccagcagtacgataccgagctgcaaagtcacttgatgcatcgacaatgacaactttgcgcgatttaattccaacaaagcttgcagctggaatctggaattgtctggcaaaacataagcagtcgattgaaaattttcctcaaactgaaacatgcgagctactcatccttgacagatccatagaccagattgcccctgttatacatgagtggacatatgatgctatgtgccatgatttactgaacatggaaggaaacaaatatgtacatgtgattccaagcaaatcaggcggacaaccagagaagaaagatgtgctcttagaggaacatgatcctatttggctagagcttcgacatgcacatatagcagatgctagtgaaagattgcatgacaagatgaccaatttcttatcgaaaaacaaagctgctcagcttcagggtaagagagatggagctgagctttctacaagagatttgcagaagatggttcaagcattgccacagtacagtgaacaaattgacaagctctctctccacgtagagattgctagaaaactcaacgaccttatcagagagcaaggacttcgggagcttggacaacttgaacaagaccttgtttttggtgatgctggaatgaaggatgtgattaaatatttgagtactcaagaggaggcaagccgtgaaggtaagttacgcctgttgatgatcctcgcaacaatttaccctgaaaagtttgaaggtgaaaaaggtcaaaatctaatgaagttggccaaactctcatctgatgacatgaccgctgtaaataatatgagcttacttggttcagccgtcgatgctaaaaagaataccccgggaggtttcactttgaaatttgaccttcacaagaaaaaacgagctgtcaggaaagagcgccaagaggaagcagcatggcagttatctcgtttttaccccatgattgaggaactcatcgaaaaacttagcaaaggagaattgccaaaagaggatttcccatgtatgaacgacccaagcccaagtttccacggatcaacctcactttcatcagcagcaagtagtagtcaaggtcaagctgctcagtccatgagatcaagacgcacaccaacatgggctaaacctcgaggttcagatgatggatattcaagtgattcggtattgagacatgcgtcaagcgatttcaggaagatgggacagcgaatatttgtgttcatcgtcggtggagcgactagatcagaggtaagaagctatggaaaaaggctttcattgttggaaataaattcacatcatagaatcatgatatatgtgctgatctcttttcctggtatctttgatttccagttaaaagtatgccacaaactatccacaaaactcaaaagagaagtaatcctcggttccacgagcctggacgatcctccacagttcataacgaaattgaagcttttgactgcaaatgatgatttatctttagacgatctccaaatatga

SEQ ID NO: 85443 - protein, 733 aa, Arabidopsis thaliana
  peptide (1)..(733): Ceres Seq. ID no. 12680475
  misc_feature (74)..(653): Homolog of NCBI NO: 18413751 NR Description: putative protein; protein id: At4g12120.1,
  misc_feature (669)..(733): Homolog of NCBI NO: 18413751 NR Description: putative protein; protein id: At4g12120.1,
  misc_feature (1)..(25): Homolog of NCBI NO: 18413751 NR Description: putative protein; protein id: At4g12120.1,
  misc_feature (74)..(653): Homolog of NCBI NO: 28201893 NR Description: Protein transport Sec1b (AtSec1b)
  misc_feature (669)..(733): Homolog of NCBI NO: 28201893 NR Description: Protein transport Sec1b (AtSec1b)
  misc_feature (1)..(25): Homolog of NCBI NO: 28201893 NR Description: Protein transport Sec1b (AtSec1b)
  misc_feature (84)..(663): Homolog of NCBI NO: 38345989 NR Description: OSJNBa0032B23.7 [Oryza sativa (japonica
  misc_feature (669)..(733): Homolog of NCBI NO: 38345989 NR Description: OSJNBa0032B23.7 [Oryza sativa (japonica
  misc_feature (63)..(653): Homolog of NCBI NO: 7485573 NR Description: hypothetical protein F16J13.190 - Arabidopsis >gi|4586117|emb|CAB40953.1| putative protein [Arabidopsis >gi|7267913|emb|CAB78255.1| putative protein [Arabidopsis
  misc_feature (669)..(715): Homolog of NCBI NO: 7485573 NR Description: hypothetical protein F16J13.190 - Arabidopsis >gi|4586117|emb|CAB40953.1| putative protein [Arabidopsis >gi|7267913|emb|CAB78255.1| putative protein [Arabidopsis
MSYSDSDSSSHGGEYKNFRQITRERESSMAKTCRGIALGQLFDVILGKSVACYTGLVSKDSCMRCLDLQRQGAQNPPGRYVFLVLIMDKLTVKIMSYACKMADITQEGVSLVEDIFRRRQPLPSMDAIYFIQPTKENVIMFLSDMSGKSPLYKNSPVSKELVGHIKKDSSVLPRIGALREMNLEFFAIDSQGFITDHERALEDLFGDEETSRKGDACLNVMASRIATVFASLREFPAVRYRAAKSLDASTMTTLRDLIPTKLAAGIWNCLAKHKQSIENFPQTETCELLILDRSIDQIAPVIHEWTYDAMCHDLLNMEGNKYVHVIPSKSGGQPEKKDVLLEEHDPIWLELRHAHIADASERLHDKMTNFLSKNKAAQLQGKRDGAELSTRDLQKMVQALPQYSEQIDKLSLHVEIARKLNDLIREQGLRELGQLEQDLVFGDAGMKDVIKYLSTQEEASREGKLRLLMILATIYPEKFEGEKGQNLMKLAKLSSDDMTAVNNMSLLGSAVDAKKNTPGGFTLKFDLHKKKRAVRKERQEEAAWQLSRFYPMIEELIEKLSKGELPKEDFPCMNDPSPSFHGSTSLSSAASSSQGQAAQSMRSRRTPTWAKPRGSDDGYSSDSVLRHASSDFRKMGQRIFVFIVGGATRSEVRSYGKRLSLLEINSHHRIMIYVLISFPGIFDFQLKVCHKLSTKLKREVILGSTSLDDPPQFITKLKLLTANDDLSLDDLQI

SEQ ID NO: 85444 - protein, 705 aa, Arabidopsis thaliana
  peptide (1)..(705): Ceres Seq. ID no. 12680476
  misc_feature (46)..(625): Homolog of NCBI NO: 18413751 NR Description: putative protein; protein id: At4g12120.1,
  misc_feature (641)..(705): Homolog of NCBI NO: 18413751 NR Description: putative protein; protein id: At4g12120.1,
  misc_feature (46)..(625): Homolog of NCBI NO: 28201893 NR Description: Protein transport Sec1b (AtSec1b)
  misc_feature (641)..(705): Homolog of NCBI NO: 28201893 NR Description: Protein transport Sec1b (AtSec1b)
  misc_feature (56)..(635): Homolog of NCBI NO: 38345989 NR Description: OSJNBa0032B23.7 [Oryza sativa (japonica
  misc_feature (641)..(705): Homolog of NCBI NO: 38345989 NR Description: OSJNBa0032B23.7 [Oryza sativa (japonica
  misc_feature (35)..(625): Homolog of NCBI NO: 7485573 NR Description: hypothetical protein F16J13.190 - Arabidopsis >gi|4586117|emb|CAB40953.1| putative protein [Arabidopsis >gi|7267913|emb|CAB78255.1| putative protein [Arabidopsis
  misc_feature (641)..(687): Homolog of NCBI NO: 7485573 NR Description: hypothetical protein F16J13.190 - Arabidopsis >gi|4586117|emb|CAB40953.1| putative protein [Arabidopsis >gi|7267913|emb|CAB78255.1| putative protein [Arabidopsis
  misc_feature (56)..(580): Homolog of NCBI NO: 18378910 NR Description: hypothetical protein; protein id: At1g02010.1
  misc_feature (641)..(696): Homolog of NCBI NO: 18378910 NR Description: hypothetical protein; protein id: At1g02010.1
MAKTCRGIALGQLFDVILGKSVACYTGLVSKDSCMRCLDLQRQGAQNPPGRYVFLVLIMDKLTVKIMSYACKMADITQEGVSLVEDIFRRRQPLPSMDAIYFIQPTKENVIMFLSDMSGKSPLYKNSPVSKELVGHIKKDSSVLPRIGALREMNLEFFAIDSQGFITDHERALEDLFGDEETSRKGDACLNVMASRIATVFASLREFPAVRYRAAKSLDASTMTTLRDLIPTKLAAGIWNCLAKHKQSIENFPQTETCELLILDRSIDQIAPVIHEWTYDAMCHDLLNMEGNKYVHVIPSKSGGQPEKKDVLLEEHDPIWLELRHAHIADASERLHDKMTNFLSKNKAAQLQGKRDGAELSTRDLQKMVQALPQYSEQIDKLSLHVEIARKLNDLIREQGLRELGQLEQDLVFGDAGMKDVIKYLSTQEEASREGKLRLLMILATIYPEKFEGEKGQNLMKLAKLSSDDMTAVNNMSLLGSAVDAKKNTPGGFTLKFDLHKKKRAVRKERQEEAAWQLSRFYPMIEELIEKLSKGELPKEDFPCMNDPSPSFHGSTSLSSAASSSQGQAAQSMRSRRTPTWAKPRGSDDGYSSDSVLRHASSDFRKMGQRIFVFIVGGATRSEVRSYGKRLSLLEINSHHRIMIYVLISFPGIFDFQLKVCHKLSTKLKREVILGSTSLDDPPQFITKLKLLTANDDLSLDDLQI

SEQ ID NO: 85445 - protein, 671 aa, Arabidopsis thaliana
  peptide (1)..(671): Ceres Seq. ID no. 12680477
  misc_feature (12)..(591): Homolog of NCBI NO: 18413751 NR Description: putative protein; protein id: At4g12120.1,
  misc_feature (607)..(671): Homolog of NCBI NO: 18413751 NR Description: putative protein; protein id: At4g12120.1,
  misc_feature (12)..(591): Homolog of NCBI NO: 28201893 NR Description: Protein transport Sec1b (AtSec1b)
  misc_feature (607)..(671): Homolog of NCBI NO: 28201893 NR Description: Protein transport Sec1b (AtSec1b)
  misc_feature (22)..(601): Homolog of NCBI NO: 38345989 NR Description: OSJNBa0032B23.7 [Oryza sativa (japonica
  misc_feature (607)..(671): Homolog of NCBI NO: 38345989 NR Description: OSJNBa0032B23.7 [Oryza sativa (japonica
  misc_feature (1)..(591): Homolog of NCBI NO: 7485573 NR Description: hypothetical protein F16J13.190 - Arabidopsis >gi|4586117|emb|CAB40953.1| putative protein [Arabidopsis >gi|7267913|emb|CAB78255.1| putative protein [Arabidopsis
  misc_feature (607)..(653): Homolog of NCBI NO: 7485573 NR Description: hypothetical protein F16J13.190 - Arabidopsis >gi|4586117|emb|CAB40953.1| putative protein [Arabidopsis >gi|7267913|emb|CAB78255.1| putative protein [Arabidopsis
  misc_feature (22)..(546): Homolog of NCBI NO: 18378910 NR Description: hypothetical protein; protein id: At1g02010.1
  misc_feature (607)..(662): Homolog of NCBI NO: 18378910 NR Description: hypothetical protein; protein id: At1g02010.1
MRCLDLQRQGAQNPPGRYVFLVLIMDKLTVKIMSYACKMADITQEGVSLVEDIFRRRQPLPSMDAIYFIQPTKENVIMFLSDMSGKSPLYKNSPVSKELVGHIKKDSSVLPRIGALREMNLEFFAIDSQGFITDHERALEDLFGDEETSRKGDACLNVMASRIATVFASLREFPAVRYRAAKSLDASTMTTLRDLIPTKLAAGIWNCLAKHKQSIENFPQTETCELLILDRSIDQIAPVIHEWTYDAMCHDLLNMEGNKYVHVIPSKSGGQPEKKDVLLEEHDPIWLELRHAHIADASERLHDKMTNFLSKNKAAQLQGKRDGAELSTRDLQKMVQALPQYSEQIDKLSLHVEIARKLNDLIREQGLRELGQLEQDLVFGDAGMKDVIKYLSTQEEASREGKLRLLMILATIYPEKFEGEKGQNLMKLAKLSSDDMTAVNNMSLLGSAVDAKKNTPGGFTLKFDLHKKKRAVRKERQEEAAWQLSRFYPMIEELIEKLSKGELPKEDFPCMNDPSPSFHGSTSLSSAASSSQGQAAQSMRSRRTPTWAKPRGSDDGYSSDSVLRHASSDFRKMGQRIFVFIVGGATRSEVRSYGKRLSLLEINSHHRIMIYVLISFPGIFDFQLKVCHKLSTKLKREVILGSTSLDDPPQFITKLKLLTANDDLSLDDLQI

SEQ ID NO: 85446 - DNA, 840 bp, Arabidopsis thaliana
  misc_feature (1)..(840): Ceres Seq. ID no. 12680486
  misc_feature: MA Experiment ID: 108595 Result: Down-regulated in Transcription
  misc_feature: MA Experiment 108595 PARAMETER Experiment Name: At_Ler-pi_Ovule_cDNA_P Parameter: Plant Line Value: null
atggcggtctcgtttaatacaacgcttcaccagccttctctgagtccgagctgtagcatcaagctttattctgggttaaagcctcaatctgcaagctttttggcaagtgggtatcagaatttgaacaaggagttctatggaagagtttataagagtctgcaatctgggactgggaaagcgagcaggtcacgggtaaagatgatgccaataggaacaccgagagtaccctacagaaaccgagaagaagggacttggcaatgggttgatatatggaatgccctttatcgagagcgtgtaatcttcattggacaaaacattgatgaagagtttagcaaccagatattagcaaccatgttgtaccttgatactcttgatgactcgaggaggatttatatgtacctaaatggtccgggtggtgatcttactccaagtctagccatctatgatacaatgaagagcttgaaaagtccggttgggacacattgcgttgggcttgcttacaaccttgcaggttttcttcttgcggctggagaaaagggtcaccgatttgcgatgccattatcaagaatcgccctccagtcaccagctggtgcagcccgtggtcaggctgatgatatccaaaatgaagcaaaagagctttcaaggataagagactacctcttcaatgaactagccaagaatacaggccagcctgcggaaagggtcttcaaagacttgagccgggtgaaaaggttcaatgcagaggaagcaatcgagtatggacttattgataagattgttagaccaccgcgcatcaaagaagacgctcctcgccaagacgaaagcgcagggctaggctag

SEQ ID NO: 85447 - protein, 279 aa, Arabidopsis thaliana; identical to SEQ ID NO: 26212
  peptide (1)..(279): Ceres Seq. ID no. 12680487
  misc_feature (79)..(263): Pfam Name: Clp protease Pfam Description: Clp protease
  misc_feature (1)..(279): Homolog of NCBI NO: 18391391 NR Description: ATP-dependent Clp protease proteolytic subunit protein id: At1g12410.1, supported by cDNA: gi_16209711, by cDNA: gi_17065387, supported by cDNA: gi_20148624, supported
  misc_feature (1)..(279): Homolog of NCBI NO: 16209712 NR Description: At1g12410/F5O11_7 [Arabidopsis thaliana]
  misc_feature (68)..(260): Homolog of NCBI NO: 22298615 NR Description: ATP-dependent Clp protease proteolytic subunit 2
  misc_feature (50)..(260): Homolog of NCBI NO: 13812170 NR Description: ATP-dependent Clp protease proteolytic subunit
  misc_feature (68)..(260): Homolog of NCBI NO: 17231849 NR Description: ATP-dependent Clp protease proteolytic subunit
  misc_feature (68)..(260): Homolog of NCBI NO: 23126722 NR Description: hypothetical protein [Nostoc punctiforme]
  misc_feature (68)..(262): Homolog of NCBI NO: 18203213 NR Description: ATP-dependent Clp protease proteolytic subunit 3
  misc_feature (68)..(260): Homolog of NCBI NO: 23043112 NR Description: hypothetical protein [Trichodesmium erythraeum
  misc_feature (68)..(263): Homolog of NCBI NO: 33240837 NR Description: Protease subunit of ATP-dependent Clp protease
  misc_feature (79)..(259): Homolog of NCBI NO: 30023185 NR Description: ATP-dependent Clp protease proteolytic subunit cereus ATCC 14579] >gi|17981472|gb|AAL51030.1|AF454757_1 ClpP1

SEQ ID NO: 85448 - protein, 213 aa, Arabidopsis thaliana; identical to SEQ ID NO: 26213
  peptide (1)..(213): Ceres Seq. ID no. 12680488
  misc_feature (13)..(197): Pfam Name: Clp protease Pfam Description: Clp protease
  misc_feature (1)..(213): Homolog of NCBI NO: 18391391 NR Description: ATP-dependent Clp protease proteolytic subunit protein id: At1g12410.1, supported by cDNA: gi_16209711, by cDNA: gi_17065387, supported by cDNA: gi_20148624, supported
  misc_feature (1)..(213): Homolog of NCBI NO: 16209712 NR Description: At1g12410/F5O11_7 [Arabidopsis thaliana]
  misc_feature (2)..(194): Homolog of NCBI NO: 22298615 NR Description: ATP-dependent Clp protease proteolytic subunit 2
  misc_feature (1)..(194): Homolog of NCBI NO: 13812170 NR Description: ATP-dependent Clp protease proteolytic subunit
  misc_feature (2)..(194): Homolog of NCBI NO: 17231849 NR Description: ATP-dependent Clp protease proteolytic subunit
  misc_feature (2)..(194): Homolog of NCBI NO: 23126722 NR Description: hypothetical protein [Nostoc punctiforme]
  misc_feature (2)..(196): Homolog of NCBI NO: 18203213 NR Description: ATP-dependent Clp protease proteolytic subunit 3
  misc_feature (2)..(194): Homolog of NCBI NO: 23043112 NR Description: hypothetical protein [Trichodesmium erythraeum
  misc_feature (2)..(197): Homolog of NCBI NO: 33240837 NR Description: Protease subunit of ATP-dependent Clp protease
  misc_feature (13)..(193): Homolog of NCBI NO: 30023185 NR Description: ATP-dependent Clp protease proteolytic subunit cereus ATCC 14579] >gi|17981472|gb|AAL51030.1|AF454757_1 ClpP1

SEQ ID NO: 85449 - protein, 212 aa, Arabidopsis thaliana; identical to SEQ ID NO: 27066
  peptide (1)..(212): Ceres Seq. ID no. 12680489
  misc_feature (12)..(196): Pfam Name: Clp protease Pfam Description: Clp protease
  misc_feature (1)..(212): Homolog of NCBI NO: 18391391 NR Description: ATP-dependent Clp protease proteolytic subunit protein id: At1g12410.1, supported by cDNA: gi_16209711, by cDNA: gi_17065387, supported by cDNA: gi_20148624, supported
  misc_feature (1)..(212): Homolog of NCBI NO: 16209712 NR Description: At1g12410/F5O11_7 [Arabidopsis thaliana]
  misc_feature (1)..(193): Homolog of NCBI NO: 22298615 NR Description: ATP-dependent Clp protease proteolytic subunit 2
  misc_feature (1)..(193): Homolog of NCBI NO: 13812170 NR Description: ATP-dependent Clp protease proteolytic subunit
  misc_feature (1)..(193): Homolog of NCBI NO: 17231849 NR Description: ATP-dependent Clp protease proteolytic subunit
  misc_feature (1)..(193): Homolog of NCBI NO: 23126722 NR Description: hypothetical protein [Nostoc punctiforme]
  misc_feature (1)..(195): Homolog of NCBI NO: 18203213 NR Description: ATP-dependent Clp protease proteolytic subunit 3
  misc_feature (1)..(193): Homolog of NCBI NO: 23043112 NR Description: hypothetical protein [Trichodesmium erythraeum
  misc_feature (1)..(196): Homolog of NCBI NO: 33240837 NR Description: Protease subunit of ATP-dependent Clp protease
  misc_feature (12)..(192): Homolog of NCBI NO: 30023185 NR Description: ATP-dependent Clp protease proteolytic subunit cereus ATCC 14579] >gi|17981472|gb|AAL51030.1|AF454757_1 ClpP1

SEQ ID NO: 85450 - DNA, 1277 bp, Arabidopsis thaliana
  misc_feature (1)..(1277): Ceres Seq. ID no. 12680525
  misc_feature: MA Experiment ID: 20000184 Result: Down-regulated in Transcription
  misc_feature: MA Experiment 20000184 PARAMETER Experiment Name: At_Shoots__P Parameter: Age (day) Value: 7
  misc_feature: MA Experiment 20000184 PARAMETER Experiment Name: At_Shoots__P Parameter: Tissue Value: Shoots vs. Whole Plant
  misc_feature: MA Experiment ID: 20000227 Result: Down-regulated in Transcription
  misc_feature: MA Experiment 20000227 PARAMETER Experiment Name: At_Root-Tips-vs-Tops_P Parameter: Tissue Value: Root Tips vs. Root Tops
atattcatcactttcgttgttaagacggaaaaaaaaaaaaaagaggcagaaccaaaaaactttagggttcgatttcgctccttggtaatcaccatgtccggagaagaagaagagaacgccgccgaactcaagatcggagatggtacttctctattctcttcgccatatcccccgctgtgtacctcaaaattagggtttctttgcctcatcgaattgatcttaattcaatacgatttaattgagcttaactgtatcgaaaatcccttaattatttgagatttatcatcgaaattgatgggttttattctctttgacaaaagagtttttgaaggcaaagtgcttaatgaactgtgaagtctctttgattcttgagcacaagtttgaacagcttcagcaaatctcagaggatcctatgaatcaagtttctcaagtgtttgagaagtccttgcaatatgtgaagcgattcagccgctacaagaatccagatgctgttagacaagttcgagagtatcctttttctgaattagtttgattcaaagtttttaagtaatcgttgctttgacatgcttccttcttgatgagtgagattttacagtcactggtttaattctatagttttgtgagaatatgctattccttaactcaacttttgcagaatactaagcagacatcaactcactgagtttgaggtacaatgttaaatctcttgagattggatttttgtttatcaattaagtcgtttcggtagaagacttaaaacattgcattgttcattattgaacagctatgtgttcttggcaatctctgtcctgaaactgttgaagaagcagtggcaatggttccttctcttaaggtaaataaagattctactttttctattcagtggagataataagataacctcaaaaggacaaattgtattgttatgtaagtggacttttgagatgatgtaagcttctcttttgtgtagacaaaaggaagagctcatgatgatgaagctattgagaagatgctcaatgatctctcacttgtcaagagattcgagtagtgcagaagattctcaagatctaagattctgaacatttagcaggatgctttacttgccttctagctgatctggagttaattcgccacgtctgaaattataaagctttaatgcctagaatttctggaatgataccttcatgttaaatgaatgtaatttacaacggatgatccaagcttttaatgaaatataccatctctttttcactaaatcaagtaagggatgacactat

SEQ ID NO: 85451 - protein, 91 aa, Arabidopsis thaliana
  peptide (1)..(91): Ceres Seq. ID no. 12680526
  misc_feature (32)..(47): Homolog of NCBI NO: 15242547 NR Description: 15.9 kDa subunit of RNA polymerase II protein id: At5g09920.1, supported by cDNA: 21208. [Arabidopsis >gi|2760362|gb|AAB95261.1| 15.9 kDa subunit of RNA polymerase II
IFITFVVKTEKKKKEAEPKNFRVRFRSLVITMSGEEEENAAELKIGDGTSLFSSPYPPLCTSKLGFLCLIELILIQYDLIELNCIENPLII

SEQ ID NO: 85452 - protein, 62 aa, Arabidopsis thaliana
  peptide (1)..(62): Ceres Seq. ID no. 12680527
  misc_feature (1)..(55): Pfam Name: RNA polymerase Rpb4 Pfam Description: RNA polymerase Rpb4
  misc_feature (1)..(55): Homolog of NCBI NO: 15242547 NR Description: 15.9 kDa subunit of RNA polymerase II protein id: At5g09920.1, supported by cDNA: 21208. [Arabidopsis >gi|2760362|gb|AAB95261.1| 15.9 kDa subunit of RNA polymerase II
  misc_feature (1)..(54): Homolog of NCBI NO: 4758574 NR Description: DNA directed RNA polymerase II polypeptide D; DNA RNA polymerase II 16 kda polypeptide [Homo sapiens] RIKEN cDNA 2610028L19 [Mus musculus] subunit hsRPB4 [Homo
  misc_feature (1)..(54): Homolog of NCBI NO: 34878674 NR Description: similar to RIKEN cDNA 2610028L19 [Rattus
  misc_feature (7)..(54): Homolog of NCBI NO: 28076931 NR Description: RIKEN cDNA 2610028L19 [Mus musculus]
MNCEVSLILEHKFEQLQQISEDPMNQVSQVFEKSLQYVKRFSRYKNPDAVRQVREYPFSELV

SEQ ID NO: 85453 - protein, 60 aa, Arabidopsis thaliana
  peptide (1)..(60): Ceres Seq. ID no. 12680528
  misc_feature (1)..(16): Homolog of NCBI NO: 15242547 NR Description: 15.9 kDa subunit of RNA polymerase II protein id: At5g09920.1, supported by cDNA: 21208. [Arabidopsis >gi|2760362|gb|AAB95261.1| 15.9 kDa subunit of RNA polymerase II
MSGEEEENAAELKIGDGTSLFSSPYPPLCTSKLGFLCLIELILIQYDLIELNCIENPLII

SEQ ID NO: 85454 - DNA, 654 bp, Arabidopsis thaliana
  misc_feature (1)..(654): Ceres Seq. ID no. 12680604
  misc_feature: MA Experiment ID: 108577 Result: Down-regulated in Transcription
  misc_feature: MA Experiment 108577 PARAMETER Experiment Name: At_42deg_Heat_cDNA_P Parameter: Temperature (deg C) Value: 42 vs. 22
  misc_feature: MA Experiment 108577 PARAMETER Experiment Name: At_42deg_Heat_cDNA_P Parameter: Timepoint (hr) Value: 6
  misc_feature: MA Experiment 108577 PARAMETER Experiment Name: At_42deg_Heat_cDNA_P Parameter: Tissue Value: Aerial
  misc_feature: MA Experiment ID: 108595 Result: Down-regulated in Transcription
  misc_feature: MA Experiment 108595 PARAMETER Experiment Name: At_Ler-pi_Ovule_cDNA_P Parameter: Plant Line Value: null
  misc_feature: MA Experiment ID: 20000111 Result: Down-regulated in Transcription
  misc_feature: MA Experiment 20000111 PARAMETER Experiment Name: At_42deg_Heat_cDNA_P Parameter: Temperature (deg C) Value: 42 vs. 22
  misc_feature: MA Experiment 20000111 PARAMETER Experiment Name: At_42deg_Heat_cDNA_P Parameter: Timepoint (hr) Value: 6
  misc_feature: MA Experiment 20000111 PARAMETER Experiment Name: At_42deg_Heat_cDNA_P Parameter: Tissue Value: Aerial
  misc_feature: MA Experiment ID: 20000307 Result: Up-regulated in Transcription
  misc_feature: MA Experiment 20000307 PARAMETER Experiment Name: At_Germinating_Seeds_Sub_P Parameter: Age (hr) Value: 24 vs. 0
  misc_feature: MA Experiment 20000307 PARAMETER Experiment Name: At_Germinating_Seeds_Sub_P Parameter: Organism Value: A. thaliana
  misc_feature: MA Experiment 20000307 PARAMETER Experiment Name: At_Germinating_Seeds_Sub_P Parameter: Plant Line Value: WS
  misc_feature: MA Experiment 20000307 PARAMETER Experiment Name: At_Germinating_Seeds_Sub_P Parameter: Tissue Value: Germinating Seeds
  misc_feature: MA Experiment ID: 20000328 Result: Down-regulated in Transcription
  misc_feature: MA Experiment 20000328 PARAMETER Experiment Name: At_42deg_Heat_Sub_P Parameter: Age (day) Value: 14
  misc_feature: MA Experiment 20000328 PARAMETER Experiment Name: At_42deg_Heat_Sub_P Parameter: Organism Value: A. thaliana
  misc_feature: MA Experiment 20000328 PARAMETER Experiment Name: At_42deg_Heat_Sub_P Parameter: Plant Line Value: WS
  misc_feature: MA Experiment 20000328 PARAMETER Experiment Name: At_42deg_Heat_Sub_P Parameter: Temperature (deg C) Value: 42 vs. 22
  misc_feature: MA Experiment 20000328 PARAMETER Experiment Name: At_42deg_Heat_Sub_P Parameter: Timepoint (hr) Value: 6
  misc_feature: MA Experiment 20000328 PARAMETER Experiment Name: At_42deg_Heat_Sub_P Parameter: Tissue Value: Aerial
accaacgttgattcttcttcttcttcttcttctctctttctcatctaaaccaaaaaatggcagatcagctcaccgatgatcagatctctgagttcaaggaagcttttagccttttcgacaaagacggagatggttgcatcacaacgaaagagctaggaacagtgatgagatcattaggtcaaaatccaacagaagcagagttacaagatatgataaacgaagtagatgctgatggtaacggaaccatagacttccctgagtttctgaacctaatggctaggaagatgaaggacactgactctgaagaagagctcaaagaagctttcagggttttcgataaggaccagaacggtttcatctcggcagctgagttaagacatgtaatgacaaatcttggtgagaagttaactgatgaagaagttgatgagatgatcaaagaagctgatgttgatggagatggtcagatcaattatgaagagtttgtcaaagttatgatggcaaagtgaggaaactattctcatatcttttctctctttttctttctttctttttttgaattgaacaactctgattattgctttattctatgtttgactgttcattattatgcattcgtcccaaatttcatgttatgaactattttgtgactttggg

SEQ ID NO: 85455 - protein, 149 aa, Arabidopsis thaliana; identical to SEQ ID NO: 29417
  peptide (1)..(149): Ceres Seq. ID no. 12680605
  misc_feature (12)..(40): Pfam Name: EF hand Pfam Description: EF hand
  misc_feature (1)..(149): Homolog of NCBI NO: 15225840 NR Description: calmodulin; protein id: At2g27030.1, supported by gi_166650 [Arabidopsis thaliana] >gi|15226835|ref|NP_181644.1|
  misc_feature (1)..(149): Homolog of NCBI NO: 30683369 NR Description: calmodulin [Arabidopsis thaliana]
  misc_feature (1)..(149): Homolog of NCBI NO: 15229784 NR Description: calmodulin 7; protein id: At3g43810.1, supported cDNA: 7008., supported by cDNA: gi_5825597 [Arabidopsis thaliana]
  misc_feature (1)..(149): Homolog of NCBI NO: 34304715 NR Description: calmodulin 4 [Daucus carota]
  misc_feature (1)..(149): Homolog of NCBI NO: 3121848 NR Description: CALMODULIN >gi|1835521|gb|AAB46588.1| calmodulin annuum] >gi|7643792|gb|AAF65511.1| calmodulin [Capsicum annuum]
  misc_feature (1)..(149): Homolog of NCBI NO: 34903134 NR Description: unnamed protein product [Oryza sativa (japonica
  misc_feature (1)..(149): Homolog of NCBI NO: 115515 NR Description: Calmodulin >gi|71683|pir||MCAA calmodulin -
  misc_feature (1)..(149): Homolog of NCBI NO: 3121849 NR Description: CALMODULIN >gi|1773321|gb|AAB68399.1| calmodulin
  misc_feature (1)..(149): Homolog of NCBI NO: 30688187 NR Description: calmodulin-6 (CAM6) [Arabidopsis thaliana]
  misc_feature (1)..(149): Homolog of NCBI NO: 289525 NR Description: calmodulin

SEQ ID NO: 85456 - protein, 113 aa, Arabidopsis thaliana; identical to SEQ ID NO: 29418
  peptide (1)..(113): Ceres Seq. ID no. 12680606
  misc_feature (1)..(113): Homolog of NCBI NO: 15225840 NR Description: calmodulin; protein id: At2g27030.1, supported by gi_166650 [Arabidopsis thaliana] >gi|15226835|ref|NP_181644.1|
  misc_feature (1)..(113): Homolog of NCBI NO: 30683369 NR Description: calmodulin [Arabidopsis thaliana]
  misc_feature (1)..(113): Homolog of NCBI NO: 15229784 NR Description: calmodulin 7; protein id: At3g43810.1, supported cDNA: 7008., supported by cDNA: gi_5825597 [Arabidopsis thaliana]
  misc_feature (1)..(113): Homolog of NCBI NO: 34304715 NR Description: calmodulin 4 [Daucus carota]
  misc_feature (1)..(113): Homolog of NCBI NO: 3121848 NR Description: CALMODULIN >gi|1835521|gb|AAB46588.1| calmodulin annuum] >gi|7643792|gb|AAF65511.1| calmodulin [Capsicum annuum]
  misc_feature (1)..(113): Homolog of NCBI NO: 34903134 NR Description: unnamed protein product [Oryza sativa (japonica
  misc_feature (1)..(113): Homolog of NCBI NO: 115515 NR Description: Calmodulin >gi|71683|pir||MCAA calmodulin -
  misc_feature (1)..(113): Homolog of NCBI NO: 3121849 NR Description: CALMODULIN >gi|1773321|gb|AAB68399.1| calmodulin
  misc_feature (1)..(113): Homolog of NCBI NO: 30688187 NR Description: calmodulin-6 (CAM6) [Arabidopsis thaliana]
  misc_feature (1)..(113): Homolog of NCBI NO: 289525 NR Description: calmodulin

SEQ ID NO: 85457 - protein, 98 aa, Arabidopsis thaliana; identical to SEQ ID NO: 29419
  peptide (1)..(98): Ceres Seq. ID no. 12680607
  misc_feature (1)..(98): Homolog of NCBI NO: 15225840 NR Description: calmodulin; protein id: At2g27030.1, supported by gi_166650 [Arabidopsis thaliana] >gi|15226835|ref|NP_181644.1|
  misc_feature (1)..(98): Homolog of NCBI NO: 30683369 NR Description: calmodulin [Arabidopsis thaliana]
  misc_feature (1)..(98): Homolog of NCBI NO: 15229784 NR Description: calmodulin 7; protein id: At3g43810.1, supported cDNA: 7008., supported by cDNA: gi_5825597 [Arabidopsis thaliana]
  misc_feature (1)..(98): Homolog of NCBI NO: 34304715 NR Description: calmodulin 4 [Daucus carota]
  misc_feature (1)..(98): Homolog of NCBI NO: 3121848 NR Description: CALMODULIN >gi|1835521|gb|AAB46588.1| calmodulin annuum] >gi|7643792|gb|AAF65511.1| calmodulin [Capsicum annuum]
  misc_feature (1)..(98): Homolog of NCBI NO: 34903134 NR Description: unnamed protein product [Oryza sativa (japonica
  misc_feature (1)..(98): Homolog of NCBI NO: 115515 NR Description: Calmodulin >gi|71683|pir||MCAA calmodulin -
  misc_feature (1)..(98): Homolog of NCBI NO: 3121849 NR Description: CALMODULIN >gi|1773321|gb|AAB68399.1| calmodulin
  misc_feature (1)..(98): Homolog of NCBI NO: 30688187 NR Description: calmodulin-6 (CAM6) [Arabidopsis thaliana]
  misc_feature (1)..(98): Homolog of NCBI NO: 289525 NR Description: calmodulin

SEQ ID NO: 85458 - DNA, 1691 bp, Arabidopsis thaliana
  misc_feature (1)..(1691): Ceres Seq. ID no. 12680616
  misc_feature: MA Experiment ID: 108573 Result: Up-regulated in Transcription
  misc_feature: MA Experiment 108573 PARAMETER Experiment Name: At_Drought_cDNA_P Parameter: Timepoint (hr) Value: 6
  misc_feature: MA Experiment 108573 PARAMETER Experiment Name: At_Drought_cDNA_P Parameter: Tissue Value: Aerial
  misc_feature: MA Experiment 108573 PARAMETER Experiment Name: At_Drought_cDNA_P Parameter: Treatment Value: Drought vs. No Drought
  misc_feature: MA Experiment ID: 108595 Result: Down-regulated in Transcription
  misc_feature: MA Experiment 108595 PARAMETER Experiment Name: At_Ler-pi_Ovule_cDNA_P Parameter: Plant Line Value: null
atcgctttgcataatccattccttcttctctcttctccatctccttcctccgatcttcgtctccaattcggaatcttcctatcacaatttcaaggctcctttaacccttgatcatcaccgattcaatcaattcggaatcacaatttcaaatcgagagaatttcaatttctcttgtaaaaccctaaattatgtacagcaatttcaaggaacaagcgatcgagtacgtgaagcaagcggttcatgaagacaatgctgggaattacaataaagctttccctctatacatgaacgcgcttgagtacttcaaaactcatctcaagtatgagaagaaccctaagatcagagaagctattacccagaaattcaccgagtatctccgtcgtgctgaggagatccgtgctgttctcgatgaaggtggatcgggtccaggatctaacggtgatgcagccgtcgcaacgaggcccaaaactaagcctaaagatggagaaggtggtggtaaagatggagaagatcctgaacaatcaaagcttcgagctgggttaaactctgcgattgttagagagaaacctaatatcaagtggtcagatgttgctgggcttgaaagtgctaaacaagctctgcaggaagctgtgattttgcctgtcaagtttccacagttcttcactggaaagagacggccttggagagcttttctgttgtatgggcctcctggaacaggaaaatcgtatttggctaaggctgttgccactgaagctgactctaccttttttagcgtgtcttcatcagaccttgtctcgaagtggatgggtgaaagtgagaagctagtatcaaaccttttcgagatggcccgtgaaagtgctccctcgattatttttgttgatgagatagattctttgtgtggtacacgtggagaaggaaacgagagtgaagcttcaagacgtatcaaaacagagcttctagtgcagatgcagggtgttggacacaatgatgagaaagtacttgtacttgcagcaaccaatacaccctatgctcttgatcaggctatccggcgacgttttgacaagcgtatctatattcctctcccagaggccaaggctcggcagcacatgttcaaagtccacttgggagatacacctcataatttaactgaacctgattttgaatatttaggccaaaagacagaagggttttctggttcagatgtgtctgtttgtgtaaaagatgttctgtttgaacctgttcgtaaaacacaagatgcaatgttctttttcaagtctcctgatggtacatggatgccatgtgggcctaggcaccctggtgccatccagactacaatgcaagatctagcaacaaaagggcttgccgaaattattccaccaccaatcaccagaacagatttcgagaaggtacttgcaagacaaaggccaacagtgagcaagtctgaccttgatgtccacgagagattcacacaggagtttggagaagaaggttgatagatttgacattcccatcaagcatctttcacaatcatattattattagtctcttcaccatctccttatgtatgtactgagaagcaaaacaaaatctcaaacccatgtttgatttcttcccaaaacattgaatttgctttatttctcgaattgtgtaaaaaaaaaatgttctgaacaatgttttctatttattatgtc

SEQ ID NO: 85459 - protein, 434 aa, Arabidopsis thaliana; identical to SEQ ID NO: 26747
  peptide (1)..(434): Ceres Seq. ID no. 12680617
  misc_feature (167)..(352): Pfam Name: ATPase family associated with various cellular Pfam Description: ATPase family associated with various cellular
  misc_feature (1)..(434): Homolog of NCBI NO: 21593336 NR Description: putative ATPase [Arabidopsis thaliana]
  misc_feature (1)..(434): Homolog of NCBI NO: 15226199 NR Description: putative ATPase; protein id: At2g27600.1, by cDNA: 3818., supported by cDNA: gi_13605796, supported by
  misc_feature (1)..(392): Homolog of NCBI NO: 22652796 NR Description: AAA-ATPase-like protein [Oryza sativa (japonica
  misc_feature (98)..(430): Homolog of NCBI NO: 34895696 NR Description: putative AAA-type ATPase [Oryza sativa (japonica
  misc_feature (1)..(93): Homolog of NCBI NO: 34895696 NR Description: putative AAA-type ATPase [Oryza sativa (japonica
  misc_feature (146)..(434): Homolog of NCBI NO: 16265863 NR Description: suppressor of K+ transport growth defect-like
  misc_feature (4)..(434): Homolog of NCBI NO: 27503354 NR Description: Similar to vacuolar protein sorting 4B (yeast)
  misc_feature (7)..(434): Homolog of NCBI NO: 17865802 NR Description: vacuolar protein sorting factor 4B; suppressor of transport defect 1 [Homo sapiens] vacuolar protein sorting factor 4B [Homo sapiens]
  misc_feature (7)..(434): Homolog of NCBI NO: 9087199 NR Description: SKD1 protein (Vacuolar sorting protein 4b)
  misc_feature (3)..(434): Homolog of NCBI NO: 40744456 NR Description: hypothetical protein AN3061.2 [Aspergillus

SEQ ID NO: 85460 - protein, 402 aa, Arabidopsis thaliana; identical to SEQ ID NO: 26748
  peptide (1)..(402): Ceres Seq. ID no. 12680618
  misc_feature (135)..(320): Pfam Name: ATPase family associated with various cellular Pfam Description: ATPase family associated with various cellular
  misc_feature (1)..(402): Homolog of NCBI NO: 21593336 NR Description: putative ATPase [Arabidopsis thaliana]
  misc_feature (1)..(402): Homolog of NCBI NO: 15226199 NR Description: putative ATPase; protein id: At2g27600.1, by cDNA: 3818., supported by cDNA: gi_13605796, supported by
  misc_feature (1)..(360): Homolog of NCBI NO: 22652796 NR Description: AAA-ATPase-like protein [Oryza sativa (japonica
  misc_feature (66)..(398): Homolog of NCBI NO: 34895696 NR Description: putative AAA-type ATPase [Oryza sativa (japonica
  misc_feature (1)..(61): Homolog of NCBI NO: 34895696 NR Description: putative AAA-type ATPase [Oryza sativa (japonica
  misc_feature (114)..(402): Homolog of NCBI NO: 16265863 NR Description: suppressor of K+ transport growth defect-like
  misc_feature (1)..(402): Homolog of NCBI NO: 27503354 NR Description: Similar to vacuolar protein sorting 4B (yeast)
  misc_feature (1)..(402): Homolog of NCBI NO: 17865802 NR Description: vacuolar protein sorting factor 4B; suppressor of transport defect 1 [Homo sapiens] vacuolar protein sorting factor 4B [Homo sapiens]
  misc_feature (1)..(402): Homolog of NCBI NO: 9087199 NR Description: SKD1 protein (Vacuolar sorting protein 4b)
  misc_feature (1)..(402): Homolog of NCBI NO: 40744456 NR Description: hypothetical protein AN3061.2 [Aspergillus

SEQ ID NO: 85461 - protein, 229 aa, Arabidopsis thaliana; identical to SEQ ID NO: 26749
  peptide (1)..(229): Ceres Seq. ID no. 12680619
  misc_feature (1)..(147): Pfam Name: ATPase family associated with various cellular Pfam Description: ATPase family associated with various cellular
  misc_feature (1)..(229): Homolog of NCBI NO: 21593336 NR Description: putative ATPase [Arabidopsis thaliana]
  misc_feature (1)..(229): Homolog of NCBI NO: 15226199 NR Description: putative ATPase; protein id: At2g27600.1, by cDNA: 3818., supported by cDNA: gi_13605796, supported by
  misc_feature (1)..(187): Homolog of NCBI NO: 22652796 NR Description: AAA-ATPase-like protein [Oryza sativa (japonica
  misc_feature (1)..(225): Homolog of NCBI NO: 34895696 NR Description: putative AAA-type ATPase [Oryza sativa (japonica
  misc_feature (1)..(229): Homolog of NCBI NO: 16265863 NR Description: suppressor of K+ transport growth defect-like
  misc_feature (1)..(229): Homolog of NCBI NO: 27503354 NR Description: Similar to vacuolar protein sorting 4B (yeast)
  misc_feature (1)..(229): Homolog of NCBI NO: 17865802 NR Description: vacuolar protein sorting factor 4B; suppressor of transport defect 1 [Homo sapiens] vacuolar protein sorting factor 4B [Homo sapiens]
  misc_feature (1)..(229): Homolog of NCBI NO: 9087199 NR Description: SKD1 protein (Vacuolar sorting protein 4b)
  misc_feature (1)..(229): Homolog of NCBI NO: 40744456 NR Description: hypothetical protein AN3061.2 [Aspergillus
  misc_feature (1)..(228): Homolog of NCBI NO: 38075589 NR Description: similar to SKD1 [Mus musculus]

SEQ ID NO: 85462 - DNA, 839 bp, Arabidopsis thaliana
  misc_feature (1)..(839): Ceres Seq. ID no. 12680620
  misc_feature: MA Experiment ID: 108434 Result: Down-regulated in Transcription
  misc_feature: MA Experiment 108434 PARAMETER Experiment Name: At_Root_Tips_cDNA_P Parameter: Tissue Value: Root Tips
  misc_feature: MA Experiment ID: 108464 Result: Up-regulated in Transcription
  misc_feature: MA Experiment 108464 PARAMETER Experiment Name: At_Germinating_Seeds_cDNA_P Parameter: Age (day) Value: 4 vs. 0
  misc_feature: MA Experiment 108464 PARAMETER Experiment Name: At_Germinating_Seeds_cDNA_P Parameter: Tissue Value: Germinating Seeds
  misc_feature: MA Experiment ID: 108488 Result: Down-regulated in Transcription
  misc_feature: MA Experiment ID: 108573 Result: Up-regulated in Transcription
  misc_feature: MA Experiment 108573 PARAMETER Experiment Name: At_Drought_cDNA_P Parameter: Timepoint (hr) Value: 6
  misc_feature: MA Experiment 108573 PARAMETER Experiment Name: At_Drought_cDNA_P Parameter: Tissue Value: Aerial
  misc_feature: MA Experiment 108573 PARAMETER Experiment Name: At_Drought_cDNA_P Parameter: Treatment Value: Drought vs. No Drought
  misc_feature: MA Experiment ID: 108576 Result: Up-regulated in Transcription
  misc_feature: MA Experiment 108576 PARAMETER Experiment Name: At_42deg_Heat_cDNA_P Parameter: Temperature (deg C) Value: 42 vs. 22
  misc_feature: MA Experiment 108576 PARAMETER Experiment Name: At_42deg_Heat_cDNA_P Parameter: Timepoint (hr) Value: 1
  misc_feature: MA Experiment 108576 PARAMETER Experiment Name: At_42deg_Heat_cDNA_P Parameter: Tissue Value: Aerial
  misc_feature: MA Experiment ID: 20000093 Result: Up-regulated in Transcription
  misc_feature: MA Experiment 20000093 PARAMETER Experiment Name: At_42deg_Heat_cDNA_P Parameter: Temperature (deg C) Value: 42 vs. 22
  misc_feature: MA Experiment 20000093 PARAMETER Experiment Name: At_42deg_Heat_cDNA_P Parameter: Timepoint (hr) Value: 0.5
  misc_feature: MA Experiment 20000093 PARAMETER Experiment Name: At_42deg_Heat_cDNA_P Parameter: Tissue Value: Aerial
  misc_feature: MA Experiment ID: 20000111 Result: Up-regulated in Transcription
  misc_feature: MA Experiment 20000111 PARAMETER Experiment Name: At_42deg_Heat_cDNA_P Parameter: Temperature (deg C) Value: 42 vs. 22
  misc_feature: MA Experiment 20000111 PARAMETER Experiment Name: At_42deg_Heat_cDNA_P Parameter: Timepoint (hr) Value: 6
  misc_feature: MA Experiment 20000111 PARAMETER Experiment Name: At_42deg_Heat_cDNA_P Parameter: Tissue Value: Aerial
  misc_feature: MA Experiment ID: 20000112 Result: Up-regulated in Transcription
  misc_feature: MA Experiment 20000112 PARAMETER Experiment Name: At_42deg_Heat_cDNA_P Parameter: Temperature (deg C) Value: 42 vs. 22
  misc_feature: MA Experiment 20000112 PARAMETER Experiment Name: At_42deg_Heat_cDNA_P Parameter: Timepoint (hr) Value: 2
  misc_feature: MA Experiment 20000112 PARAMETER Experiment Name: At_42deg_Heat_cDNA_P Parameter: Tissue Value: Aerial
  misc_feature: MA Experiment ID: 20000113 Result: Up-regulated in Transcription
  misc_feature: MA Experiment 20000113 PARAMETER Experiment Name: At_42deg_Heat_cDNA_P Parameter: Temperature (deg C) Value: 42 vs. 22
  misc_feature: MA Experiment 20000113 PARAMETER Experiment Name: At_42deg_Heat_cDNA_P Parameter: Timepoint (hr) Value: 8
  misc_feature: MA Experiment 20000113 PARAMETER Experiment Name: At_42deg_Heat_cDNA_P Parameter: Tissue Value: Aerial
  misc_feature: MA Experiment ID: 20000144 Result: Up-regulated in Transcription
  misc_feature: MA Experiment 20000144 PARAMETER Experiment Name: At_42deg_Heat_cDNA_P Parameter: Temperature (deg C) Value: 42 vs. 22
  misc_feature: MA Experiment 20000144 PARAMETER Experiment Name: At_42deg_Heat_cDNA_P Parameter: Timepoint (hr) Value: 1
  misc_feature: MA Experiment 20000144 PARAMETER Experiment Name: At_42deg_Heat_cDNA_P Parameter: Tissue Value: Aerial
gtcgtcgttagttttcccatttcctcataattcttcatctctttcctttctcatctctcgattcctttctttctttccatattccattgatttctctcttcttataaaaatacagattctctcttcttagaaccatcaccgattcgaacagatctaataaatcgtttttttcaccagatttttttcgccggagtttgttttgatccattctgttatggcggaagaacacagacttcaagaaccacgattatgtgctaacaattgtggcttcttcggaagcacagctacacaaaatctctgttccaaatgttttcgagatcttcaacatcaagaacaaaactcttccaccgccaaacatgctcttacccaatccttagccgccgttggcgctgctgcgtcttcctccgtgtcgccaccgcctccgcctccagctgattcgaaagaaatcgttgaagcgaaatcagagaaacgagcggcggctgaaccggaggaggcggatggtccgccgcaagatccgaagcggtgtttgacttgtcggcggcgcgtgggaatcacggggtttcggtgtaggtgtggtttcgttttctgcgggacgcataggtacgcggagcaacatgaatgttcgtttgatttcaagcggatggggaaggataagatcgctaaagcgaatccgattgtgaaagctgataagcttgagaagatttgactttgttgtttgttgtttgttgttgttgctttggttttgtgcgtttgaatgaaacacacatgaagaagaaagagcaagaaacaaacatgtcaatgtaaatttaagctttatttgatgatttcttcagtttggt

SEQ ID NO: 85463 - protein, 163 aa, Arabidopsis thaliana; identical to SEQ ID NO: 29477
  peptide (1)..(163): Ceres Seq. ID no. 12680621
  misc_feature (104)..(144): Pfam Name: AN1-like Zinc finger Pfam Description: AN1-like Zinc finger
  misc_feature (1)..(163): Homolog of NCBI NO: 15225894 NR Description: putative zinc finger protein; protein id: supported by cDNA: 14203., supported by cDNA: gi_18253038
  misc_feature (1)..(163): Homolog of NCBI NO: 15231686 NR Description: zinc finger - like protein; protein id: supported by cDNA: gi_14596166 [Arabidopsis thaliana]
  misc_feature (1)..(163): Homolog of NCBI NO: 14596167 NR Description: zinc finger-like protein [Arabidopsis thaliana]
  misc_feature (1)..(163): Homolog of NCBI NO: 18404102 NR Description: expressed protein; protein id: At2g36320.1, by cDNA: 24255. [Arabidopsis thaliana] >gi|25408460|pir||C84779
  misc_feature (9)..(163): Homolog of NCBI NO: 15234402 NR Description: putative protein; protein id: At4g12040.1, by cDNA: 45., supported by cDNA: gi_13605498 [Arabidopsis
  misc_feature (9)..(163): Homolog of NCBI NO: 8778645 NR Description: F5O11.17 [Arabidopsis thaliana]
  misc_feature (9)..(163): Homolog of NCBI NO: 15221329 NR Description: hypothetical protein; protein id: At1g12440.1
  misc_feature (4)..(162): Homolog of NCBI NO: 15235819 NR Description: similar to zinc finger - like protein; protein
  misc_feature (5)..(163): Homolog of NCBI NO: 30908921 NR Description: putative zinc finger transcription factor ZFP33
  misc_feature (10)..(163): Homolog of NCBI NO: 18403408 NR Description: expressed protein; protein id: At1g51200.1, by cDNA: gi_15912334 [Arabidopsis thaliana]

SEQ ID NO: 85464 - DNA, 1164 bp, Arabidopsis thaliana
  misc_feature (1)..(1164): Ceres Seq. ID no. 12680656
  misc_feature: MA Experiment ID: 20000451 Result: Up-regulated in Transcription
  misc_feature: MA Experiment 20000451 PARAMETER Experiment Name: At_CS6879_Shoots-Roots_P Parameter: Age (day) Value: 14
  misc_feature: MA Experiment 20000451 PARAMETER Experiment Name: At_CS6879_Shoots-Roots_P Parameter: Organism Value: A. thaliana
  misc_feature: MA Experiment 20000451 PARAMETER Experiment Name: At_CS6879_Shoots-Roots_P Parameter: Plant Line Value: CS6879 vs. WS
  misc_feature: MA Experiment 20000451 PARAMETER Experiment Name: At_CS6879_Shoots-Roots_P Parameter: Tissue Value: Roots
  misc_feature: MA Experiment ID: 20000573 Result: Down-regulated in Transcription
  misc_feature: MA Experiment 20000573 PARAMETER Experiment Name: At_100uM_ABA_Mutants__P Parameter: Organism Value: A. thaliana
  misc_feature: MA Experiment 20000573 PARAMETER Experiment Name: At_100uM_ABA_Mutants__P Parameter: Plant Line Value: CS22 vs. Ler wt
  misc_feature: MA Experiment 20000573 PARAMETER Experiment Name: At_100uM_ABA_Mutants__P Parameter: Timepoint (hr) Value: N/A
  misc_feature: MA Experiment 20000573 PARAMETER Experiment Name: At_100uM_ABA_Mutants__P Parameter: Tissue Value: Whole Plant
  misc_feature: MA Experiment 20000573 PARAMETER Experiment Name: At_100uM_ABA_Mutants__P Parameter: Treatment Value: None
aaatttgacaatggcaagaatcggaagctttctcattattctttacctcatttacgctcttactctctgcatctgcgacgacgacgagagtaactatggcggcgacaaagggaacctcttcccaggtttctacagaagctcgtgccctagagccgaggagatcgtgaggtcagttgtagccaaagctgttgcaagggaggctccatttccacgattgtttcgttcagggttgtgatggatcgttgcttctagacaccagtgggagtatagttactgagaagaactctaacccgaacagcagatcggctcgcgggtttgaagttgttgacgagatcaaggcagcattagagaacgaatgccctaacactgtttcttgtgctgatgccttaactctagccgctagagactcctctgttcttactggtggaccaagctggatggttcctttgggaagaagagattcgacaagtgcaagcttgagtggatcaaacaacaacattcctgcacccaacaacactttcaacacaattgtcacgagatttaacaaccaaggtctcgatctcaccgacgttgttgctctctccgggagccacaccattggattttcaagatgcactagtttcagacagagactgtacaaccaatccggaaacggaagtcccgacagaaccttagagcaatcctacgctgctaacttgcgccaaaggtgccctagatcgggtggggaccagaacctgtcagagcttgacatcaacagcgctggaagatttgataacagctacttcaagaacttgatcgagaacatgggactgttgaattccgacgaggtcttgttctctagcaatgagcaatcaagagagctcgtcaagaagtatgcagaggatcaagaagagttcttcgagcagttcgcggagtcgatgatcaagatggggaatatctctcccttgacaggttcgagtggtgagatcagaaagaattgcaggaaaattaataactcttgatttcctagtatcggatgggagaaatagaaatgtgacatgttttggaggaaggaatttatgtttatgtttttttttatattgtatgagtctgtatttctttgtgtcaagaatttgaattttgtaagtttaaatgattgaaactatctataattaaaatgttatt

SEQ ID NO: 85465 - protein, 187 aa, Arabidopsis thaliana
  peptide (1)..(187): Ceres Seq. ID no. 12680657
  misc_feature (1)..(149): Pfam Name: Peroxidase Pfam Description: Peroxidase
  misc_feature (1)..(187): Homolog of NCBI NO: 15224116 NR Description: peroxidase, putative; protein id: At2g18150.1, by cDNA: 126030., supported by cDNA: gi_19698902 [Arabidopsis >gi|25453215|sp|Q9SI16|PE15_ARATH Peroxidase 15 precursor
  misc_feature (1)..(187): Homolog of NCBI NO: 21537275 NR Description: putative peroxidase [Arabidopsis thaliana]
  misc_feature (1)..(187): Homolog of NCBI NO: 15224114 NR Description: peroxidase, putative; protein id: At2g18140.1 thaliana] >gi|25453216|sp|Q9SI17|PE14_ARATH Peroxidase 14 (Atperox P14) >gi|25285614|pir||G84560 probable peroxidase
  misc_feature (1)..(186): Homolog of NCBI NO: 15234394 NR Description: peroxidase, putative; protein id: At4g36430.1, by cDNA: gi_17530561, supported by cDNA: gi_18377685 [Arabidopsis
  misc_feature (1)..(187): Homolog of NCBI NO: 15239370 NR Description: peroxidase, putative; protein id: At5g66390.1 thaliana] >gi|26397792|sp|Q9FJZ9|PE72_ARATH Peroxidase 72 (Atperox P72) (PRXR8) (ATP6a) >gi|10177520|dbj|BAB10915.1|
  misc_feature (1)..(187): Homolog of NCBI NO: 1402918 NR Description: peroxidase [Arabidopsis thaliana]
  misc_feature (1)..(186): Homolog of NCBI NO: 7658147 NR Description: peroxidase [Asparagus officinalis]
  misc_feature (1)..(185): Homolog of NCBI NO: 7453855 NR Description: peroxidase prx15 precursor [Spinacia oleracea]
  misc_feature (1)..(186): Homolog of NCBI NO: 34903044 NR Description: unnamed protein product [Oryza sativa (japonica group)] >gi|7242902|dbj|BAA92500.1| unnamed protein product
  misc_feature (1)..(185): Homolog of NCBI NO: 7453853 NR Description: peroxidase prx14 precursor [Spinacia oleracea]
MVPLGRRDSTSASLSGSNNNIPAPNNTFNTIVTRFNNQGLDLTDVVALSGSHTIGFSRCTSFRQRLYNQSGNGSPDRTLEQSYAANLRQRCPRSGGDQNLSELDINSAGRFDNSYFKNLIENMGLLNSDEVLFSSNEQSRELVKKYAEDQEEFFEQFAESMIKMGNISPLTGSSGEIRKNCRKINNS

SEQ ID NO: 85466 - DNA, 532 bp, Arabidopsis thaliana
  misc_feature (1)..(532): Ceres Seq. ID no. 12680658
  misc_feature: MA Experiment ID: 108434 Result: Up-regulated in Transcription
  misc_feature: MA Experiment 108434 PARAMETER Experiment Name: At_Root_Tips_cDNA_P Parameter: Tissue Value: Root Tips
  misc_feature: MA Experiment ID: 108462 Result: Down-regulated in Transcription
  misc_feature: MA Experiment 108462 PARAMETER Experiment Name: At_Germinating_Seeds_cDNA_P Parameter: Age (day) Value: 2 vs. 0
  misc_feature: MA Experiment 108462 PARAMETER Experiment Name: At_Germinating_Seeds_cDNA_P Parameter: Tissue Value: Germinating Seeds
  misc_feature: MA Experiment ID: 108463 Result: Down-regulated in Transcription
  misc_feature: MA Experiment 108463 PARAMETER Experiment Name: At_Germinating_Seeds_cDNA_P Parameter: Age (day) Value: 3 vs. 0
  misc_feature: MA Experiment 108463 PARAMETER Experiment Name: At_Germinating_Seeds_cDNA_P Parameter: Tissue Value: Germinating Seeds
  misc_feature: MA Experiment ID: 108464 Result: Down-regulated in Transcription
  misc_feature: MA Experiment 108464 PARAMETER Experiment Name: At_Germinating_Seeds_cDNA_P Parameter: Age (day) Value: 4 vs. 0
  misc_feature: MA Experiment 108464 PARAMETER Experiment Name: At_Germinating_Seeds_cDNA_P Parameter: Tissue Value: Germinating Seeds
  misc_feature: MA Experiment ID: 108573 Result: Down-regulated in Transcription
  misc_feature: MA Experiment 108573 PARAMETER Experiment Name: At_Drought_cDNA_P Parameter: Timepoint (hr) Value: 6
  misc_feature: MA Experiment 108573 PARAMETER Experiment Name: At_Drought_cDNA_P Parameter: Tissue Value: Aerial
  misc_feature: MA Experiment 108573 PARAMETER Experiment Name: At_Drought_cDNA_P Parameter: Treatment Value: Drought vs. No Drought
  misc_feature: MA Experiment ID: 20000794 Result: Down-regulated in Transcription
  misc_feature: MA Experiment 20000794 PARAMETER Experiment Name: At_Petals_P Parameter: Age (day) Value: 23-25 days
  misc_feature: MA Experiment 20000794 PARAMETER Experiment Name: At_Petals_P Parameter: Plant Line Value: WS
  misc_feature: MA Experiment 20000794 PARAMETER Experiment Name: At_Petals_P Parameter: Tissue Value: Petals vs. Whole plant
  misc_feature: MA Experiment ID: 20001558 Result: Up-regulated in Transcription
  misc_feature: MA Experiment 20001558 PARAMETER Experiment Name: At_Drought_Soil_Dry_P Parameter: Age (day) Value: 27
  misc_feature: MA Experiment 20001558 PARAMETER Experiment Name: At_Drought_Soil_Dry_P Parameter: Organism Value: A. thaliana
  misc_feature: MA Experiment 20001558 PARAMETER Experiment Name: At_Drought_Soil_Dry_P Parameter: Plant Line Value: WS
  misc_feature: MA Experiment 20001558 PARAMETER Experiment Name: At_Drought_Soil_Dry_P Parameter: Post Timepoint (hr) Value: 6
  misc_feature: MA Experiment 20001558 PARAMETER Experiment Name: At_Drought_Soil_Dry_P Parameter: Post-Treatment Value: Re-Water vs. No Drought
  misc_feature: MA Experiment 20001558 PARAMETER Experiment Name: At_Drought_Soil_Dry_P Parameter: Timepoint (day) Value: 13
  misc_feature: MA Experiment 20001558 PARAMETER Experiment Name: At_Drought_Soil_Dry_P Parameter: Treatment Value: Drought vs. No Drought
  misc_feature: MA Experiment ID: 20001560 Result: Up-regulated in Transcription
  misc_feature: MA Experiment 20001560 PARAMETER Experiment Name: At_Drought_Soil_Dry_P Parameter: Age (day) Value: 28
  misc_feature: MA Experiment 20001560 PARAMETER Experiment Name: At_Drought_Soil_Dry_P Parameter: Organism Value: A. thaliana
  misc_feature: MA Experiment 20001560 PARAMETER Experiment Name: At_Drought_Soil_Dry_P Parameter: Plant Line Value: WS
  misc_feature: MA Experiment 20001560 PARAMETER Experiment Name: At_Drought_Soil_Dry_P Parameter: Post Timepoint (hr) Value: None
  misc_feature: MA Experiment 20001560 PARAMETER Experiment Name: At_Drought_Soil_Dry_P Parameter: Post-Treatment Value: None
  misc_feature: MA Experiment 20001560 PARAMETER Experiment Name: At_Drought_Soil_Dry_P Parameter: Timepoint (day) Value: 14
  misc_feature: MA Experiment 20001560 PARAMETER Experiment Name: At_Drought_Soil_Dry_P Parameter: Treatment Value: Drought vs. No Drought
  misc_feature: MA Experiment ID: 20001911 Result: Down-regulated in Transcription
  misc_feature: MA Experiment 20001911 PARAMETER Experiment Name: At_Drought_Reproduction_P Parameter: Age (day) Value: 40
  misc_feature: MA Experiment 20001911 PARAMETER Experiment Name: At_Drought_Reproduction_P Parameter: Organism Value: A. thaliana
  misc_feature: MA Experiment 20001911 PARAMETER Experiment Name: At_Drought_Reproduction_P Parameter: Plant Line Value: WS
  misc_feature: MA Experiment 20001911 PARAMETER Experiment Name: At_Drought_Reproduction_P Parameter: Timepoint (day) Value: 10
  misc_feature: MA Experiment 20001911 PARAMETER Experiment Name: At_Drought_Reproduction_P Parameter: Tissue Value: Flowers
  misc_feature: MA Experiment 20001911 PARAMETER Experiment Name: At_Drought_Reproduction_P Parameter: Treatment Value: Drought vs. No Drought
tgcttctcaaagaaacgaaattaagagaaggagaaggttttacgccggagttggagactgatctagatccgccggcgaaaaagcagagccgtcacattcatcgtcggaaatcaagaaagggtaattctctgtaggatagagagacatggaagccaagtttttccggttcttgaagattgttggagttggatacaaagctagagctgaggaagcagggcgtttcttatacctcaaattgggttacagtcacgaagtcgaacttgcggttcctccagcggttcgagtcttttgtttcaagaacaatgtggtttgctgcactggaatcgacaagcaaagagtgcatcagtttgctgcaacggtaaggagttgcaaaccccctgaaccttataagggcaaaggcataatgtacactgatgaagtcgtcaagaagaaacaaggaaagaagtccaaatgatctctctttgtatgcttcttcttccttcttactctgcagagacaactttcatctatctgtggtagattatggttggat

SEQ ID NO: 85467 - protein, 102 aa, Arabidopsis thaliana; identical to SEQ ID NO: 25804
  peptide (1)..(102): Ceres Seq. ID no. 12680659
  misc_feature (12)..(89): Pfam Name: Ribosomal protein L6 Pfam Description: Ribosomal protein L6
  misc_feature (1)..(102): Homolog of NCBI NO: 25411865 NR Description: probable ribosomal protein L6 [imported] -
  misc_feature (1)..(102): Homolog of NCBI NO: 18398731 NR Description: putative ribosomal protein L6; protein id: supported by cDNA: 692., supported by cDNA: gi_14994246 thaliana] >gi|14994247|gb|AAK73258.1| putative ribosomal protein
  misc_feature (1)..(100): Homolog of NCBI NO: 11467124 NR Description: rpl6 [Marchantia polymorpha] MITOCHONDRIAL 60S RIBOSOMAL PROTEIN L6 >gi|282800|pir||S25981
  misc_feature (1)..(100): Homolog of NCBI NO: 38638291 NR Description: ribosomal protein L6 [Chara vulgaris]
  misc_feature (5)..(102): Homolog of NCBI NO: 28144880 NR Description: putative chloroplast 50S ribosomal protein L6
  misc_feature (1)..(100): Homolog of NCBI NO: 22550351 NR Description: ribosomal protein L6 [Chaetosphaeridium globosum]
  misc_feature (5)..(102): Homolog of NCBI NO: 15220443 NR Description: putative chloroplast 50S ribosomal protein, L6; id: At1g05190.1, supported by cDNA: 1730., supported by cDNA: [Arabidopsis thaliana] >gi|25295056|pir||C86186 hypothetical
  misc_feature (9)..(102): Homolog of NCBI NO: 26554450 NR Description: ribosomal protein L6 [Mycoplasma penetrans]
  misc_feature (5)..(100): Homolog of NCBI NO: 11466518 NR Description: ribosomal protein L6 [Reclinomonas americana]
  misc_feature (1)..(100): Homolog of NCBI NO: 22966107 NR Description: hypothetical protein [Rhodospirillum rubrum]

SEQ ID NO: 85468 - DNA, 808 bp, Arabidopsis thaliana
  misc_feature (1)..(808): Ceres Seq. ID no. 12680664
  misc_feature: MA Experiment ID: 108461 Result: Up-regulated in Transcription
  misc_feature: MA Experiment 108461 PARAMETER Experiment Name: At_Germinating_Seeds_cDNA_P Parameter: Age (day) Value: 1 vs. 0
  misc_feature: MA Experiment 108461 PARAMETER Experiment Name: At_Germinating_Seeds_cDNA_P Parameter: Tissue Value: Germinating Seeds
  misc_feature: MA Experiment ID: 108462 Result: Up-regulated in Transcription
  misc_feature: MA Experiment 108462 PARAMETER Experiment Name: At_Germinating_Seeds_cDNA_P Parameter: Age (day) Value: 2 vs. 0
  misc_feature: MA Experiment 108462 PARAMETER Experiment Name: At_Germinating_Seeds_cDNA_P Parameter: Tissue Value: Germinating Seeds
  misc_feature: MA Experiment ID: 108463 Result: Up-regulated in Transcription
  misc_feature: MA Experiment 108463 PARAMETER Experiment Name: At_Germinating_Seeds_cDNA_P Parameter: Age (day) Value: 3 vs. 0
  misc_feature: MA Experiment 108463 PARAMETER Experiment Name: At_Germinating_Seeds_cDNA_P Parameter: Tissue Value: Germinating Seeds
  misc_feature: MA Experiment ID: 108595 Result: Down-regulated in Transcription
  misc_feature: MA Experiment 108595 PARAMETER Experiment Name: At_Ler-pi_Ovule_cDNA_P Parameter: Plant Line Value: null
  misc_feature: MA Experiment ID: 108607 Result: Up-regulated in Transcription
  misc_feature: MA Experiment 108607 PARAMETER Experiment Name: At_100uM_ABA_cDNA_P Parameter: Timepoint (hr) Value: 4
  misc_feature: MA Experiment 108607 PARAMETER Experiment Name: At_100uM_ABA_cDNA_P Parameter: Tissue Value: Aerial
  misc_feature: MA Experiment 108607 PARAMETER Experiment Name: At_100uM_ABA_cDNA_P Parameter: Treatment Value: 100uM ABA vs. No Treatment
  misc_feature: MA Experiment ID: 20000179 Result: Up-regulated in Transcription
  misc_feature: MA Experiment 20000179 PARAMETER Experiment Name: At_Germinating_Seeds_P Parameter: Age (hr) Value: 6 vs. 0
  misc_feature: MA Experiment 20000179 PARAMETER Experiment Name: At_Germinating_Seeds_P Parameter: Tissue Value: Germinating Seeds
  misc_feature: MA Experiment ID: 20000180 Result: Up-regulated in Transcription
  misc_feature: MA Experiment 20000180 PARAMETER Experiment Name: At_Germinating_Seeds_P Parameter: Age (hr) Value: 24 vs. 0
  misc_feature: MA Experiment 20000180 PARAMETER Experiment Name: At_Germinating_Seeds_P Parameter: Tissue Value: Germinating Seeds
  misc_feature: MA Experiment ID: 20000227 Result: Up-regulated in Transcription
  misc_feature: MA Experiment 20000227 PARAMETER Experiment Name: At_Root-Tips-vs-Tops_P Parameter: Tissue Value: Root Tips vs. Root Tops
  misc_feature: MA Experiment ID: 20000794 Result: Down-regulated in Transcription
  misc_feature: MA Experiment 20000794 PARAMETER Experiment Name: At_Petals_P Parameter: Age (day) Value: 23-25 days
  misc_feature: MA Experiment 20000794 PARAMETER Experiment Name: At_Petals_P Parameter: Plant Line Value: WS
  misc_feature: MA Experiment 20000794 PARAMETER Experiment Name: At_Petals_P Parameter: Tissue Value: Petals vs. Whole plant
  misc_feature: MA Experiment ID: 20001558 Result: Down-regulated in Transcription
  misc_feature: MA Experiment 20001558 PARAMETER Experiment Name: At_Drought_Soil_Dry_P Parameter: Age (day) Value: 27
  misc_feature: MA Experiment 20001558 PARAMETER Experiment Name: At_Drought_Soil_Dry_P Parameter: Organism Value: A. thaliana
  misc_feature: MA Experiment 20001558 PARAMETER Experiment Name: At_Drought_Soil_Dry_P Parameter: Plant Line Value: WS
  misc_feature: MA Experiment 20001558 PARAMETER Experiment Name: At_Drought_Soil_Dry_P Parameter: Post Timepoint (hr) Value: 6
  misc_feature: MA Experiment 20001558 PARAMETER Experiment Name: At_Drought_Soil_Dry_P Parameter: Post-Treatment Value: Re-Water vs. No Drought
  misc_feature: MA Experiment 20001558 PARAMETER Experiment Name: At_Drought_Soil_Dry_P Parameter: Timepoint (day) Value: 13
  misc_feature: MA Experiment 20001558 PARAMETER Experiment Name: At_Drought_Soil_Dry_P Parameter: Treatment Value: Drought vs. No Drought
aatctataatcattttgtgactcttggagcactctcttctctttgtctctgtgactcacatggagaagaaactgtgaagataccattgacgttgatctatgatgacatcaagagcacttacaacgatatcaaccccgggatgatcataccttacagaatcaaggttgatctgattgtggatgtgccagtattgggaagactgacattgccgctggagaaatgtggagagatcccaattccaaagaaacctgatgttgatatcgagaagattaagttccagaagttctctttggaggaaaccgtggcgattctccatgtgaggcttcagaacatgaatgatttcgacttggggctcaatgacttggactgtgaagtttggctgtgtgatgtaagcattgggaaagcagagatcgcggactcgatcaagcttgacaaaaacggaagcggattgattaatgtgccgatgacattccgaccaaaggactttggttctgcgctttgggatatgattcgtggtaaaggaacagggtacacaatcaaaggtaatattgatgttgatacaccatttggagctatgaagcttcctattatcaaggaaggtggagagacccgtctgaagaaggaagatgatgatgacgacgatgaggaataaggaaacaaagtgctgcagagacagaatggtcatagttactaaatctccgatcttgaaatgtctatttaaaattaaaaaaaaagaaagacttgttttgtgtgctttttgataactgatggatcagacttttgaatagagccgtctttttattggact

SEQ ID NO: 85469 - protein, 216 aa, Arabidopsis thaliana; identical to SEQ ID NO: 35557
  peptide (1)..(216): Ceres Seq. ID no. 12680665
  misc_feature (19)..(86): Pfam Name: Late embryogenesis abundant protein Pfam Description: Late embryogenesis abundant protein
  misc_feature (19)..(216): Homolog of NCBI NO: 15224810 NR Description: similar to late embryogenesis abundant proteins; id: At2g44060.1, supported by cDNA: 2450. [Arabidopsis thaliana]
  misc_feature (19)..(215): Homolog of NCBI NO: 21592483 NR Description: similar to late embryogenesis abundant proteins
  misc_feature (19)..(216): Homolog of NCBI NO: 3264769 NR Description: late embryogenesis-like protein [Prunus armeniaca]
  misc_feature (19)..(216): Homolog of NCBI NO: 34394536 NR Description: late embryogenesis abundant proteins-like [Oryza

SEQ ID NO: 85470 - protein, 170 aa, Arabidopsis thaliana; identical to SEQ ID NO: 35558
  peptide (1)..(170): Ceres Seq. ID no. 12680666
  misc_feature (36)..(166): Pfam Name: Late embryogenesis abundant protein Pfam Description: Late embryogenesis abundant protein
  misc_feature (1)..(170): Homolog of NCBI NO: 15224810 NR Description: similar to late embryogenesis abundant proteins; id: At2g44060.1, supported by cDNA: 2450. [Arabidopsis thaliana]
  misc_feature (1)..(169): Homolog of NCBI NO: 21592483 NR Description: similar to late embryogenesis abundant proteins
  misc_feature (1)..(170): Homolog of NCBI NO: 3264769 NR Description: late embryogenesis-like protein [Prunus armeniaca]
  misc_feature (1)..(170): Homolog of NCBI NO: 34394536 NR Description: late embryogenesis abundant proteins-like [Oryza

SEQ ID NO: 85471 - DNA, 1651 bp, Arabidopsis thaliana
  misc_feature (1)..(1651): Ceres Seq. ID no. 12680674
  misc_feature: MA Experiment ID: 20000185 Result: Up-regulated in Transcription
  misc_feature: MA Experiment 20000185 PARAMETER Experiment Name: At_Roots__P Parameter: Age (day) Value: 7 vs. 21
  misc_feature: MA Experiment 20000185 PARAMETER Experiment Name: At_Roots__P Parameter: Organism Value: A. thaliana
  misc_feature: MA Experiment 20000185 PARAMETER Experiment Name: At_Roots__P Parameter: Tissue Value: Roots vs. Whole Plant
  misc_feature: MA Experiment ID: 20000439 Result: Up-regulated in Transcription
  misc_feature: MA Experiment 20000439 PARAMETER Experiment Name: At_Roots__P Parameter: Age (day) Value: 14 vs. 21
  misc_feature: MA Experiment 20000439 PARAMETER Experiment Name: At_Roots__P Parameter: Organism Value: A. thaliana
  misc_feature: MA Experiment 20000439 PARAMETER Experiment Name: At_Roots__P Parameter: Tissue Value: Roots vs. Whole Plant
  misc_feature: MA Experiment ID: 20000496 Result: Up-regulated in Transcription
  misc_feature: MA Experiment 20000496 PARAMETER Experiment Name: At_Guard_Cells_P Parameter: Harvest Date Value: 7/19/2002
  misc_feature: MA Experiment 20000496 PARAMETER Experiment Name: At_Guard_Cells_P Parameter: Organism Value: Canola
  misc_feature: MA Experiment 20000496 PARAMETER Experiment Name: At_Guard_Cells_P Parameter: Tissue Value: Guard Cells vs. Leaves
  misc_feature: MA Experiment ID: 20000794 Result: Up-regulated in Transcription
  misc_feature: MA Experiment 20000794 PARAMETER Experiment Name: At_Petals_P Parameter: Age (day) Value: 23-25 days
  misc_feature: MA Experiment 20000794 PARAMETER Experiment Name: At_Petals_P Parameter: Plant Line Value: WS
  misc_feature: MA Experiment 20000794 PARAMETER Experiment Name: At_Petals_P Parameter: Tissue Value: Petals vs. Whole plant
  misc_feature: MA Experiment ID: 20001451 Result: Down-regulated in Transcription
  misc_feature: MA Experiment 20001451 PARAMETER Experiment Name: At_Far-red-induction_P Parameter: Age (day) Value: 7
  misc_feature: MA Experiment 20001451 PARAMETER Experiment Name: At_Far-red-induction_P Parameter: Light Value: Far-red vs. White
  misc_feature: MA Experiment 20001451 PARAMETER Experiment Name: At_Far-red-induction_P Parameter: Organism Value: A. thaliana
  misc_feature: MA Experiment 20001451 PARAMETER Experiment Name: At_Far-red-induction_P Parameter: Plant Line Value: Columbia
  misc_feature: MA Experiment 20001451 PARAMETER Experiment Name: At_Far-red-induction_P Parameter: Timepoint (hr) Value: 24
  misc_feature: MA Experiment 20001451 PARAMETER Experiment Name: At_Far-red-induction_P Parameter: Tissue Value: Whole Plant
  misc_feature: MA Experiment ID: 20001905 Result: Up-regulated in Transcription
  misc_feature: MA Experiment 20001905 PARAMETER Experiment Name: At_Drought_Reproduction_P Parameter: Age (day) Value: 40
  misc_feature: MA Experiment 20001905 PARAMETER Experiment Name: At_Drought_Reproduction_P Parameter: Organism Value: A. thaliana
  misc_feature: MA Experiment 20001905 PARAMETER Experiment Name: At_Drought_Reproduction_P Parameter: Plant Line Value: WS
  misc_feature: MA Experiment 20001905 PARAMETER Experiment Name: At_Drought_Reproduction_P Parameter: Timepoint (day) Value: 10
  misc_feature: MA Experiment 20001905 PARAMETER Experiment Name: At_Drought_Reproduction_P Parameter: Tissue Value: Rosettes
  misc_feature: MA Experiment 20001905 PARAMETER Experiment Name: At_Drought_Reproduction_P Parameter: Treatment Value: Drought vs. No Drought
ctcgatctccgtgaagctctcgaatctctggttttgagttttggagaatggtgtttttccgcagcgtatcggcctttactaggctgaggtctcgcgtccagggccaacaatcttcactcagcaattctgtcagatggattcagatgcagagctctaccgacctggacctgaagtcgcagctgcaagagttaattccggaacagcaggaccgtctgaagaaactgaagtcagaacatgggaaggtccaactgggaaacatcactgttgatatggttattggtggaatgagagggatgactggattgctttgggaaacctcattgcttgacccggaagaggtattcgctttaggggattgtcgattcctgagtgccagaaagtattacctactgcccagtctggagctgaaccattaccggagggtcttttgtggcttctcttaactggaaaggtacctagcaaagagcaagttgaagcactgtcgaaagacttggcgaaccgtgctgctgtgccagattatgtgtacaatgccatcgatgctctgccttccacagctcatccaatgactcaatttgctagcggtgttatggccctccaggtgcaaagtgagtttcaaaaggcatatgagaatggaattcataagtcaaagttctgggagccaacatatgaggattgcctcaacctgattgctcgtgttcctgttgtagctgcatatgtttatcgaaggatgtataagaatggtgattccattccctcagataaatctttggattatggtgcaaatttttcccacatgttgggatttgatgatgaaaaggtgaaagagctcatgaggctttacatcaccatccacagtgatcatgaaggtggaaatgttagtgctcacactggtcacctggttggtagtgcactttcagacccatatctgtcatttgcagctgcattaaatggtttagctgggccactccatggtttggctaatcaggaagttttgctttggatcaaatcagtcgtagaggaatgtggagaagatatatcaaaagaacagttgaaagaatatgtttggaaaacattaaacagtggcaaggttattccgggatatggtcacggtgttctgcgcaatactgatccaagatatgtatgccaaagagaatttgccttgaagcatctacctgacgaccctcttttccagtgtcaaagctttatgaagttgtgcctcctgttctcactgagcttggaagtgaagaacccgtggccaaatgttgatgctcacagtggggtcttgctgaaccactatggtctaaccgaagcaaggtactacaccgtgctctttggtgtttcaaggagtcttggcatctgctctcagcttatatgggaccgagctcttggacttgcacttgagaggccaaagagtgttaccatggactggcttgaagcccattgtaagaaagcttcatctgcttaagtcaccaccgagtcctgagttgtcgcactctctcgtgtttcaacaaaagtcattctcttccacactggatagctttttttgtttttaccttctattgacagaagaaacatttgttcatgtagaaattgttcctgagaaacacatgcttggtgcaaatttgcatttccgggaaactcgtgataataa

SEQ ID NO: 85472 - protein, 300 aa, Arabidopsis thaliana
  peptide (1)..(300): Ceres Seq. ID no. 12680675
  misc_feature (1)..(282): Pfam Name: Citrate synthase Pfam Description: Citrate synthase
  misc_feature (1)..(300): Homolog of NCBI NO: 30689693 NR Description: citrate synthase [Arabidopsis thaliana]
  misc_feature (1)..(300): Homolog of NCBI NO: 18406515 NR Description: citrate synthase; protein id: At2g44350.1, by cDNA: 16528., supported by cDNA: gi_14423561 [Arabidopsis >gi|27735166|sp|P20115|CISY_ARATH Citrate synthase, mitochondrial
  misc_feature (1)..(300): Homolog of NCBI NO: 21553775 NR Description: citrate synthase [Arabidopsis thaliana]
  misc_feature (1)..(300): Homolog of NCBI NO: 68230 NR Description: citrate (si)-synthase (EC 4.1.3.7) precursor,
  misc_feature (1)..(298): Homolog of NCBI NO: 8928010 NR Description: Citrate synthase, mitochondrial precursor
  misc_feature (1)..(297): Homolog of NCBI NO: 1556429 NR Description: citrate synthase [Nicotiana tabacum]
  misc_feature (1)..(298): Homolog of NCBI NO: 1352088 NR Description: Citrate synthase, mitochondrial precursor
  misc_feature (1)..(300): Homolog of NCBI NO: 15982952 NR Description: citrate synthase [Prunus persica]
  misc_feature (1)..(299): Homolog of NCBI NO: 11066954 NR Description: citrate synthase [Oryza sativa]
  misc_feature (1)..(297): Homolog of NCBI NO: 6647461 NR Description: Citrate synthase, mitochondrial precursor
MTQFASGVMALQVQSEFQKAYENGIHKSKFWEPTYEDCLNLIARVPVVAAYVYRRMYKNGDSIPSDKSLDYGANFSHMLGFDDEKVKELMRLYITIHSDHEGGNVSAHTGHLVGSALSDPYLSFAAALNGLAGPLHGLANQEVLLWIKSVVEECGEDISKEQLKEYVWKTLNSGKVIPGYGHGVLRNTDPRYVCQREFALKHLPDDPLFQCQSFMKLCLLFSLSLEVKNPWPNVDAHSGVLLNHYGLTEARYYTVLFGVSRSLGICSQLIWDRALGLALERPKSVTMDWLEAHCKKASSA

SEQ ID NO: 85473 - protein, 292 aa, Arabidopsis thaliana
  peptide (1)..(292): Ceres Seq. ID no. 12680676
  misc_feature (1)..(274): Pfam Name: Citrate synthase Pfam Description: Citrate synthase
  misc_feature (1)..(292): Homolog of NCBI NO: 30689693 NR Description: citrate synthase [Arabidopsis thaliana]
  misc_feature (1)..(292): Homolog of NCBI NO: 18406515 NR Description: citrate synthase; protein id: At2g44350.1, by cDNA: 16528., supported by cDNA: gi_14423561 [Arabidopsis >gi|27735166|sp|P20115|CISY_ARATH Citrate synthase, mitochondrial
  misc_feature (1)..(292): Homolog of NCBI NO: 21553775 NR Description: citrate synthase [Arabidopsis thaliana]
  misc_feature (1)..(292): Homolog of NCBI NO: 68230 NR Description: citrate (si)-synthase (EC 4.1.3.7) precursor,
  misc_feature (1)..(290): Homolog of NCBI NO: 8928010 NR Description: Citrate synthase, mitochondrial precursor
  misc_feature (1)..(289): Homolog of NCBI NO: 1556429 NR Description: citrate synthase [Nicotiana tabacum]
  misc_feature (1)..(290): Homolog of NCBI NO: 1352088 NR Description: Citrate synthase, mitochondrial precursor
  misc_feature (1)..(292): Homolog of NCBI NO: 15982952 NR Description: citrate synthase [Prunus persica]
  misc_feature (1)..(291): Homolog of NCBI NO: 11066954 NR Description: citrate synthase [Oryza sativa]
  misc_feature (1)..(289): Homolog of NCBI NO: 6647461 NR Description: Citrate synthase, mitochondrial precursor
MALQVQSEFQKAYENGIHKSKFWEPTYEDCLNLIARVPVVAAYVYRRMYKNGDSIPSDKSLDYGANFSHMLGFDDEKVKELMRLYITIHSDHEGGNVSAHTGHLVGSALSDPYLSFAAALNGLAGPLHGLANQEVLLWIKSVVEECGEDISKEQLKEYVWKTLNSGKVIPGYGHGVLRNTDPRYVCQREFALKHLPDDPLFQCQSFMKLCLLFSLSLEVKNPWPNVDAHSGVLLNHYGLTEARYYTVLFGVSRSLGICSQLIWDRALGLALERPKSVTMDWLEAHCKKASSA

SEQ ID NO: 85474 - protein, 245 aa, Arabidopsis thaliana
  peptide (1)..(245): Ceres Seq. ID no. 12680677
  misc_feature (1)..(227): Pfam Name: Citrate synthase Pfam Description: Citrate synthase
  misc_feature (1)..(245): Homolog of NCBI NO: 30689693 NR Description: citrate synthase [Arabidopsis thaliana]
  misc_feature (1)..(245): Homolog of NCBI NO: 18406515 NR Description: citrate synthase; protein id: At2g44350.1, by cDNA: 16528., supported by cDNA: gi_14423561 [Arabidopsis >gi|27735166|sp|P20115|CISY_ARATH Citrate synthase, mitochondrial
  misc_feature (1)..(245): Homolog of NCBI NO: 21553775 NR Description: citrate synthase [Arabidopsis thaliana]
  misc_feature (1)..(245): Homolog of NCBI NO: 68230 NR Description: citrate (si)-synthase (EC 4.1.3.7) precursor,
  misc_feature (1)..(243): Homolog of NCBI NO: 8928010 NR Description: Citrate synthase, mitochondrial precursor
  misc_feature (1)..(242): Homolog of NCBI NO: 1556429 NR Description: citrate synthase [Nicotiana tabacum]
  misc_feature (1)..(243): Homolog of NCBI NO: 1352088 NR Description: Citrate synthase, mitochondrial precursor
  misc_feature (1)..(245): Homolog of NCBI NO: 15982952 NR Description: citrate synthase [Prunus persica]
  misc_feature (1)..(244): Homolog of NCBI NO: 11066954 NR Description: citrate synthase [Oryza sativa]
  misc_feature (1)..(242): Homolog of NCBI NO: 6647461 NR Description: Citrate synthase, mitochondrial precursor
MYKNGDSIPSDKSLDYGANFSHMLGFDDEKVKELMRLYITIHSDHEGGNVSAHTGHLVGSALSDPYLSFAAALNGLAGPLHGLANQEVLLWIKSVVEECGEDISKEQLKEYVWKTLNSGKVIPGYGHGVLRNTDPRYVCQREFALKHLPDDPLFQCQSFMKLCLLFSLSLEVKNPWPNVDAHSGVLLNHYGLTEARYYTVLFGVSRSLGICSQLIWDRALGLALERPKSVTMDWLEAHCKKASSA

SEQ ID NO: 85475 - DNA, 1697 bp, Arabidopsis thaliana
  misc_feature (1)..(1697): Ceres Seq. ID no. 12680678
  misc_feature: MA Experiment ID: 108569 Result: Up-regulated in Transcription
  misc_feature: MA Experiment 108569 PARAMETER Experiment Name: At_0.001%_MeJA__cDNA_P Parameter: Timepoint (hr) Value: 6
  misc_feature: MA Experiment 108569 PARAMETER Experiment Name: At_0.001%_MeJA__cDNA_P Parameter: Tissue Value: Aerial
  misc_feature: MA Experiment 108569 PARAMETER Experiment Name: At_0.001%_MeJA__cDNA_P Parameter: Treatment Value: 0.001% MeJA vs. No Treatment
  misc_feature: MA Experiment ID: 108573 Result: Up-regulated in Transcription
  misc_feature: MA Experiment 108573 PARAMETER Experiment Name: At_Drought_cDNA_P Parameter: Timepoint (hr) Value: 6
  misc_feature: MA Experiment 108573 PARAMETER Experiment Name: At_Drought_cDNA_P Parameter: Tissue Value: Aerial
  misc_feature: MA Experiment 108573 PARAMETER Experiment Name: At_Drought_cDNA_P Parameter: Treatment Value: Drought vs. No Drought
  misc_feature: MA Experiment ID: 108595 Result: Down-regulated in Transcription
  misc_feature: MA Experiment 108595 PARAMETER Experiment Name: At_Ler-pi_Ovule_cDNA_P Parameter: Plant Line Value: null
gattttctctatagacgcaatcaccgccgattctctctctctctctctcgagtctctcgacggtcgcatatcaaaagtccatttctttcttctctttggaggatcagcaactatggatgaagagtacgaagtcatagttctgggtactggtctcaaggagtgcatccttagtggtcttctctccgtcgatggtcttaaggtacttcacatggacaggaatgactactacggtggagagtcaacttctcttaatctcaatcagctgtggaagaagttcaggggagaagagaaggctcctgctcatttaggttctagcagagactacaatgttgacatgatgccaaagtttatgatggctaacggaaagcttgttcgtgtccttattcatacggatgtgaccaagtacttgtcttttaaagctgttgatggaagctatgtttttgtccaaggcaaggtccaaaaagtgccagcaactcccatggaggccctcaaatctcctcttatgggtatttttgagaaacgtcgagctggaaagtttttcagctatgttcaagaatacgacgagaaggacccaaaaacacatgatggaatggatttgaggagagttacaactaaggatttgattgcgaaattcggtcttaaagaagatactattgactttattggtcatgcagtggcacttcactgtaatgacaatcatctccatcaacctgcctatgatactgtaatgagaatgaagctctacgcagagtcccttgcacgttttcaaggaggttcaccatatatctatcctctctatgggttgggagaattgcctcaggcatttgcacgacttagtgctgtctatggtgggacgtatatgttgaacaaacctgagtgcaaggtagagtttgacgaggagggtaaggtttctggtgttacatctgagggagagactgccaaatgcaagaaagttgtctgcgatccttcttacctaaccaacaaggtcaggaagattggcagggttgctcgggcgattgccattatgagccaccctattccaaacaccaatgattctcagtcggtgcaagtcattctaccccaaaaacaattgggccgcaaatcagacatgtatgtcttctgttgttcatattcacacaacgttgctcccaagggaaagttcatagcatttgtgtcaacagacgctgaaactgataaccctcaaaccgagctccagcctggaatcgaccttcttggtcctgttgatgagctgttcttcgacatctatgatagatatgagcctgtcaacgaacccactttggacaactgcttcatatcaacgagttatgatgctacaacacactttgacacaactgttgttgatgtgttgaacatgtataaattgatcaccggaaaggaactggatctaagtgtggatcttaacgcagctagtgctgcagaggaggaatgatggaaaatattgcaagctctgtctctctctgttagtcaccaaatgatgtaaccggttctctttctccctcttcttaaaagttgtctcaccaaatgttctgttaaaatactaaatcaaaccgatctcatcatgcgtacctattcccggttatcgcagtctgtttttttcttctcaaaaaactaaaatgttggatttcgtggtttttgtttggagtgtctaatatatcatcatgctcttccgtttgaac

SEQ ID NO: 85476 - protein, 482 aa, Arabidopsis thaliana
  peptide (1)..(482): Ceres Seq. ID no. 12680679
  misc_feature (38)..(475): Pfam Name: GDP dissociation inhibitor Pfam Description: GDP dissociation inhibitor
  misc_feature (38)..(482): Homolog of NCBI NO: 15224814 NR Description: GDP dissociation inhibitor; protein id: supported by cDNA: 29536., supported by cDNA: gi_13605640, by cDNA: gi_15215777, supported by cDNA: gi_1655423, supported by
  misc_feature (38)..(482): Homolog of NCBI NO: 1550740 NR Description: GDP-associated inhibitor [Arabidopsis thaliana]
  misc_feature (38)..(482): Homolog of NCBI NO: 17473582 NR Description: GDP dissociation inhibitor [Arabidopsis thaliana]
  misc_feature (38)..(482): Homolog of NCBI NO: 21592535 NR Description: GDP dissociation inhibitor [Arabidopsis thaliana]
  misc_feature (38)..(481): Homolog of NCBI NO: 15232210 NR Description: Rab GDP dissociation inhibitor; protein id: supported by cDNA: gi_19698844, supported by cDNA: gi_2446980
  misc_feature (38)..(481): Homolog of NCBI NO: 3175990 NR Description: GDP dissociation inhibitor [Cicer arietinum]
  misc_feature (38)..(481): Homolog of NCBI NO: 7489478 NR Description: GDP dissociation inhibitor protein - rice
  misc_feature (38)..(481): Homolog of NCBI NO: 7489133 NR Description: GDP dissociation inhibitor - common tobacco
  misc_feature (38)..(481): Homolog of NCBI NO: 7489479 NR Description: GDP dissociation inhibitor protein - rice
  misc_feature (38)..(482): Homolog of NCBI NO: 33146460 NR Description: putative GDP dissociation inhibitor [Oryza sativa
IFSIDAITADSLSLSLESLDGRISKVHFFLLFGGSATMDEEYEVIVLGTGLKECILSGLLSVDGLKVLHMDRNDYYGGESTSLNLNQLWKKFRGEEKAPAHLGSSRDYNVDMMPKFMMANGKLVRVLIHTDVTKYLSFKAVDGSYVFVQGKVQKVPATPMEALKSPLMGIFEKRRAGKFFSYVQEYDEKDPKTHDGMDLRRVTTKDLIAKFGLKEDTIDFIGHAVALHCNDNHLHQPAYDTVMRMKLYAESLARFQGGSPYIYPLYGLGELPQAFARLSAVYGGTYMLNKPECKVEFDEEGKVSGVTSEGETAKCKKVVCDPSYLTNKVRKIGRVARAIAIMSHPIPNTNDSQSVQVILPQKQLGRKSDMYVFCCSYSHNVAPKGKFIAFVSTDAETDNPQTELQPGIDLLGPVDELFFDIYDRYEPVNEPTLDNCFISTSYDATTHFDTTVVDVLNMYKLITGKELDLSVDLNAASAAEEE

SEQ ID NO: 85477 - protein, 445 aa, Arabidopsis thaliana; identical to SEQ ID NO: 21269
  peptide (1)..(445): Ceres Seq. ID no. 12680680
  misc_feature (1)..(438): Pfam Name: GDP dissociation inhibitor Pfam Description: GDP dissociation inhibitor
  misc_feature (1)..(445): Homolog of NCBI NO: 15224814 NR Description: GDP dissociation inhibitor; protein id: supported by cDNA: 29536., supported by cDNA: gi_13605640, by cDNA: gi_15215777, supported by cDNA: gi_1655423, supported by
  misc_feature (1)..(445): Homolog of NCBI NO: 1550740 NR Description: GDP-associated inhibitor [Arabidopsis thaliana]
  misc_feature (1)..(445): Homolog of NCBI NO: 17473582 NR Description: GDP dissociation inhibitor [Arabidopsis thaliana]
  misc_feature (1)..(445): Homolog of NCBI NO: 21592535 NR Description: GDP dissociation inhibitor [Arabidopsis thaliana]
  misc_feature (1)..(444): Homolog of NCBI NO: 15232210 NR Description: Rab GDP dissociation inhibitor; protein id: supported by cDNA: gi_19698844, supported by cDNA: gi_2446980
  misc_feature (1)..(444): Homolog of NCBI NO: 3175990 NR Description: GDP dissociation inhibitor [Cicer arietinum]
  misc_feature (1)..(444): Homolog of NCBI NO: 7489478 NR Description: GDP dissociation inhibitor protein - rice
  misc_feature (1)..(444): Homolog of NCBI NO: 7489133 NR Description: GDP dissociation inhibitor - common tobacco
  misc_feature (1)..(444): Homolog of NCBI NO: 7489479 NR Description: GDP dissociation inhibitor protein - rice
  misc_feature (1)..(445): Homolog of NCBI NO: 33146460 NR Description: putative GDP dissociation inhibitor [Oryza sativa

SEQ ID NO: 85478 - protein, 413 aa, Arabidopsis thaliana; identical to SEQ ID NO: 21270
  peptide (1)..(413): Ceres Seq. ID no. 12680681
  misc_feature (1)..(406): Pfam Name: GDP dissociation inhibitor Pfam Description: GDP dissociation inhibitor
  misc_feature (1)..(413): Homolog of NCBI NO: 15224814 NR Description: GDP dissociation inhibitor; protein id: supported by cDNA: 29536., supported by cDNA: gi_13605640, by cDNA: gi_15215777, supported by cDNA: gi_1655423, supported by
  misc_feature (1)..(413): Homolog of NCBI NO: 1550740 NR Description: GDP-associated inhibitor [Arabidopsis thaliana]
  misc_feature (1)..(413): Homolog of NCBI NO: 17473582 NR Description: GDP dissociation inhibitor [Arabidopsis thaliana]
  misc_feature (1)..(413): Homolog of NCBI NO: 21592535 NR Description: GDP dissociation inhibitor [Arabidopsis thaliana]
  misc_feature (1)..(412): Homolog of NCBI NO: 15232210 NR Description: Rab GDP dissociation inhibitor; protein id: supported by cDNA: gi_19698844, supported by cDNA: gi_2446980
  misc_feature (1)..(412): Homolog of NCBI NO: 3175990 NR Description: GDP dissociation inhibitor [Cicer arietinum]
  misc_feature (1)..(412): Homolog of NCBI NO: 7489478 NR Description: GDP dissociation inhibitor protein - rice
  misc_feature (1)..(412): Homolog of NCBI NO: 7489133 NR Description: GDP dissociation inhibitor - common tobacco
  misc_feature (1)..(412): Homolog of NCBI NO: 7489479 NR Description: GDP dissociation inhibitor protein - rice
  misc_feature (1)..(413): Homolog of NCBI NO: 33146460 NR Description: putative GDP dissociation inhibitor [Oryza sativa

SEQ ID NO: 85479 - DNA, 992 bp, Arabidopsis thaliana
  misc_feature (1)..(992): Ceres Seq. ID no. 12680696
  misc_feature: MA Experiment ID: 108434 Result: Up-regulated in Transcription
  misc_feature: MA Experiment 108434 PARAMETER Experiment Name: At_Root_Tips_cDNA_P Parameter: Tissue Value: Root Tips
  misc_feature: MA Experiment ID: 108461 Result: Up-regulated in Transcription
  misc_feature: MA Experiment 108461 PARAMETER Experiment Name: At_Germinating_Seeds_cDNA_P Parameter: Age (day) Value: 1 vs. 0
  misc_feature: MA Experiment 108461 PARAMETER Experiment Name: At_Germinating_Seeds_cDNA_P Parameter: Tissue Value: Germinating Seeds
acgggatctctctccggtaaatatcggaaacttttattctcagcaaagcgagatctcgacgtttctcagatccgtccggcgagttagatccttgagaaatcatggctccggtctcggcactcgctaagtataagctggtgtttctgggagatcaatccgtcggcaaaaccagtatcattactcgattcatgtacgacaaattcgacaacacttaccaggccacaattggtattgattttctatcaaagacaatgtaccttgaagatcgaacggtcagacttcagttgtgggatacagctgggcaagagcgattcaggagtctaattccgagctatatcagggattcctccgttgctgttattgtgtatgatgttgcaagcaggcagtccttcctaaacactactaagtggatcgatgaggttaggacagaacgtggtagtgatgtcatagtcgtgcttgtgggaaacaaaactgatctagtggacaaaaggcaagtgtcaatagaggaagcagaagctaaggcacgcgaacttaatgtaatgttcatcgaaaccagtgccaaagcgggcttcaacattaaggcgctcttccgcaagatagcagcagctttgccgggaatggagacattgtcttcaacaaagcaagaggatatggttgatgtcaatctcaagtcttccaatgcaaatgcatctctcgctcagcagcaatcaggaggatgctcttgttagatttggcaacaacaacacaacaacaaatcgatagagaacaacaaaacacactactaaaaaatgtcctcaagcccctttgcatgattcgatcagttatcgtcttccatctgtaaaatttttgcctgtttttcaactttttttcttcatcggattgtttttaaagaagactctgttttagctatggtttgtccctaactgtgatcttttgtggtctttggagtttcaaatgctcgctgcttcagtacttttgtttacttatttctc

SEQ ID NO: 85480 - protein, 208 aa, Arabidopsis thaliana; identical to SEQ ID NO: 24978
  peptide (1)..(208): Ceres Seq. ID no. 12680697
  misc_feature (11)..(172): Pfam Name: Ras family Pfam Description: Ras family
  misc_feature (1)..(208): Homolog of NCBI NO: 15224916 NR Description: GTP-binding protein, putative; protein id:
  misc_feature (1)..(208): Homolog of NCBI NO: 7438385 NR Description: GTP-binding protein Rab6 - common tobacco
  misc_feature (1)..(208): Homolog of NCBI NO: 34901804 NR Description: putative ras-related protein Rab-6A [Oryza sativa
  misc_feature (1)..(208): Homolog of NCBI NO: 15238112 NR Description: Ras family GTP-binding protein, putative; protein
  misc_feature (1)..(208): Homolog of NCBI NO: 15227173 NR Description: GTP-binding protein, putative; protein id:
  misc_feature (1)..(208): Homolog of NCBI NO: 15236081 NR Description: GTP-binding protein, putative; protein id: supported by cDNA: gi_13272476, supported by cDNA: gi_14423429
  misc_feature (7)..(208): Homolog of NCBI NO: 13195674 NR Description: RAB6, member RAS oncogene family [Mus musculus]
  misc_feature (7)..(208): Homolog of NCBI NO: 38679888 NR Description: RAB6A, member RAS oncogene family isoform b;
  misc_feature (7)..(208): Homolog of NCBI NO: 17512290 NR Description: Similar to RAB6C, member RAS oncogene family [Mus
  misc_feature (7)..(208): Homolog of NCBI NO: 19923231 NR Description: RAB6A, member RAS oncogene family; Oncogene RAB6;

SEQ ID NO: 85481 - protein, 179 aa, Arabidopsis thaliana; identical to SEQ ID NO: 24979
  peptide (1)..(179): Ceres Seq. ID no. 12680698
  misc_feature (1)..(143): Pfam Name: Ras family Pfam Description: Ras family
  misc_feature (1)..(179): Homolog of NCBI NO: 15224916 NR Description: GTP-binding protein, putative; protein id:
  misc_feature (1)..(179): Homolog of NCBI NO: 7438385 NR Description: GTP-binding protein Rab6 - common tobacco
  misc_feature (1)..(179): Homolog of NCBI NO: 34901804 NR Description: putative ras-related protein Rab-6A [Oryza sativa
  misc_feature (1)..(179): Homolog of NCBI NO: 15238112 NR Description: Ras family GTP-binding protein, putative; protein
  misc_feature (1)..(179): Homolog of NCBI NO: 15227173 NR Description: GTP-binding protein, putative; protein id:
  misc_feature (1)..(179): Homolog of NCBI NO: 15236081 NR Description: GTP-binding protein, putative; protein id: supported by cDNA: gi_13272476, supported by cDNA: gi_14423429
  misc_feature (1)..(179): Homolog of NCBI NO: 13195674 NR Description: RAB6, member RAS oncogene family [Mus musculus]
  misc_feature (1)..(179): Homolog of NCBI NO: 38679888 NR Description: RAB6A, member RAS oncogene family isoform b;
  misc_feature (1)..(179): Homolog of NCBI NO: 17512290 NR Description: Similar to RAB6C, member RAS oncogene family [Mus
  misc_feature (1)..(179): Homolog of NCBI NO: 19923231 NR Description: RAB6A, member RAS oncogene family; Oncogene RAB6;

SEQ ID NO: 85482 - protein, 158 aa, Arabidopsis thaliana; identical to SEQ ID NO: 24980
  peptide (1)..(158): Ceres Seq. ID no. 12680699
  misc_feature (1)..(122): Pfam Name: Ras family Pfam Description: Ras family
  misc_feature (1)..(158): Homolog of NCBI NO: 15224916 NR Description: GTP-binding protein, putative; protein id:
  misc_feature (1)..(158): Homolog of NCBI NO: 7438385 NR Description: GTP-binding protein Rab6 - common tobacco
  misc_feature (1)..(158): Homolog of NCBI NO: 34901804 NR Description: putative ras-related protein Rab-6A [Oryza sativa
  misc_feature (1)..(158): Homolog of NCBI NO: 15238112 NR Description: Ras family GTP-binding protein, putative; protein
  misc_feature (1)..(158): Homolog of NCBI NO: 15227173 NR Description: GTP-binding protein, putative; protein id:
  misc_feature (1)..(158): Homolog of NCBI NO: 15236081 NR Description: GTP-binding protein, putative; protein id: supported by cDNA: gi_13272476, supported by cDNA: gi_14423429
  misc_feature (1)..(158): Homolog of NCBI NO: 13195674 NR Description: RAB6, member RAS oncogene family [Mus musculus]
  misc_feature (1)..(158): Homolog of NCBI NO: 38679888 NR Description: RAB6A, member RAS oncogene family isoform b;
  misc_feature (1)..(158): Homolog of NCBI NO: 17512290 NR Description: Similar to RAB6C, member RAS oncogene family [Mus
  misc_feature (1)..(158): Homolog of NCBI NO: 19923231 NR Description: RAB6A, member RAS oncogene family; Oncogene RAB6;

SEQ ID NO: 85483 - DNA, 1276 bp, Arabidopsis thaliana
  misc_feature (1)..(1276): Ceres Seq. ID no. 12680700
  misc_feature: MA Experiment ID: 108464 Result: Down-regulated in Transcription
  misc_feature: MA Experiment 108464 PARAMETER Experiment Name: At_Germinating_Seeds_cDNA_P Parameter: Age (day) Value: 4 vs. 0
  misc_feature: MA Experiment 108464 PARAMETER Experiment Name: At_Germinating_Seeds_cDNA_P Parameter: Tissue Value: Germinating Seeds
  misc_feature: MA Experiment ID: 108569 Result: Up-regulated in Transcription
  misc_feature: MA Experiment 108569 PARAMETER Experiment Name: At_0.001%_MeJA__cDNA_P Parameter: Timepoint (hr) Value: 6
  misc_feature: MA Experiment 108569 PARAMETER Experiment Name: At_0.001%_MeJA__cDNA_P Parameter: Tissue Value: Aerial
  misc_feature: MA Experiment 108569 PARAMETER Experiment Name: At_0.001%_MeJA__cDNA_P Parameter: Treatment Value: 0.001% MeJA vs. No Treatment
  misc_feature: MA Experiment ID: 108573 Result: Up-regulated in Transcription
  misc_feature: MA Experiment 108573 PARAMETER Experiment Name: At_Drought_cDNA_P Parameter: Timepoint (hr) Value: 6
  misc_feature: MA Experiment 108573 PARAMETER Experiment Name: At_Drought_cDNA_P Parameter: Tissue Value: Aerial
  misc_feature: MA Experiment 108573 PARAMETER Experiment Name: At_Drought_cDNA_P Parameter: Treatment Value: Drought vs. No Drought
  misc_feature: MA Experiment ID: 108585 Result: Up-regulated in Transcription
  misc_feature: MA Experiment 108585 PARAMETER Experiment Name: At_5mM_NaNP_cDNA_P Parameter: Timepoint (hr) Value: 6
  misc_feature: MA Experiment 108585 PARAMETER Experiment Name: At_5mM_NaNP_cDNA_P Parameter: Tissue Value: Aerial
  misc_feature: MA Experiment 108585 PARAMETER Experiment Name: At_5mM_NaNP_cDNA_P Parameter: Treatment Value: null
  misc_feature: MA Experiment ID: 108595 Result: Down-regulated in Transcription
  misc_feature: MA Experiment 108595 PARAMETER Experiment Name: At_Ler-pi_Ovule_cDNA_P Parameter: Plant Line Value: null
atctgaaaccaatctgttcatatgatgaagaagtttctctcgttctcctccaacgcgtagaaaattctgacggcttaacgatgtggcgaagatctgttgtttatcgtttctcttcaagaatctctgtttcttcttcgttaccaaaccctagactgattccttggtcccgcgaattatgtgccgttaatagcttctcccagcctccggtctcgacggaatcaactgctaagttagggatcactggtgttagatctgatgccaatcgagtttttgccactgctactgccgccgctacagctacagctaccaccggtgagatttcgtctagagttgcggctttggctggattagggcatcactacgctcgttgttattgggagctttctaaagctaaacttagtatgcttgtggttgcaacttctggaactgggtatattctgggtacgggaaatgctgcaattagcttcccggggctttgttacacatgtgcaggaaccatgatgattgctgcatctgctaattccttgaatcagatttttgagataagcaatgattctaagatgaaaagaacgatgctaaggccattgccttcaggacgtattagtgttccacacgctgttgcatgggctactattgctggtgcttctggtgcttgtttgttggccagcaagactaatatgttggctgctggacttgcatctgccaatcttgtactttatgcgtttgtttatactccgttgaagcaacttcaccctatcaatacatgggttggcgctgttgttggtgctatcccacccttgcttgggtgggcggcagcgtctggtcagatttcatacaattcgatgattcttccagctgctctttacttttggcagatacctcattttatggcccttgcacatctctgccgcaatgattatgcagctggaggttacaagatgttgtcactctttgatccgtcagggaagagaatagcagcagtggctctaaggaactgcttttacatgatccctctcggtttcatcgcctatgactgggggttaacctcaagttggttttgcctcgaatcaacacttctcacactagcaatcgctgcaacagcattttcattctactctccatgataacctttaagcaagctattgaatttttggaaacagaaattaaaaaaaaaatctgaaaagttcttaagtttaatctttggttaataatgaagtggagaacgcatacaagtttatgtattttttctcatctccacataattgtattttttctc

SEQ ID NO: 85484 - protein, 373 aa, Arabidopsis thaliana
  peptide (1)..(373): Ceres Seq. ID no. 12680701
  misc_feature (133)..(371): Pfam Name: UbiA prenyltransferase family Pfam Description: UbiA prenyltransferase family
  misc_feature (1)..(371): Homolog of NCBI NO: 7485006 NR Description: heme A farnesyltransferase homolog F16B22.1 -
  misc_feature (27)..(371): Homolog of NCBI NO: 18406556 NR Description: putative heme A:farnesyltransferase; protein id: supported by cDNA: gi_15028298, supported by cDNA: gi_21280972 thaliana] >gi|15028299|gb|AAK76626.1| putative heme
  misc_feature (27)..(371): Homolog of NCBI NO: 25408912 NR Description: probable heme A farnesyltransferase [imported] -
  misc_feature (27)..(370): Homolog of NCBI NO: 34913400 NR Description: putative heme A farnesyltransferase homolog
  misc_feature (127)..(371): Homolog of NCBI NO: 30410008 NR Description: RIKEN cDNA 2410004F01 [Mus musculus]
  misc_feature (126)..(371): Homolog of NCBI NO: 20141419 NR Description: Protoheme IX farnesyltransferase, mitochondrial (Heme O synthase) >gi|2138300|gb|AAC51330.1| heme A: [Homo sapiens] >gi|12652629|gb|AAH00060.1|AAH00060 COX10 (yeast)
  misc_feature (126)..(371): Homolog of NCBI NO: 30584237 NR Description: Homo sapiens COX10 homolog, cytochrome c oxidase protein, heme A: farnesyltransferase (yeast) [synthetic
  misc_feature (127)..(371): Homolog of NCBI NO: 17921982 NR Description: heme A:farnesyltransferase; COX10 (yeast) cytochrome c oxidase assembly protein (heme A: cytochrome c oxidase subunit X; cytochrome c oxidase assembly
  misc_feature (124)..(371): Homolog of NCBI NO: 19921064 NR Description: CG5037-PA [Drosophila melanogaster]
  misc_feature (126)..(371): Homolog of NCBI NO: 2135332 NR Description: heme A farnesyltransferase (EC 2.5.1.-) - human
LKPICSYDEEVSLVLLQRVENSDGLTMWRRSVVYRFSSRISVSSSLPNPRLIPWSRELCAVNSFSQPPVSTESTAKLGITGVRSDANRVFATATAAATATATTGEISSRVAALAGLGHHYARCYWELSKAKLSMLVVATSGTGYILGTGNAAISFPGLCYTCAGTMMIAASANSLNQIFEISNDSKMKRTMLRPLPSGRISVPHAVAWATIAGASGACLLASKTNMLAAGLASANLVLYAFVYTPLKQLHPINTWVGAVVGAIPPLLGWAAASGQISYNSMILPAALYFWQIPHFMALAHLCRNDYAAGGYKMLSLFDPSGKRIAAVALRNCFYMIPLGFIAYDWGLTSSWFCLESTLLTLAIAATAFSFYSP

SEQ ID NO: 85485 - protein, 347 aa, Arabidopsis thaliana
  peptide (1)..(347): Ceres Seq. ID no. 12680702
  misc_feature (107)..(345): Pfam Name: UbiA prenyltransferase family Pfam Description: UbiA prenyltransferase family
  misc_feature (1)..(345): Homolog of NCBI NO: 7485006 NR Description: heme A farnesyltransferase homolog F16B22.1 -
  misc_feature (1)..(345): Homolog of NCBI NO: 18406556 NR Description: putative heme A:farnesyltransferase; protein id: supported by cDNA: gi_15028298, supported by cDNA: gi_21280972 thaliana] >gi|15028299|gb|AAK76626.1| putative heme
  misc_feature (1)..(345): Homolog of NCBI NO: 25408912 NR Description: probable heme A farnesyltransferase [imported] -
  misc_feature (1)..(344): Homolog of NCBI NO: 34913400 NR Description: putative heme A farnesyltransferase homolog
  misc_feature (101)..(345): Homolog of NCBI NO: 30410008 NR Description: RIKEN cDNA 2410004F01 [Mus musculus]
  misc_feature (100)..(345): Homolog of NCBI NO: 20141419 NR Description: Protoheme IX farnesyltransferase, mitochondrial (Heme O synthase) >gi|2138300|gb|AAC51330.1| heme A: [Homo sapiens] >gi|12652629|gb|AAH00060.1|AAH00060 COX10 (yeast)
  misc_feature (100)..(345): Homolog of NCBI NO: 30584237 NR Description: Homo sapiens COX10 homolog, cytochrome c oxidase protein, heme A: farnesyltransferase (yeast) [synthetic
  misc_feature (101)..(345): Homolog of NCBI NO: 17921982 NR Description: heme A:farnesyltransferase; COX10 (yeast) cytochrome c oxidase assembly protein (heme A: cytochrome c oxidase subunit X; cytochrome c oxidase assembly
  misc_feature (98)..(345): Homolog of NCBI NO: 19921064 NR Description: CG5037-PA [Drosophila melanogaster]
  misc_feature (100)..(345): Homolog of NCBI NO: 2135332 NR Description: heme A farnesyltransferase (EC 2.5.1.-) - human
MWRRSVVYRFSSRISVSSSLPNPRLIPWSRELCAVNSFSQPPVSTESTAKLGITGVRSDANRVFATATAAATATATTGEISSRVAALAGLGHHYARCYWELSKAKLSMLVVATSGTGYILGTGNAAISFPGLCYTCAGTMMIAASANSLNQIFEISNDSKMKRTMLRPLPSGRISVPHAVAWATIAGASGACLLASKTNMLAAGLASANLVLYAFVYTPLKQLHPINTWVGAVVGAIPPLLGWAAASGQISYNSMILPAALYFWQIPHFMALAHLCRNDYAAGGYKMLSLFDPSGKRIAAVALRNCFYMIPLGFIAYDWGLTSSWFCLESTLLTLAIAATAFSFYSP

SEQ ID NO: 85486 - protein, 240 aa, Arabidopsis thaliana; identical to SEQ ID NO: 22918
  peptide (1)..(240): Ceres Seq. ID no. 12680703
  misc_feature (1)..(238): Pfam Name: UbiA prenyltransferase family Pfam Description: UbiA prenyltransferase family
  misc_feature (1)..(238): Homolog of NCBI NO: 7485006 NR Description: heme A farnesyltransferase homolog F16B22.1 -
  misc_feature (1)..(238): Homolog of NCBI NO: 18406556 NR Description: putative heme A:farnesyltransferase; protein id: supported by cDNA: gi_15028298, supported by cDNA: gi_21280972 thaliana] >gi|15028299|gb|AAK76626.1| putative heme
  misc_feature (1)..(238): Homolog of NCBI NO: 25408912 NR Description: probable heme A farnesyltransferase [imported] -
  misc_feature (1)..(237): Homolog of NCBI NO: 34913400 NR Description: putative heme A farnesyltransferase homolog
  misc_feature (1)..(238): Homolog of NCBI NO: 30410008 NR Description: RIKEN cDNA 2410004F01 [Mus musculus]
  misc_feature (1)..(238): Homolog of NCBI NO: 20141419 NR Description: Protoheme IX farnesyltransferase, mitochondrial (Heme O synthase) >gi|2138300|gb|AAC51330.1| heme A: [Homo sapiens] >gi|12652629|gb|AAH00060.1|AAH00060 COX10 (yeast)
  misc_feature (1)..(238): Homolog of NCBI NO: 30584237 NR Description: Homo sapiens COX10 homolog, cytochrome c oxidase protein, heme A: farnesyltransferase (yeast) [synthetic
  misc_feature (1)..(238): Homolog of NCBI NO: 17921982 NR Description: heme A:farnesyltransferase; COX10 (yeast) cytochrome c oxidase assembly protein (heme A: cytochrome c oxidase subunit X; cytochrome c oxidase assembly
  misc_feature (1)..(238): Homolog of NCBI NO: 19921064 NR Description: CG5037-PA [Drosophila melanogaster]
  misc_feature (1)..(238): Homolog of NCBI NO: 2135332 NR Description: heme A farnesyltransferase (EC 2.5.1.-) - human

SEQ ID NO: 85487 - DNA, 2142 bp, Arabidopsis thaliana
  misc_feature (1)..(2142): Ceres Seq. ID no. 12680704
atattgaaaacgcccgctctctgttttttctcgtttctcctcccttcgttctcgggtccatctgcgttcgtatcaagtccttgcactcttcttcttcgtatctggattgtttcgaagttctctaacgaacgacaatggagagtttgatcgtgttgattaatacgatacaaagagcatgcaccgtagtcggcgatcatggcggcgatagcaacgctctatcttctctatgggaagctcttccttccgtcgccgtcgttggtggccagagttctggtaaatcttcggttctagagagtatcgtcgggagagattttcttcccagaggatccggtattgttacgagacggcctttggttttacaacttcataagactgaaaatggaacagaggataacgcagagtttctccaccttaccaataaaaaattcaccaatttctctttggttagaaaggagattgaggatgagactgatagaatcactgggaagaacaaacagatttcttcaattcctattcacctcagtattttctctcccaatgttgtgaatcttactctcattgatttacctggtttgactaaagttgctgttgaaggacagccagaaactattgttgaggatatcgaatccatggttcgctcatacgtcgaaaagcctaactgtcttatactggcaatatctcctgctaatcaagacatagctacatccgacgcgatgaagctcgcgaaagaagtggatccaataggtgatagaacgtttggagttttgacaaagttagacttaatggacaagggaactaatgcattggacgttatcaacggaagatcttacaagctgaaatatccttgggttgggatagtgaaccgttcacaagccgacattaataagaatgtcgacatgatggttgcaagaaggaaagagcgagagtactttgaaaccagtcctgactatggtcacttagccacaagaatgggctcagaatatcttgcaaagctcctctctaagctcttagaatctgttataaggtcacgtattccaagtatcctatccttgataaacaacaacatcgaggaactcgaaagagagttagaccaattgggcaggcctatcgctattgatgctggagctcaactatacactatcttgggaatgtgtagagcattcgaaaagatattcaaagagcatttggatggcgggcgtcccggaggtgcacggatctatggaatctttgactacaatcttccaacagccataaaaaaacttccatttgatcgtcatctttcattgcaaagtgttaagagaattgtctcagaatctgatggctatcaacctcacttgatagcaccagaattaggttatcgtcgtcttattgaaggatccctaaatcattttagaggtccagctgaagcttctgtgaatgctattcaccttatcttaaaagagcttgtaaggaaagcaatcgcagaaactgaggagctaaaacgtttcccttcactacaaattgagttagttgctgcagcaaactcatcattagacaagtttcgtgaagaaagcatgaagtcagttcttagattagtcgacatggaatcttcatatctaacggttgacttctttcgcaagcttcatgtagaaagccaaaacatgtctctttcttcaccaacatcagcaatagaccaatacggtgatgggcatttcagaaagatagcttcaaatgtagctgcttatatcaagatggttgcagagacacttgttaacactattcctaaggctgttgttcattgccaagtcagacaagcgaaactctctttgcttaattacttctatgcacagattagtcagagtcaggggaaacgattgggacagttgctagatgagaacccggcattgatggaaaggagaatgcaatgtgcaaagaggctcgagctatacaagaaggctagagatgagattgatgcagcggtttgggttcgatgaacgaagccggtttgattttattggttgacatattaaaccttttaagttgataaacagacaactattgtagtacttgtggttatctccggtataatcgttgctatttcttgcacacacaaaattaacttaagttttttacttggtaataaaatttccttttctttgaccc

SEQ ID NO: 85488 - protein, 612 aa, Arabidopsis thaliana
  peptide (1)..(612): Ceres Seq. ID no. 12680705
  misc_feature (223)..(510): Pfam Name: Dynamin central region Pfam Description: Dynamin central region
  misc_feature (153)..(612): Homolog of NCBI NO: 30689765 NR Description: phragmoplastin -related [Arabidopsis thaliana]
  misc_feature (1)..(160): Homolog of NCBI NO: 30689765 NR Description: phragmoplastin -related [Arabidopsis thaliana]
  misc_feature (153)..(612): Homolog of NCBI NO: 30689760 NR Description: phragmoplastin -related [Arabidopsis thaliana]
  misc_feature (1)..(160): Homolog of NCBI NO: 30689760 NR Description: phragmoplastin -related [Arabidopsis thaliana]
  misc_feature (1)..(612): Homolog of NCBI NO: 18411520 NR Description: dynamin-like protein 4 (ADL4); protein id: supported by cDNA: gi_16226787, supported by cDNA: gi_19423871,
  misc_feature (1)..(612): Homolog of NCBI NO: 11357275 NR Description: dynamin-like protein 4 (ADL4) - Arabidopsis
  misc_feature (1)..(612): Homolog of NCBI NO: 6651401 NR Description: dynamin-like protein 4 [Arabidopsis thaliana]
  misc_feature (1)..(612): Homolog of NCBI NO: 37536976 NR Description: putative phragmoplastin [Oryza sativa (japonica group)] >gi|18854996|gb|AAL79688.1| putative phragmoplastin sativa] >gi|31433579|gb|AAP55077.1| putative phragmoplastin
  misc_feature (1)..(610): Homolog of NCBI NO: 15223914 NR Description: dynamin, putative; protein id: At1g14830.1, by cDNA: 12880., supported by cDNA: gi_19569771, supported by
  misc_feature (1)..(610): Homolog of NCBI NO: 21537304 NR Description: dynamin, putative [Arabidopsis thaliana]
MESLIVLINTIQRACTVVGDHGGDSNALSSLWEALPSVAVVGGQSSGKSSVLESIVGRDFLPRGSGIVTRRPLVLQLHKTENGTEDNAEFLHLTNKKFTNFSLVRKEIEDETDRITGKNKQISSIPIHLSIFSPNVVNLTLIDLPGLTKVAVEGQPETIVEDIESMVRSYVEKPNCLILAISPANQDIATSDAMKLAKEVDPIGDRTFGVLTKLDLMDKGTNALDVINGRSYKLKYPWVGIVNRSQADINKNVDMMVARRKEREYFETSPDYGHLATRMGSEYLAKLLSKLLESVIRSRIPSILSLINNNIEELERELDQLGRPIAIDAGAQLYTILGMCRAFEKIFKEHLDGGRPGGARIYGIFDYNLPTAIKKLPFDRHLSLQSVKRIVSESDGYQPHLIAPELGYRRLIEGSLNHFRGPAEASVNAIHLILKELVRKAIAETEELKRFPSLQIELVAAANSSLDKFREESMKSVLRLVDMESSYLTVDFFRKLHVESQNMSLSSPTSAIDQYGDGHFRKIASNVAAYIKMVAETLVNTIPKAVVHCQVRQAKLSLLNYFYAQISQSQGKRLGQLLDENPALMERRMQCAKRLELYKKARDEIDAAVWVR

SEQ ID NO: 85489 - protein, 447 aa, Arabidopsis thaliana
  peptide (1)..(447): Ceres Seq. ID no. 12680706
  misc_feature (58)..(345): Pfam Name: Dynamin central region Pfam Description: Dynamin central region
  misc_feature (1)..(447): Homolog of NCBI NO: 30689765 NR Description: phragmoplastin -related [Arabidopsis thaliana]
  misc_feature (1)..(447): Homolog of NCBI NO: 30689760 NR Description: phragmoplastin -related [Arabidopsis thaliana]
  misc_feature (1)..(447): Homolog of NCBI NO: 18411520 NR Description: dynamin-like protein 4 (ADL4); protein id: supported by cDNA: gi_16226787, supported by cDNA: gi_19423871,
  misc_feature (1)..(447): Homolog of NCBI NO: 11357275 NR Description: dynamin-like protein 4 (ADL4) - Arabidopsis
  misc_feature (1)..(447): Homolog of NCBI NO: 6651401 NR Description: dynamin-like protein 4 [Arabidopsis thaliana]
  misc_feature (1)..(447): Homolog of NCBI NO: 37536976 NR Description: putative phragmoplastin [Oryza sativa (japonica group)] >gi|18854996|gb|AAL79688.1| putative phragmoplastin sativa] >gi|31433579|gb|AAP55077.1| putative phragmoplastin
  misc_feature (1)..(445): Homolog of NCBI NO: 15223914 NR Description: dynamin, putative; protein id: At1g14830.1, by cDNA: 12880., supported by cDNA: gi_19569771, supported by
  misc_feature (1)..(445): Homolog of NCBI NO: 21537304 NR Description: dynamin, putative [Arabidopsis thaliana]
  misc_feature (1)..(445): Homolog of NCBI NO: 30693985 NR Description: dynamin-related protein (pir||S59558)
  misc_feature (1)..(445): Homolog of NCBI NO: 30695480 NR Description: dynamin-related protein [Arabidopsis thaliana]
MVRSYVEKPNCLILAISPANQDIATSDAMKLAKEVDPIGDRTFGVLTKLDLMDKGTNALDVINGRSYKLKYPWVGIVNRSQADINKNVDMMVARRKEREYFETSPDYGHLATRMGSEYLAKLLSKLLESVIRSRIPSILSLINNNIEELERELDQLGRPIAIDAGAQLYTILGMCRAFEKIFKEHLDGGRPGGARIYGIFDYNLPTAIKKLPFDRHLSLQSVKRIVSESDGYQPHLIAPELGYRRLIEGSLNHFRGPAEASVNAIHLILKELVRKAIAETEELKRFPSLQIELVAAANSSLDKFREESMKSVLRLVDMESSYLTVDFFRKLHVESQNMSLSSPTSAIDQYGDGHFRKIASNVAAYIKMVAETLVNTIPKAVVHCQVRQAKLSLLNYFYAQISQSQGKRLGQLLDENPALMERRMQCAKRLELYKKARDEIDAAVWVR

SEQ ID NO: 85490 - protein, 419 aa, Arabidopsis thaliana
  peptide (1)..(419): Ceres Seq. ID no. 12680707
  misc_feature (30)..(317): Pfam Name: Dynamin central region Pfam Description: Dynamin central region
  misc_feature (1)..(419): Homolog of NCBI NO: 30689765 NR Description: phragmoplastin -related [Arabidopsis thaliana]
  misc_feature (1)..(419): Homolog of NCBI NO: 30689760 NR Description: phragmoplastin -related [Arabidopsis thaliana]
  misc_feature (1)..(419): Homolog of NCBI NO: 18411520 NR Description: dynamin-like protein 4 (ADL4); protein id: supported by cDNA: gi_16226787, supported by cDNA: gi_19423871,
  misc_feature (1)..(419): Homolog of NCBI NO: 11357275 NR Description: dynamin-like protein 4 (ADL4) - Arabidopsis
  misc_feature (1)..(419): Homolog of NCBI NO: 6651401 NR Description: dynamin-like protein 4 [Arabidopsis thaliana]
  misc_feature (1)..(419): Homolog of NCBI NO: 37536976 NR Description: putative phragmoplastin [Oryza sativa (japonica group)] >gi|18854996|gb|AAL79688.1| putative phragmoplastin sativa] >gi|31433579|gb|AAP55077.1| putative phragmoplastin
  misc_feature (1)..(417): Homolog of NCBI NO: 15223914 NR Description: dynamin, putative; protein id: At1g14830.1, by cDNA: 12880., supported by cDNA: gi_19569771, supported by
  misc_feature (1)..(417): Homolog of NCBI NO: 21537304 NR Description: dynamin, putative [Arabidopsis thaliana]
  misc_feature (1)..(417): Homolog of NCBI NO: 30693985 NR Description: dynamin-related protein (pir||S59558)
  misc_feature (1)..(417): Homolog of NCBI NO: 30695480 NR Description: dynamin-related protein [Arabidopsis thaliana]
MKLAKEVDPIGDRTFGVLTKLDLMDKGTNALDVINGRSYKLKYPWVGIVNRSQADINKNVDMMVARRKEREYFETSPDYGHLATRMGSEYLAKLLSKLLESVIRSRIPSILSLINNNIEELERELDQLGRPIAIDAGAQLYTILGMCRAFEKIFKEHLDGGRPGGARIYGIFDYNLPTAIKKLPFDRHLSLQSVKRIVSESDGYQPHLIAPELGYRRLIEGSLNHFRGPAEASVNAIHLILKELVRKAIAETEELKRFPSLQIELVAAANSSLDKFREESMKSVLRLVDMESSYLTVDFFRKLHVESQNMSLSSPTSAIDQYGDGHFRKIASNVAAYIKMVAETLVNTIPKAVVHCQVRQAKLSLLNYFYAQISQSQGKRLGQLLDENPALMERRMQCAKRLELYKKARDEIDAAVWVR

SEQ ID NO: 85491 - DNA, 2091 bp, Arabidopsis thaliana
  misc_feature (1)..(2091): Ceres Seq. ID no. 12680708
atattgaaaacgcccgctctctgttttttctcgtttctcctcccttcgttctcgggtccatctgcgttcgtatcaagtccttgcactcttcttcttcgtatctggattgtttcgaagttctctaacgaacgacaatggagagtttgatcgtgttgattaatacgatacaaagagcatgcaccgtagtcggcgatcatggcggcgatagcaacgctctatcttctctatgggaagctcttccttccgtcgccgtcgttggtggccagagttctggtaaatcttcggttctagagagtatcgtcgggagagattttcttcccagaggatccggtattgttacgagacggcctttggttttacaacttcataagactgaaaatggaacagaggataacgcagagtttctccaccttaccaataaaaaattcaccaatttctctttggttagaaaggagattgaggatgagactgatagaatcactgggaagaacaaacagatttcttcaattcctattcacctcagtattttctctcccaatgaaggacagccagaaactattgttgaggatatcgaatccatggttcgctcatacgtcgaaaagcctaactgtcttatactggcaatatctcctgctaatcaagacatagctacatccgacgcgatgaagctcgcgaaagaagtggatccaataggtgatagaacgtttggagttttgacaaagttagacttaatggacaagggaactaatgcattggacgttatcaacggaagatcttacaagctgaaatatccttgggttgggatagtgaaccgttcacaagccgacattaataagaatgtcgacatgatggttgcaagaaggaaagagcgagagtactttgaaaccagtcctgactatggtcacttagccacaagaatgggctcagaatatcttgcaaagctcctctctaagctcttagaatctgttataaggtcacgtattccaagtatcctatccttgataaacaacaacatcgaggaactcgaaagagagttagaccaattgggcaggcctatcgctattgatgctggagctcaactatacactatcttgggaatgtgtagagcattcgaaaagatattcaaagagcatttggatggcgggcgtcccggaggtgcacggatctatggaatctttgactacaatcttccaacagccataaaaaaacttccatttgatcgtcatctttcattgcaaagtgttaagagaattgtctcagaatctgatggctatcaacctcacttgatagcaccagaattaggttatcgtcgtcttattgaaggatccctaaatcattttagaggtccagctgaagcttctgtgaatgctattcaccttatcttaaaagagcttgtaaggaaagcaatcgcagaaactgaggagctaaaacgtttcccttcactacaaattgagttagttgctgcagcaaactcatcattagacaagtttcgtgaagaaagcatgaagtcagttcttagattagtcgacatggaatcttcatatctaacggttgacttctttcgcaagcttcatgtagaaagccaaaacatgtctctttcttcaccaacatcagcaatagaccaatacggtgatgggcatttcagaaagatagcttcaaatgtagctgcttatatcaagatggttgcagagacacttgttaacactattcctaaggctgttgttcattgccaagtcagacaagcgaaactctctttgcttaattacttctatgcacagattagtcagagtcaggggaaacgattgggacagttgctagatgagaacccggcattgatggaaaggagaatgcaatgtgcaaagaggctcgagctatacaagaaggctagagatgagattgatgcagcggtttgggttcgatgaacgaagccggtttgattttattggttgacatattaaaccttttaagttgataaacagacaactattgtagtacttgtggttatctccggtataatcgttgctatttcttgcacacacaaaattaacttaagttttttacttggtaataaaatttccttttctttgaccc

SEQ ID NO: 85492 - protein, 595 aa, Arabidopsis thaliana
  peptide (1)..(595): Ceres Seq. ID no. 12680709
  misc_feature (206)..(493): Pfam Name: Dynamin central region Pfam Description: Dynamin central region
  misc_feature (1)..(595): Homolog of NCBI NO: 30689765 NR Description: phragmoplastin -related [Arabidopsis thaliana]
  misc_feature (1)..(595): Homolog of NCBI NO: 30689760 NR Description: phragmoplastin -related [Arabidopsis thaliana]
  misc_feature (136)..(595): Homolog of NCBI NO: 30689768 NR Description: phragmoplastin -related [Arabidopsis thaliana]
  misc_feature (1)..(161): Homolog of NCBI NO: 30689768 NR Description: phragmoplastin -related [Arabidopsis thaliana]
  misc_feature (136)..(595): Homolog of NCBI NO: 7484944 NR Description: probable phragmoplastin At2g44590 [imported] - thaliana >gi|3341679|gb|AAC27461.1| putative phragmoplastin
  misc_feature (1)..(161): Homolog of NCBI NO: 7484944 NR Description: probable phragmoplastin At2g44590 [imported] - thaliana >gi|3341679|gb|AAC27461.1| putative phragmoplastin
  misc_feature (136)..(595): Homolog of NCBI NO: 18411520 NR Description: dynamin-like protein 4 (ADL4); protein id: supported by cDNA: gi_16226787, supported by cDNA: gi_19423871,
  misc_feature (1)..(135): Homolog of NCBI NO: 18411520 NR Description: dynamin-like protein 4 (ADL4); protein id: supported by cDNA: gi_16226787, supported by cDNA: gi_19423871,
  misc_feature (136)..(595): Homolog of NCBI NO: 11357275 NR Description: dynamin-like protein 4 (ADL4) - Arabidopsis
  misc_feature (1)..(135): Homolog of NCBI NO: 11357275 NR Description: dynamin-like protein 4 (ADL4) - Arabidopsis
MESLIVLINTIQRACTVVGDHGGDSNALSSLWEALPSVAVVGGQSSGKSSVLESIVGRDFLPRGSGIVTRRPLVLQLHKTENGTEDNAEFLHLTNKKFTNFSLVRKEIEDETDRITGKNKQISSIPIHLSIFSPNEGQPETIVEDIESMVRSYVEKPNCLILAISPANQDIATSDAMKLAKEVDPIGDRTFGVLTKLDLMDKGTNALDVINGRSYKLKYPWVGIVNRSQADINKNVDMMVARRKEREYFETSPDYGHLATRMGSEYLAKLLSKLLESVIRSRIPSILSLINNNIEELERELDQLGRPIAIDAGAQLYTILGMCRAFEKIFKEHLDGGRPGGARIYGIFDYNLPTAIKKLPFDRHLSLQSVKRIVSESDGYQPHLIAPELGYRRLIEGSLNHFRGPAEASVNAIHLILKELVRKAIAETEELKRFPSLQIELVAAANSSLDKFREESMKSVLRLVDMESSYLTVDFFRKLHVESQNMSLSSPTSAIDQYGDGHFRKIASNVAAYIKMVAETLVNTIPKAVVHCQVRQAKLSLLNYFYAQISQSQGKRLGQLLDENPALMERRMQCAKRLELYKKARDEIDAAVWVR

SEQ ID NO: 85493 - protein, 447 aa, Arabidopsis thaliana; identical to SEQ ID NO: 85489
  peptide (1)..(447): Ceres Seq. ID no. 12680710
  misc_feature (58)..(345): Pfam Name: Dynamin central region Pfam Description: Dynamin central region
  misc_feature (1)..(447): Homolog of NCBI NO: 30689765 NR Description: phragmoplastin -related [Arabidopsis thaliana]
  misc_feature (1)..(447): Homolog of NCBI NO: 30689760 NR Description: phragmoplastin -related [Arabidopsis thaliana]
  misc_feature (1)..(447): Homolog of NCBI NO: 30689768 NR Description: phragmoplastin -related [Arabidopsis thaliana]
  misc_feature (1)..(13): Homolog of NCBI NO: 30689768 NR Description: phragmoplastin -related [Arabidopsis thaliana]
  misc_feature (1)..(447): Homolog of NCBI NO: 7484944 NR Description: probable phragmoplastin At2g44590 [imported] - thaliana >gi|3341679|gb|AAC27461.1| putative phragmoplastin
  misc_feature (1)..(13): Homolog of NCBI NO: 7484944 NR Description: probable phragmoplastin At2g44590 [imported] - thaliana >gi|3341679|gb|AAC27461.1| putative phragmoplastin
  misc_feature (1)..(447): Homolog of NCBI NO: 18411520 NR Description: dynamin-like protein 4 (ADL4); protein id: supported by cDNA: gi_16226787, supported by cDNA: gi_19423871,
  misc_feature (1)..(447): Homolog of NCBI NO: 11357275 NR Description: dynamin-like protein 4 (ADL4) - Arabidopsis
  misc_feature (1)..(447): Homolog of NCBI NO: 6651401 NR Description: dynamin-like protein 4 [Arabidopsis thaliana]
  misc_feature (1)..(447): Homolog of NCBI NO: 37536976 NR Description: putative phragmoplastin [Oryza sativa (japonica group)] >gi|18854996|gb|AAL79688.1| putative phragmoplastin sativa] >gi|31433579|gb|AAP55077.1| putative phragmoplastin

SEQ ID NO: 85494 - protein, 419 aa, Arabidopsis thaliana; identical to SEQ ID NO: 85490
  peptide (1)..(419): Ceres Seq. ID no. 12680711
  misc_feature (30)..(317): Pfam Name: Dynamin central region Pfam Description: Dynamin central region
  misc_feature (1)..(419): Homolog of NCBI NO: 30689765 NR Description: phragmoplastin -related [Arabidopsis thaliana]
  misc_feature (1)..(419): Homolog of NCBI NO: 30689760 NR Description: phragmoplastin -related [Arabidopsis thaliana]
  misc_feature (1)..(419): Homolog of NCBI NO: 30689768 NR Description: phragmoplastin -related [Arabidopsis thaliana]
  misc_feature (1)..(419): Homolog of NCBI NO: 7484944 NR Description: probable phragmoplastin At2g44590 [imported] - thaliana >gi|3341679|gb|AAC27461.1| putative phragmoplastin
  misc_feature (1)..(419): Homolog of NCBI NO: 18411520 NR Description: dynamin-like protein 4 (ADL4); protein id: supported by cDNA: gi_16226787, supported by cDNA: gi_19423871,
  misc_feature (1)..(419): Homolog of NCBI NO: 11357275 NR Description: dynamin-like protein 4 (ADL4) - Arabidopsis
  misc_feature (1)..(419): Homolog of NCBI NO: 6651401 NR Description: dynamin-like protein 4 [Arabidopsis thaliana]
  misc_feature (1)..(419): Homolog of NCBI NO: 37536976 NR Description: putative phragmoplastin [Oryza sativa (japonica group)] >gi|18854996|gb|AAL79688.1| putative phragmoplastin sativa] >gi|31433579|gb|AAP55077.1| putative phragmoplastin
  misc_feature (1)..(417): Homolog of NCBI NO: 15223914 NR Description: dynamin, putative; protein id: At1g14830.1, by cDNA: 12880., supported by cDNA: gi_19569771, supported by
  misc_feature (1)..(417): Homolog of NCBI NO: 21537304 NR Description: dynamin, putative [Arabidopsis thaliana]

SEQ ID NO: 85495 - DNA, 1200 bp, Arabidopsis thaliana
  misc_feature (1)..(1200): Ceres Seq. ID no. 12680725
  misc_feature: MA Experiment ID: 20000180 Result: Up-regulated in Transcription
  misc_feature: MA Experiment 20000180 PARAMETER Experiment Name: At_Germinating_Seeds_P Parameter: Age (hr) Value: 24 vs. 0
  misc_feature: MA Experiment 20000180 PARAMETER Experiment Name: At_Germinating_Seeds_P Parameter: Tissue Value: Germinating Seeds
  misc_feature: MA Experiment ID: 20000184 Result: Up-regulated in Transcription
  misc_feature: MA Experiment 20000184 PARAMETER Experiment Name: At_Shoots__P Parameter: Age (day) Value: 7
  misc_feature: MA Experiment 20000184 PARAMETER Experiment Name: At_Shoots__P Parameter: Tissue Value: Shoots vs. Whole Plant
  misc_feature: MA Experiment ID: 20000185 Result: Up-regulated in Transcription
  misc_feature: MA Experiment 20000185 PARAMETER Experiment Name: At_Roots__P Parameter: Age (day) Value: 7 vs. 21
  misc_feature: MA Experiment 20000185 PARAMETER Experiment Name: At_Roots__P Parameter: Organism Value: A. thaliana
  misc_feature: MA Experiment 20000185 PARAMETER Experiment Name: At_Roots__P Parameter: Tissue Value: Roots vs. Whole Plant
  misc_feature: MA Experiment ID: 20000227 Result: Up-regulated in Transcription
  misc_feature: MA Experiment 20000227 PARAMETER Experiment Name: At_Root-Tips-vs-Tops_P Parameter: Tissue Value: Root Tips vs. Root Tops
  misc_feature: MA Experiment ID: 20000265 Result: Up-regulated in Transcription
  misc_feature: MA Experiment 20000265 PARAMETER Experiment Name: At_Open_Flower_P Parameter: Age (day) Value: 21
  misc_feature: MA Experiment 20000265 PARAMETER Experiment Name: At_Open_Flower_P Parameter: Plant Line Value: WS
  misc_feature: MA Experiment 20000265 PARAMETER Experiment Name: At_Open_Flower_P Parameter: Tissue Value: Closed Flower vs. Whole Plant
  misc_feature: MA Experiment ID: 20000438 Result: Up-regulated in Transcription
  misc_feature: MA Experiment 20000438 PARAMETER Experiment Name: At_Shoots__P Parameter: Age (day) Value: 14
  misc_feature: MA Experiment 20000438 PARAMETER Experiment Name: At_Shoots__P Parameter: Tissue Value: Shoots vs. Whole Plant
  misc_feature: MA Experiment ID: 20000439 Result: Up-regulated in Transcription
  misc_feature: MA Experiment 20000439 PARAMETER Experiment Name: At_Roots__P Parameter: Age (day) Value: 14 vs. 21
  misc_feature: MA Experiment 20000439 PARAMETER Experiment Name: At_Roots__P Parameter: Organism Value: A. thaliana
  misc_feature: MA Experiment 20000439 PARAMETER Experiment Name: At_Roots__P Parameter: Tissue Value: Roots vs. Whole Plant
  misc_feature: MA Experiment ID: 20000495 Result: Up-regulated in Transcription
  misc_feature: MA Experiment 20000495 PARAMETER Experiment Name: At_Guard_Cells_P Parameter: Harvest Date Value: 8/2/2002
  misc_feature: MA Experiment 20000495 PARAMETER Experiment Name: At_Guard_Cells_P Parameter: Organism Value: A. thaliana
  misc_feature: MA Experiment 20000495 PARAMETER Experiment Name: At_Guard_Cells_P Parameter: Tissue Value: Guard Cells vs. Leaves
  misc_feature: MA Experiment ID: 20000576 Result: Up-regulated in Transcription
  misc_feature: MA Experiment 20000576 PARAMETER Experiment Name: At_100uM_ABA_Mutants__P Parameter: Organism Value: A. thaliana
  misc_feature: MA Experiment 20000576 PARAMETER Experiment Name: At_100uM_ABA_Mutants__P Parameter: Plant Line Value: CS23
  misc_feature: MA Experiment 20000576 PARAMETER Experiment Name: At_100uM_ABA_Mutants__P Parameter: Timepoint (hr) Value: 6
  misc_feature: MA Experiment 20000576 PARAMETER Experiment Name: At_100uM_ABA_Mutants__P Parameter: Tissue Value: Whole Plant
  misc_feature: MA Experiment 20000576 PARAMETER Experiment Name: At_100uM_ABA_Mutants__P Parameter: Treatment Value: 1uM ABA vs. No Treatment
  misc_feature: MA Experiment ID: 20001247 Result: Up-regulated in Transcription
  misc_feature: MA Experiment 20001247 PARAMETER Experiment Name: At_Far-red-induction_P Parameter: Age (day) Value: 7
  misc_feature: MA Experiment 20001247 PARAMETER Experiment Name: At_Far-red-induction_P Parameter: Light Value: Far-red vs. White
  misc_feature: MA Experiment 20001247 PARAMETER Experiment Name: At_Far-red-induction_P Parameter: Organism Value: A. thaliana
  misc_feature: MA Experiment 20001247 PARAMETER Experiment Name: At_Far-red-induction_P Parameter: Plant Line Value: Columbia
  misc_feature: MA Experiment 20001247 PARAMETER Experiment Name: At_Far-red-induction_P Parameter: Timepoint (hr) Value: 1
  misc_feature: MA Experiment 20001247 PARAMETER Experiment Name: At_Far-red-induction_P Parameter: Tissue Value: Whole Plant
  misc_feature: MA Experiment ID: 20001248 Result: Up-regulated in Transcription
  misc_feature: MA Experiment 20001248 PARAMETER Experiment Name: At_Far-red-induction_P Parameter: Age (day) Value: 7
  misc_feature: MA Experiment 20001248 PARAMETER Experiment Name: At_Far-red-induction_P Parameter: Light Value: Far-red vs. White
  misc_feature: MA Experiment 20001248 PARAMETER Experiment Name: At_Far-red-induction_P Parameter: Organism Value: A. thaliana
  misc_feature: MA Experiment 20001248 PARAMETER Experiment Name: At_Far-red-induction_P Parameter: Plant Line Value: Columbia
  misc_feature: MA Experiment 20001248 PARAMETER Experiment Name: At_Far-red-induction_P Parameter: Timepoint (hr) Value: 4
  misc_feature: MA Experiment 20001248 PARAMETER Experiment Name: At_Far-red-induction_P Parameter: Tissue Value: Whole Plant
  misc_feature: MA Experiment ID: 20001450 Result: Up-regulated in Transcription
  misc_feature: MA Experiment 20001450 PARAMETER Experiment Name: At_Far-red-induction_P Parameter: Age (day) Value: 7
  misc_feature: MA Experiment 20001450 PARAMETER Experiment Name: At_Far-red-induction_P Parameter: Light Value: Far-red vs. White
  misc_feature: MA Experiment 20001450 PARAMETER Experiment Name: At_Far-red-induction_P Parameter: Organism Value: A. thaliana
  misc_feature: MA Experiment 20001450 PARAMETER Experiment Name: At_Far-red-induction_P Parameter: Plant Line Value: Columbia
  misc_feature: MA Experiment 20001450 PARAMETER Experiment Name: At_Far-red-induction_P Parameter: Timepoint (hr) Value: 8
  misc_feature: MA Experiment 20001450 PARAMETER Experiment Name: At_Far-red-induction_P Parameter: Tissue Value: Whole Plant
  misc_feature: MA Experiment ID: 20001451 Result: Up-regulated in Transcription
  misc_feature: MA Experiment 20001451 PARAMETER Experiment Name: At_Far-red-induction_P Parameter: Age (day) Value: 7
  misc_feature: MA Experiment 20001451 PARAMETER Experiment Name: At_Far-red-induction_P Parameter: Light Value: Far-red vs. White
  misc_feature: MA Experiment 20001451 PARAMETER Experiment Name: At_Far-red-induction_P Parameter: Organism Value: A. thaliana
  misc_feature: MA Experiment 20001451 PARAMETER Experiment Name: At_Far-red-induction_P Parameter: Plant Line Value: Columbia
  misc_feature: MA Experiment 20001451 PARAMETER Experiment Name: At_Far-red-induction_P Parameter: Timepoint (hr) Value: 24
  misc_feature: MA Experiment 20001451 PARAMETER Experiment Name: At_Far-red-induction_P Parameter: Tissue Value: Whole Plant
  misc_feature: MA Experiment ID: 20001911 Result: Down-regulated in Transcription
  misc_feature: MA Experiment 20001911 PARAMETER Experiment Name: At_Drought_Reproduction_P Parameter: Age (day) Value: 40
  misc_feature: MA Experiment 20001911 PARAMETER Experiment Name: At_Drought_Reproduction_P Parameter: Organism Value: A. thaliana
  misc_feature: MA Experiment 20001911 PARAMETER Experiment Name: At_Drought_Reproduction_P Parameter: Plant Line Value: WS
  misc_feature: MA Experiment 20001911 PARAMETER Experiment Name: At_Drought_Reproduction_P Parameter: Timepoint (day) Value: 10
  misc_feature: MA Experiment 20001911 PARAMETER Experiment Name: At_Drought_Reproduction_P Parameter: Tissue Value: Flowers
  misc_feature: MA Experiment 20001911 PARAMETER Experiment Name: At_Drought_Reproduction_P Parameter: Treatment Value: Drought vs. No Drought
agaaagagagagagacagagtcagagtcttcgtctgcaagagagaacaataccactcaatcataatctataacaatggacgtctatggcttatcttcaccagacttacttcgaatcgacgaccttcttgatttctccaacgaagacatcttctccgcttcttcttccggtggttccaccgccgctacttcctcttcttctttccctcctcctcaaaaccctagtttccaccaccaccatctcccttcctccgccgatcatcactccttcctccacgacatttgcgttcccgtataatctctctccctctctctttctccaatcaaagtttcgactttgaaataaagattgtgttttgatttttgttgtattttttgtgtgcagagtgatgacgcagctcatcttgaatggctttcgcaattcgtggacgattctttcgctgattttccggcgaatccattaggaggaactatgacttctgtcaaaactgaaacttcctttccggggaaaccaagaagcaaacgatcaagagctcctgctcctttcgccggaacatggtctccgatgccactggaatccgagcatcagcagcttcactccgccgccaaattcaagccaaagaaagaacaatccggcggaggaggaggaggaggaggaagacatcagtcatcgtcatcggagactacggaaggaggaggaatgaggagatgtactcactgtgcatcggagaaaacgccacagtggaggacaggaccacttggacctaaaacactatgtaacgcttgtggagtccggtttaaatccggtagacttgtaccggaatatagaccggcttcgagtcctacttttgttttgactcagcattcaaactctcaccggaaagtgatggagcttcgacggcagaaagaagttatgagacaaccacaacaagttcaacttcatcaccaccaccacccgttttagttttcacttttcactgcctcgtccgtcgtcactcttttttttgtttttctttttggttcttggggttgggttttgggtaacgtcacgtgatgatgacgtgtcgcgatcctagcggcgttaatcacgtgaccgacgacgacgggagcctaaaatttttagtgaacgttggaaaatcaaacctcatttaattgttaattattaaaaaaaaattatatctttgggctttgccttttctcct

SEQ ID NO: 85496 - protein, 163 aa, Arabidopsis thaliana
  peptide (1)..(163): Ceres Seq. ID no. 12680726
  misc_feature (1)..(163): Homolog of NCBI NO: 15225399 NR Description: GATA zinc finger protein; protein id: At2g45050.1
  misc_feature (64)..(160): Homolog of NCBI NO: 37572447 NR Description: AG-motif binding protein-3 [Nicotiana tabacum]
  misc_feature (1)..(28): Homolog of NCBI NO: 37572447 NR Description: AG-motif binding protein-3 [Nicotiana tabacum]
  misc_feature (1)..(146): Homolog of NCBI NO: 15232355 NR Description: GATA zinc finger protein; protein id: supported by cDNA: gi_14190406, supported by cDNA: gi_14517394, by cDNA: gi_15215890 [Arabidopsis thaliana]
  misc_feature (1)..(148): Homolog of NCBI NO: 37536778 NR Description: putative transcription factor [Oryza sativa
  misc_feature (1)..(72): Homolog of NCBI NO: 15232355 NR Description: GATA zinc finger protein; protein id: supported by cDNA: gi_14190406, supported by cDNA: gi_14517394, by cDNA: gi_15215890 [Arabidopsis thaliana]
  misc_feature (5)..(147): Homolog of NCBI NO: 15233971 NR Description: GATA zinc finger protein; protein id: At4g32890.1
  misc_feature (1)..(163): Homolog of NCBI NO: 15239503 NR Description: GATA zinc finger protein; protein id: At5g25830.1
  misc_feature (1)..(53): Homolog of NCBI NO: 7484970 NR Description: GATA-binding transcription factor homolog 3
  misc_feature (1)..(53): Homolog of NCBI NO: 15236172 NR Description: GATA transcription factor 3; protein id: supported by cDNA: gi_20466647 [Arabidopsis thaliana]
MTSVKTETSFPGKPRSKRSRAPAPFAGTWSPMPLESEHQQLHSAAKFKPKKEQSGGGGGGGGRHQSSSSETTEGGGMRRCTHCASEKTPQWRTGPLGPKTLCNACGVRFKSGRLVPEYRPASSPTFVLTQHSNSHRKVMELRRQKEVMRQPQQVQLHHHHHPF

SEQ ID NO: 85497 - protein, 132 aa, Arabidopsis thaliana
  peptide (1)..(132): Ceres Seq. ID no. 12680727
  misc_feature (1)..(132): Homolog of NCBI NO: 15225399 NR Description: GATA zinc finger protein; protein id: At2g45050.1
  misc_feature (33)..(129): Homolog of NCBI NO: 37572447 NR Description: AG-motif binding protein-3 [Nicotiana tabacum]
  misc_feature (1)..(115): Homolog of NCBI NO: 15232355 NR Description: GATA zinc finger protein; protein id: supported by cDNA: gi_14190406, supported by cDNA: gi_14517394, by cDNA: gi_15215890 [Arabidopsis thaliana]
  misc_feature (1)..(117): Homolog of NCBI NO: 37536778 NR Description: putative transcription factor [Oryza sativa
  misc_feature (1)..(41): Homolog of NCBI NO: 15232355 NR Description: GATA zinc finger protein; protein id: supported by cDNA: gi_14190406, supported by cDNA: gi_14517394, by cDNA: gi_15215890 [Arabidopsis thaliana]
  misc_feature (1)..(116): Homolog of NCBI NO: 15233971 NR Description: GATA zinc finger protein; protein id: At4g32890.1
  misc_feature (1)..(132): Homolog of NCBI NO: 15239503 NR Description: GATA zinc finger protein; protein id: At5g25830.1
  misc_feature (1)..(22): Homolog of NCBI NO: 7484970 NR Description: GATA-binding transcription factor homolog 3
  misc_feature (1)..(22): Homolog of NCBI NO: 15236172 NR Description: GATA transcription factor 3; protein id: supported by cDNA: gi_20466647 [Arabidopsis thaliana]
  misc_feature (1)..(22): Homolog of NCBI NO: 20466648 NR Description: GATA transcription factor 3 [Arabidopsis >gi|22136458|gb|AAM91307.1| GATA transcription factor 3
MPLESEHQQLHSAAKFKPKKEQSGGGGGGGGRHQSSSSETTEGGGMRRCTHCASEKTPQWRTGPLGPKTLCNACGVRFKSGRLVPEYRPASSPTFVLTQHSNSHRKVMELRRQKEVMRQPQQVQLHHHHHPF

SEQ ID NO: 85498 - protein, 87 aa, Arabidopsis thaliana
  peptide (1)..(87): Ceres Seq. ID no. 12680728
  misc_feature (1)..(87): Homolog of NCBI NO: 15225399 NR Description: GATA zinc finger protein; protein id: At2g45050.1
  misc_feature (1)..(84): Homolog of NCBI NO: 37572447 NR Description: AG-motif binding protein-3 [Nicotiana tabacum]
  misc_feature (1)..(70): Homolog of NCBI NO: 15232355 NR Description: GATA zinc finger protein; protein id: supported by cDNA: gi_14190406, supported by cDNA: gi_14517394, by cDNA: gi_15215890 [Arabidopsis thaliana]
  misc_feature (1)..(72): Homolog of NCBI NO: 37536778 NR Description: putative transcription factor [Oryza sativa
  misc_feature (1)..(71): Homolog of NCBI NO: 15233971 NR Description: GATA zinc finger protein; protein id: At4g32890.1
  misc_feature (1)..(87): Homolog of NCBI NO: 15239503 NR Description: GATA zinc finger protein; protein id: At5g25830.1
  misc_feature (2)..(71): Homolog of NCBI NO: 7484970 NR Description: GATA-binding transcription factor homolog 3
  misc_feature (2)..(71): Homolog of NCBI NO: 15236172 NR Description: GATA transcription factor 3; protein id: supported by cDNA: gi_20466647 [Arabidopsis thaliana]
  misc_feature (2)..(71): Homolog of NCBI NO: 20466648 NR Description: GATA transcription factor 3 [Arabidopsis >gi|22136458|gb|AAM91307.1| GATA transcription factor 3
  misc_feature (1)..(70): Homolog of NCBI NO: 37572449 NR Description: AG-motif binding protein-4 [Nicotiana tabacum]
MRRCTHCASEKTPQWRTGPLGPKTLCNACGVRFKSGRLVPEYRPASSPTFVLTQHSNSHRKVMELRRQKEVMRQPQQVQLHHHHHPF

SEQ ID NO: 85499 - DNA, 3287 bp, Arabidopsis thaliana
  misc_feature (1)..(3287): Ceres Seq. ID no. 12680729
  misc_feature: MA Experiment ID: 20000180 Result: Down-regulated in Transcription
  misc_feature: MA Experiment 20000180 PARAMETER Experiment Name: At_Germinating_Seeds_P Parameter: Age (hr) Value: 24 vs. 0
  misc_feature: MA Experiment 20000180 PARAMETER Experiment Name: At_Germinating_Seeds_P Parameter: Tissue Value: Germinating Seeds
  misc_feature: MA Experiment ID: 20000184 Result: Down-regulated in Transcription
  misc_feature: MA Experiment 20000184 PARAMETER Experiment Name: At_Shoots__P Parameter: Age (day) Value: 7
  misc_feature: MA Experiment 20000184 PARAMETER Experiment Name: At_Shoots__P Parameter: Tissue Value: Shoots vs. Whole Plant
actcttgtttttgtttctgtgagtgctgtgtgtgttctcggtttgtaatatctaagtcgcacaaagatcagacaaagtctgtttgcgtttgatagcattagagtctgatcgaatttggaagacctgtgagattagggtttctttttgtttgtttttttttattccgaaggagagctgcggagcaattggaattacctcggttaaagcaatcacgtagctttggatcgtttagggttttctcattgggtttgggggatttgtattcgagcttcctcaaactcaatctgatggtgatgtgagacaaggcttaatcctgttaattggcgattctagggtttttcaatggcgagcacaggcgagcctgaccgtaaaaggcgtcactttagctccatatcaccttctgaagctgcagccgccgtaaagaaacagcctttcttttggccctcctccgaggacaagcttgatactgcagttcttcagttccaaaatcttaagctatcacaaaagctagaggctcagcaggttgagtgttctattcttgaggataaactctctcagatcaaggaaaaacaattaccatacaactccagtttgaagactgtccataagtcttgggaaaagcttacagcttcagtggaatcatgctctgttcgtgtgagtgattcaagcagcggagctcataggtttgtaaacaaggaggatgggtcttctccagccgtgaaaaacgatttcatcaaccggctacttgaaactggtgctactgagagctcctcatccaatatctgctcgaatcagatggaagaaaatggagtgaatacgtcaagccagatgacgcaaaccttgtataatctagtagccgcgacagaggatttgaggtgtctgaaggatgaattatatcccacagttctcagaaccaatcttggtaaagatttgtgcggtcagctagctctgagtgagttggaatcagaaattaaaagtttcagaggggatctagatgatgtacttgtgaagttcaaatcactttctagagaattgcagagtcatcgcgatgctgatgctaaagttagagtagacctcaaacgaataagaggggagctagaggatgaggttgtggagcttcagcagtgtaatggtgacttgtcagcattgagagcagaaagggatgcaacagctggggcgtttttcccagtgttgagtcttggaaataagcttgctaccagtgatcgggagagggataaacaaagggatctgcaagacatggaaacagttctgaaagagttaacggtcctggcttcaggcaggctacaacagctaaaaaatcttcatgaggagaggacaaagatgcttggaaaaatgagtaatttacagaacaagtcaaagtctgtgaggtgcatctcatcttctcaagcctgcctttctttgaaagaccagctagaaaaatccaaagaagcagttttccagtatatggctttacttgagaaactgcaggttgaaaaagatagtatagtctggaaggaaagggagataaatataaaaaatgaactaggtgatgtttctcgaaagacgtctgctgttactgattctagaatggcttctttggattcggagatacagaaacaactggatgaaaaaatgcgaatcaagactaggctgggaaatatatcaagagagcgaggtagaaaagaaatctttgcagatatgaaggcattaatttcttcgttccccgaggaaatgagttccatgcgtagtcaattaaacaattataaagagactgctggaggtattcattctctgcgggctgatgtccagtccctctctggggttctatgtaggaagacaaaagagtatgaagcattgcaattgagatcagctgattatgcttctcagttaggtgacctgaatgctacggtttgtgatttgaagaacagtcatgaggagttaaagttgtttctggacatgtataaacgtgagtccactgatgcgagggacatagctgaagccaaggaacaggagtacagggcttgggctcatgttcagagtttgaaatcatcccttgatgagcaaaatctggagttgcgcgttaaggcagcaaatgaagctgaagccgtttcccaacaaatgttggctgctgcggaagcagagattgctgatttaaggcagaaaatggatgattgtaaaagggatgtcgccaagcattctgatatcttgaaatctaaacatgaagaacatggaacatatctttctgaaatacagacaattggaagtgcctatgaggacattgtaccgcaaaaccaacagcttttgcttcaagttacagagagggatgactataacatcaagcttttcttggaaggcataacttctaggcagatgcaagatactctgcttatcgataaatacatcatggataaggatatacagcaaggcagtgcatatgccagtttcctatccaagaaatcatcaagaattgaagatcagttgaggttctgcacagatcagtttcagaaactagcggaagataaatatcaaaagtctgtttctcttgaaaatctgcaaaagaaacgtgcagacatcgggaatggcttggaacaagctaggtcaaggctggaggagtcccattctaaagttgagcaaagtcggctggattatggggcattagaactggaactggagattgaaaggttcaataggagaaggatagaggaggaaatggaaatagccaaaaagaaagtttctcgtcttcggtctctcatagaaggatcatcggccattcaaaagctccgacaagaactcagtgaatttaaagaaattctgaagtgtaaggcctgcaacgatcgcccaaaagaggtggtgattacgaagtgctaccatttgttctgcaacccatgtgtgcaaaagctcacaggaactcgacaaaagaagtgtccaacatgctcagcaagttttggaccaaatgatattaaacctatctacatatgaccgcaccaaaacactctgagcatgatgatgtatgatgaaactgtgaaacacacacaggtactttttctcatataggataaacattagatctctctgtaattattactctcttttattgggaaaggtcatgaagaataattggatatggcaaatcagagtttttgaggaaccattttgggattttgataatgtgatagagaataggtaacactgttagggtttatgtctttggtgatacttcctttttgtttgtaatttggaacatggtttccgcaattgatttttcaattaaatcttcttttttgttc

SEQ ID NO: 85500 - protein, 878 aa, Arabidopsis thaliana
  peptide (1)..(878): Ceres Seq. ID no. 12680730
  misc_feature (826)..(864): Pfam Name: Zinc finger, C3HC4 type (RING finger) Pfam Description: Zinc finger, C3HC4 type (RING finger)
  misc_feature (364)..(878): Homolog of NCBI NO: 7486945 NR Description: hypothetical protein At2g44950 [imported] - thaliana >gi|20196921|gb|AAM14834.1| unknown protein [Arabidopsis
  misc_feature (1)..(250): Homolog of NCBI NO: 7486944 NR Description: hypothetical protein At2g44960 [imported] - thaliana >gi|20196919|gb|AAM14833.1| hypothetical protein
  misc_feature (37)..(874): Homolog of NCBI NO: 25405809 NR Description: unknown protein, 71207-66119 [imported] -
  misc_feature (1)..(878): Homolog of NCBI NO: 38605849 NR Description: OSJNBb0034G17.7 [Oryza sativa (japonica
  misc_feature (360)..(878): Homolog of NCBI NO: 37536934 NR Description: unknown protein [Oryza sativa (japonica
  misc_feature (498)..(874): Homolog of NCBI NO: 18405292 NR Description: Expressed protein; protein id: At1g55255.1,
  misc_feature (514)..(874): Homolog of NCBI NO: 21553880 NR Description: unknown [Arabidopsis thaliana]
  misc_feature (488)..(878): Homolog of NCBI NO: 31199093 NR Description: ENSANGP00000009515 [Anopheles gambiae]
  misc_feature (35)..(163): Homolog of NCBI NO: 31199093 NR Description: ENSANGP00000009515 [Anopheles gambiae]
  misc_feature (35)..(532): Homolog of NCBI NO: 31199091 NR Description: ENSANGP00000022800 [Anopheles gambiae]
MASTGEPDRKRRHFSSISPSEAAAAVKKQPFFWPSSEDKLDTAVLQFQNLKLSQKLEAQQVECSILEDKLSQIKEKQLPYNSSLKTVHKSWEKLTASVESCSVRVSDSSSGAHRFVNKEDGSSPAVKNDFINRLLETGATESSSSNICSNQMEENGVNTSSQMTQTLYNLVAATEDLRCLKDELYPTVLRTNLGKDLCGQLALSELESEIKSFRGDLDDVLVKFKSLSRELQSHRDADAKVRVDLKRIRGELEDEVVELQQCNGDLSALRAERDATAGAFFPVLSLGNKLATSDRERDKQRDLQDMETVLKELTVLASGRLQQLKNLHEERTKMLGKMSNLQNKSKSVRCISSSQACLSLKDQLEKSKEAVFQYMALLEKLQVEKDSIVWKEREINIKNELGDVSRKTSAVTDSRMASLDSEIQKQLDEKMRIKTRLGNISRERGRKEIFADMKALISSFPEEMSSMRSQLNNYKETAGGIHSLRADVQSLSGVLCRKTKEYEALQLRSADYASQLGDLNATVCDLKNSHEELKLFLDMYKRESTDARDIAEAKEQEYRAWAHVQSLKSSLDEQNLELRVKAANEAEAVSQQMLAAAEAEIADLRQKMDDCKRDVAKHSDILKSKHEEHGTYLSEIQTIGSAYEDIVPQNQQLLLQVTERDDYNIKLFLEGITSRQMQDTLLIDKYIMDKDIQQGSAYASFLSKKSSRIEDQLRFCTDQFQKLAEDKYQKSVSLENLQKKRADIGNGLEQARSRLEESHSKVEQSRLDYGALELELEIERFNRRRIEEEMEIAKKKVSRLRSLIEGSSAIQKLRQELSEFKEILKCKACNDRPKEVVITKCYHLFCNPCVQKLTGTRQKKCPTCSASFGPNDIKPIYI

SEQ ID NO: 85501 - protein, 727 aa, Arabidopsis thaliana
  peptide (1)..(727): Ceres Seq. ID no. 12680731
  misc_feature (675)..(713): Pfam Name: Zinc finger, C3HC4 type (RING finger) Pfam Description: Zinc finger, C3HC4 type (RING finger)
  misc_feature (213)..(727): Homolog of NCBI NO: 7486945 NR Description: hypothetical protein At2g44950 [imported] - thaliana >gi|20196921|gb|AAM14834.1| unknown protein [Arabidopsis
  misc_feature (1)..(99): Homolog of NCBI NO: 7486944 NR Description: hypothetical protein At2g44960 [imported] - thaliana >gi|20196919|gb|AAM14833.1| hypothetical protein
  misc_feature (1)..(723): Homolog of NCBI NO: 25405809 NR Description: unknown protein, 71207-66119 [imported] -
  misc_feature (1)..(727): Homolog of NCBI NO: 38605849 NR Description: OSJNBb0034G17.7 [Oryza sativa (japonica
  misc_feature (209)..(727): Homolog of NCBI NO: 37536934 NR Description: unknown protein [Oryza sativa (japonica
  misc_feature (347)..(723): Homolog of NCBI NO: 18405292 NR Description: Expressed protein; protein id: At1g55255.1,
  misc_feature (363)..(723): Homolog of NCBI NO: 21553880 NR Description: unknown [Arabidopsis thaliana]
  misc_feature (337)..(727): Homolog of NCBI NO: 31199093 NR Description: ENSANGP00000009515 [Anopheles gambiae]
  misc_feature (1)..(12): Homolog of NCBI NO: 31199093 NR Description: ENSANGP00000009515 [Anopheles gambiae]
  misc_feature (1)..(381): Homolog of NCBI NO: 31199091 NR Description: ENSANGP00000022800 [Anopheles gambiae]
MEENGVNTSSQMTQTLYNLVAATEDLRCLKDELYPTVLRTNLGKDLCGQLALSELESEIKSFRGDLDDVLVKFKSLSRELQSHRDADAKVRVDLKRIRGELEDEVVELQQCNGDLSALRAERDATAGAFFPVLSLGNKLATSDRERDKQRDLQDMETVLKELTVLASGRLQQLKNLHEERTKMLGKMSNLQNKSKSVRCISSSQACLSLKDQLEKSKEAVFQYMALLEKLQVEKDSIVWKEREINIKNELGDVSRKTSAVTDSRMASLDSEIQKQLDEKMRIKTRLGNISRERGRKEIFADMKALISSFPEEMSSMRSQLNNYKETAGGIHSLRADVQSLSGVLCRKTKEYEALQLRSADYASQLGDLNATVCDLKNSHEELKLFLDMYKRESTDARDIAEAKEQEYRAWAHVQSLKSSLDEQNLELRVKAANEAEAVSQQMLAAAEAEIADLRQKMDDCKRDVAKHSDILKSKHEEHGTYLSEIQTIGSAYEDIVPQNQQLLLQVTERDDYNIKLFLEGITSRQMQDTLLIDKYIMDKDIQQGSAYASFLSKKSSRIEDQLRFCTDQFQKLAEDKYQKSVSLENLQKKRADIGNGLEQARSRLEESHSKVEQSRLDYGALELELEIERFNRRRIEEEMEIAKKKVSRLRSLIEGSSAIQKLRQELSEFKEILKCKACNDRPKEVVITKCYHLFCNPCVQKLTGTRQKKCPTCSASFGPNDIKPIYI

SEQ ID NO: 85502 - protein, 716 aa, Arabidopsis thaliana
  peptide (1)..(716): Ceres Seq. ID no. 12680732
  misc_feature (664)..(702): Pfam Name: Zinc finger, C3HC4 type (RING finger) Pfam Description: Zinc finger, C3HC4 type (RING finger)
  misc_feature (202)..(716): Homolog of NCBI NO: 7486945 NR Description: hypothetical protein At2g44950 [imported] - thaliana >gi|20196921|gb|AAM14834.1| unknown protein [Arabidopsis
  misc_feature (1)..(88): Homolog of NCBI NO: 7486944 NR Description: hypothetical protein At2g44960 [imported] - thaliana >gi|20196919|gb|AAM14833.1| hypothetical protein
  misc_feature (1)..(712): Homolog of NCBI NO: 25405809 NR Description: unknown protein, 71207-66119 [imported] -
  misc_feature (1)..(716): Homolog of NCBI NO: 38605849 NR Description: OSJNBb0034G17.7 [Oryza sativa (japonica
  misc_feature (198)..(716): Homolog of NCBI NO: 37536934 NR Description: unknown protein [Oryza sativa (japonica
  misc_feature (336)..(712): Homolog of NCBI NO: 18405292 NR Description: Expressed protein; protein id: At1g55255.1,
  misc_feature (352)..(712): Homolog of NCBI NO: 21553880 NR Description: unknown [Arabidopsis thaliana]
  misc_feature (326)..(716): Homolog of NCBI NO: 31199093 NR Description: ENSANGP00000009515 [Anopheles gambiae]
  misc_feature (1)..(370): Homolog of NCBI NO: 31199091 NR Description: ENSANGP00000022800 [Anopheles gambiae]
  misc_feature (386)..(716): Homolog of NCBI NO: 31199091 NR Description: ENSANGP00000022800 [Anopheles gambiae]
MTQTLYNLVAATEDLRCLKDELYPTVLRTNLGKDLCGQLALSELESEIKSFRGDLDDVLVKFKSLSRELQSHRDADAKVRVDLKRIRGELEDEVVELQQCNGDLSALRAERDATAGAFFPVLSLGNKLATSDRERDKQRDLQDMETVLKELTVLASGRLQQLKNLHEERTKMLGKMSNLQNKSKSVRCISSSQACLSLKDQLEKSKEAVFQYMALLEKLQVEKDSIVWKEREINIKNELGDVSRKTSAVTDSRMASLDSEIQKQLDEKMRIKTRLGNISRERGRKEIFADMKALISSFPEEMSSMRSQLNNYKETAGGIHSLRADVQSLSGVLCRKTKEYEALQLRSADYASQLGDLNATVCDLKNSHEELKLFLDMYKRESTDARDIAEAKEQEYRAWAHVQSLKSSLDEQNLELRVKAANEAEAVSQQMLAAAEAEIADLRQKMDDCKRDVAKHSDILKSKHEEHGTYLSEIQTIGSAYEDIVPQNQQLLLQVTERDDYNIKLFLEGITSRQMQDTLLIDKYIMDKDIQQGSAYASFLSKKSSRIEDQLRFCTDQFQKLAEDKYQKSVSLENLQKKRADIGNGLEQARSRLEESHSKVEQSRLDYGALELELEIERFNRRRIEEEMEIAKKKVSRLRSLIEGSSAIQKLRQELSEFKEILKCKACNDRPKEVVITKCYHLFCNPCVQKLTGTRQKKCPTCSASFGPNDIKPIYI

SEQ ID NO: 85503 - DNA, 1843 bp, Arabidopsis thaliana
  misc_feature (1)..(1843): Ceres Seq. ID no. 12680769
  misc_feature: MA Experiment ID: 108574 Result: Down-regulated in Transcription
  misc_feature: MA Experiment 108574 PARAMETER Experiment Name: At_Wounding__cDNA_P Parameter: Timepoint (hr) Value: 1
  misc_feature: MA Experiment 108574 PARAMETER Experiment Name: At_Wounding__cDNA_P Parameter: Tissue Value: Aerial
  misc_feature: MA Experiment 108574 PARAMETER Experiment Name: At_Wounding__cDNA_P Parameter: Treatment Value: Wounding vs. No Wounding
  misc_feature: MA Experiment ID: 108576 Result: Down-regulated in Transcription
  misc_feature: MA Experiment 108576 PARAMETER Experiment Name: At_42deg_Heat_cDNA_P Parameter: Temperature (deg C) Value: 42 vs. 22
  misc_feature: MA Experiment 108576 PARAMETER Experiment Name: At_42deg_Heat_cDNA_P Parameter: Timepoint (hr) Value: 1
  misc_feature: MA Experiment 108576 PARAMETER Experiment Name: At_42deg_Heat_cDNA_P Parameter: Tissue Value: Aerial
  misc_feature: MA Experiment ID: 108668 Result: Down-regulated in Transcription
  misc_feature: MA Experiment 108668 PARAMETER Experiment Name: At_2mM_SA_cDNA_P Parameter: Plant Line Value: WS
  misc_feature: MA Experiment 108668 PARAMETER Experiment Name: At_2mM_SA_cDNA_P Parameter: Timepoint (hr) Value: 6
  misc_feature: MA Experiment 108668 PARAMETER Experiment Name: At_2mM_SA_cDNA_P Parameter: Treatment Value: 2mM SA vs. No Treatment
  misc_feature: MA Experiment ID: 20000111 Result: Down-regulated in Transcription
  misc_feature: MA Experiment 20000111 PARAMETER Experiment Name: At_42deg_Heat_cDNA_P Parameter: Temperature (deg C) Value: 42 vs. 22
  misc_feature: MA Experiment 20000111 PARAMETER Experiment Name: At_42deg_Heat_cDNA_P Parameter: Timepoint (hr) Value: 6
  misc_feature: MA Experiment 20000111 PARAMETER Experiment Name: At_42deg_Heat_cDNA_P Parameter: Tissue Value: Aerial
  misc_feature: MA Experiment ID: 20000144 Result: Down-regulated in Transcription
  misc_feature: MA Experiment 20000144 PARAMETER Experiment Name: At_42deg_Heat_cDNA_P Parameter: Temperature (deg C) Value: 42 vs. 22
  misc_feature: MA Experiment 20000144 PARAMETER Experiment Name: At_42deg_Heat_cDNA_P Parameter: Timepoint (hr) Value: 1
  misc_feature: MA Experiment 20000144 PARAMETER Experiment Name: At_42deg_Heat_cDNA_P Parameter: Tissue Value: Aerial
  misc_feature: MA Experiment ID: 20000185 Result: Down-regulated in Transcription
  misc_feature: MA Experiment 20000185 PARAMETER Experiment Name: At_Roots__P Parameter: Age (day) Value: 7 vs. 21
  misc_feature: MA Experiment 20000185 PARAMETER Experiment Name: At_Roots__P Parameter: Organism Value: A. thaliana
  misc_feature: MA Experiment 20000185 PARAMETER Experiment Name: At_Roots__P Parameter: Tissue Value: Roots vs. Whole Plant
  misc_feature: MA Experiment ID: 20000264 Result: Down-regulated in Transcription
  misc_feature: MA Experiment 20000264 PARAMETER Experiment Name: At_Open_Flower_P Parameter: Age (day) Value: 21
  misc_feature: MA Experiment 20000264 PARAMETER Experiment Name: At_Open_Flower_P Parameter: Plant Line Value: WS
  misc_feature: MA Experiment 20000264 PARAMETER Experiment Name: At_Open_Flower_P Parameter: Tissue Value: Open Flower vs. Whole Plant
  misc_feature: MA Experiment ID: 20000439 Result: Down-regulated in Transcription
  misc_feature: MA Experiment 20000439 PARAMETER Experiment Name: At_Roots__P Parameter: Age (day) Value: 14 vs. 21
  misc_feature: MA Experiment 20000439 PARAMETER Experiment Name: At_Roots__P Parameter: Organism Value: A. thaliana
  misc_feature: MA Experiment 20000439 PARAMETER Experiment Name: At_Roots__P Parameter: Tissue Value: Roots vs. Whole Plant
  misc_feature: MA Experiment ID: 20000495 Result: Down-regulated in Transcription
  misc_feature: MA Experiment 20000495 PARAMETER Experiment Name: At_Guard_Cells_P Parameter: Harvest Date Value: 8/2/2002
  misc_feature: MA Experiment 20000495 PARAMETER Experiment Name: At_Guard_Cells_P Parameter: Organism Value: A. thaliana
  misc_feature: MA Experiment 20000495 PARAMETER Experiment Name: At_Guard_Cells_P Parameter: Tissue Value: Guard Cells vs. Leaves
  misc_feature: MA Experiment ID: 20001247 Result: Up-regulated in Transcription
  misc_feature: MA Experiment 20001247 PARAMETER Experiment Name: At_Far-red-induction_P Parameter: Age (day) Value: 7
  misc_feature: MA Experiment 20001247 PARAMETER Experiment Name: At_Far-red-induction_P Parameter: Light Value: Far-red vs. White
  misc_feature: MA Experiment 20001247 PARAMETER Experiment Name: At_Far-red-induction_P Parameter: Organism Value: A. thaliana
  misc_feature: MA Experiment 20001247 PARAMETER Experiment Name: At_Far-red-induction_P Parameter: Plant Line Value: Columbia
  misc_feature: MA Experiment 20001247 PARAMETER Experiment Name: At_Far-red-induction_P Parameter: Timepoint (hr) Value: 1
  misc_feature: MA Experiment 20001247 PARAMETER Experiment Name: At_Far-red-induction_P Parameter: Tissue Value: Whole Plant
  misc_feature: Pfam Name: DUF296 Pfam Description: Domain of unknown function (DUF296)
cattaggattttgaatttccaaatacattttcagaaaaaaaagaattaaaagatcccattgttgttatcctcacagtaaatgcttttgcttgagagagagtctgttagaggttttttgtttgtttctgtttccttctgtcacccagaaaactaaaaagcaaacaaattcaagaagagagagagagagagatagcctcaaaaccaagtcctaaccattgttgatagaagagaaagcttttcttttcttgttgcttatggtgaaagaatgaaagagagagaggaggagaagtaagaagcagagaaagtgtttagagctttgcatgttcctttctctccaagtttatatcttcatcggtttcacaagttcacttaaaaagttgaaaagagtctttcttcttcaactattgtaaatgcgaaatggatcgaagagatgcaatgggattatccgggtcaggttcttactatatccatagaggattatccgggtcgggtcctccaacgtttcatggatcaccacagcaacagcaaggtcttcgtcacttacctaatcaaaactctccattcgggtcaggctccactggtttcggatctccttctttacacggtgatccttctctggcaacagcagccggaggagccggagctcttcctcatcatatcggcgttaatatgattgctcctcctccacctcccagtgaaactccgatgaaacgaaagagaggacggcctagaaaatacggtcaagacggctctgtttctttggctctgtcgtcttcctctgtttcgaccattactcccaacaactctaacaaacgcggccgtggtcgacctccgggctccggcaagaaacagagaatggcttccgttggtgaactgatgccttcatcttctggaatgagcttcacgccacatgttatcgcggtttcaataggagaagatattgcatcaaaggttatagctttctctcaacaaggtccgagagccatttgcgttttatctgcaagtggtgcagtctctactgcaacacttattcaaccatcagcatctcccggagccattaaatacgagggccggtttgaaatcctagcgttatcaacatcttatatagtggcaactgatggaagcttccgtaaccgaactggaaacttatcggtttcgcttgctagccccgatgggcgtgtgattggcggtgccattggtgggcctttaatagctgcaagtcctgttcaggttattgtagggagctttatatgggcagctccaaagatcaagagcaagaaacgagaagaagaagcttctgaagttgttcaagaaactgatgatcaccacgttctggacaataataacaacacgatttcgcctgtccctcagcagcagccaaaccaaaacctgatttggtcaacaggttcaaggcaaatggatatgcgtcatgctcatgctgatattgatttaatgcgcggttgatgatagcgagaaagaactctgtgtatataaagcatggaatctaggaagaagaagaaggaatataagctaacctctgaacaaaagtatgtggaaatgttagggaaaaagattaactctattagtgtacctctcatatctctaagcttgtttggttttactgtttctgtgactctgaagatttgcagagttcctttctttctctgttttagattgttcagtctttatgtaatttgcttgcaattctgattctacagcttagattcagtacattgtgtagaagtttacatgggaacctgaaaattgggcatttcatgggccttcatatgatccaatttattttcatcaaatttgtattagtacataattaattttgtttttt

SEQ ID NO: 85504 - protein, 348 aa, Arabidopsis thaliana; identical to SEQ ID NO: 36793
  peptide (1)..(348): Ceres Seq. ID no. 12680770
  misc_feature: Pfam Name: DUF296 Pfam Description: Domain of unknown function (DUF296)
  misc_feature (1)..(348): Homolog of NCBI NO: 15225902 NR Description: putative AT-hook DNA-binding protein; protein id: supported by cDNA: gi_14194130, supported by cDNA: gi_16323337, by cDNA: gi_17065245 [Arabidopsis thaliana]
  misc_feature (1)..(348): Homolog of NCBI NO: 30695388 NR Description: DNA-binding protein -related [Arabidopsis
  misc_feature (7)..(348): Homolog of NCBI NO: 11281387 NR Description: probable DNA-binding protein - Arabidopsis
  misc_feature (1)..(348): Homolog of NCBI NO: 7488825 NR Description: probable DNA-binding protein - garden pea
  misc_feature (1)..(337): Homolog of NCBI NO: 2213534 NR Description: DNA-binding PD1-like protein [Pisum sativum]
  misc_feature (1)..(348): Homolog of NCBI NO: 30696854 NR Description: DNA-binding protein -related [Arabidopsis
  misc_feature (1)..(321): Homolog of NCBI NO: 6633838 NR Description: F2K11.15 [Arabidopsis thaliana]
  misc_feature (1)..(348): Homolog of NCBI NO: 22330402 NR Description: DNA-binding protein, putative; protein id: supported by cDNA: gi_17979308, supported by cDNA: gi_20466008
  misc_feature (1)..(317): Homolog of NCBI NO: 6633838 NR Description: F2K11.15 [Arabidopsis thaliana]
  misc_feature (89)..(348): Homolog of NCBI NO: 6633838 NR Description: F2K11.15 [Arabidopsis thaliana]

SEQ ID NO: 85505 - protein, 342 aa, Arabidopsis thaliana; identical to SEQ ID NO: 36794
  peptide (1)..(342): Ceres Seq. ID no. 12680771
  misc_feature: Pfam Name: DUF296 Pfam Description: Domain of unknown function (DUF296)
  misc_feature (1)..(342): Homolog of NCBI NO: 15225902 NR Description: putative AT-hook DNA-binding protein; protein id: supported by cDNA: gi_14194130, supported by cDNA: gi_16323337, by cDNA: gi_17065245 [Arabidopsis thaliana]
  misc_feature (1)..(342): Homolog of NCBI NO: 30695388 NR Description: DNA-binding protein -related [Arabidopsis
  misc_feature (1)..(342): Homolog of NCBI NO: 11281387 NR Description: probable DNA-binding protein - Arabidopsis
  misc_feature (1)..(342): Homolog of NCBI NO: 7488825 NR Description: probable DNA-binding protein - garden pea
  misc_feature (1)..(331): Homolog of NCBI NO: 2213534 NR Description: DNA-binding PD1-like protein [Pisum sativum]
  misc_feature (1)..(342): Homolog of NCBI NO: 30696854 NR Description: DNA-binding protein -related [Arabidopsis
  misc_feature (1)..(315): Homolog of NCBI NO: 6633838 NR Description: F2K11.15 [Arabidopsis thaliana]
  misc_feature (1)..(342): Homolog of NCBI NO: 22330402 NR Description: DNA-binding protein, putative; protein id: supported by cDNA: gi_17979308, supported by cDNA: gi_20466008
  misc_feature (1)..(311): Homolog of NCBI NO: 6633838 NR Description: F2K11.15 [Arabidopsis thaliana]
  misc_feature (83)..(342): Homolog of NCBI NO: 6633838 NR Description: F2K11.15 [Arabidopsis thaliana]

SEQ ID NO: 85506 - protein, 264 aa, Arabidopsis thaliana; identical to SEQ ID NO: 36795
  peptide (1)..(264): Ceres Seq. ID no. 12680772
  misc_feature: Pfam Name: DUF296 Pfam Description: Domain of unknown function (DUF296)
  misc_feature (1)..(264): Homolog of NCBI NO: 15225902 NR Description: putative AT-hook DNA-binding protein; protein id: supported by cDNA: gi_14194130, supported by cDNA: gi_16323337, by cDNA: gi_17065245 [Arabidopsis thaliana]
  misc_feature (1)..(264): Homolog of NCBI NO: 30695388 NR Description: DNA-binding protein -related [Arabidopsis
  misc_feature (1)..(264): Homolog of NCBI NO: 11281387 NR Description: probable DNA-binding protein - Arabidopsis
  misc_feature (1)..(264): Homolog of NCBI NO: 7488825 NR Description: probable DNA-binding protein - garden pea
  misc_feature (1)..(253): Homolog of NCBI NO: 2213534 NR Description: DNA-binding PD1-like protein [Pisum sativum]
  misc_feature (1)..(264): Homolog of NCBI NO: 30696854 NR Description: DNA-binding protein -related [Arabidopsis
  misc_feature (1)..(237): Homolog of NCBI NO: 6633838 NR Description: F2K11.15 [Arabidopsis thaliana]
  misc_feature (1)..(264): Homolog of NCBI NO: 22330402 NR Description: DNA-binding protein, putative; protein id: supported by cDNA: gi_17979308, supported by cDNA: gi_20466008
  misc_feature (1)..(233): Homolog of NCBI NO: 6633838 NR Description: F2K11.15 [Arabidopsis thaliana]
  misc_feature (5)..(264): Homolog of NCBI NO: 6633838 NR Description: F2K11.15 [Arabidopsis thaliana]

SEQ ID NO: 85507 - DNA, 866 bp, Arabidopsis thaliana
  misc_feature (1)..(866): Ceres Seq. ID no. 12680773
  misc_feature: MA Experiment ID: 20001905 Result: Down-regulated in Transcription
  misc_feature: MA Experiment 20001905 PARAMETER Experiment Name: At_Drought_Reproduction_P Parameter: Age (day) Value: 40
  misc_feature: MA Experiment 20001905 PARAMETER Experiment Name: At_Drought_Reproduction_P Parameter: Organism Value: A. thaliana
  misc_feature: MA Experiment 20001905 PARAMETER Experiment Name: At_Drought_Reproduction_P Parameter: Plant Line Value: WS
  misc_feature: MA Experiment 20001905 PARAMETER Experiment Name: At_Drought_Reproduction_P Parameter: Timepoint (day) Value: 10
  misc_feature: MA Experiment 20001905 PARAMETER Experiment Name: At_Drought_Reproduction_P Parameter: Tissue Value: Rosettes
  misc_feature: MA Experiment 20001905 PARAMETER Experiment Name: At_Drought_Reproduction_P Parameter: Treatment Value: Drought vs. No Drought
gttttatctattgcagctccaaataaaccaatccattatcttttgcaactctgttaatcgtgttgagctgttggccaagaaaattacagaacttggttactcatgcttctatatccatgcaaagatggttcaagaccatcggaacagggttttccatgatttccgcaatggtgcatgcagaaatcttgtttgcactgatttgtttacacgtgggattgacattcaagctgtgaatgtggtgataaatttcgattttcctaggacttctgagtcgtatctacatagggtaggcagatcaggacgatttggacaccttgggttggctgtgaatttggtaacttatgaggaccgcttcaaaatgtatcagacagagcaagaacttggaactgaaatcaagcccataccttcacttatcgacaaggcaatctactgtcagtaacttctacctggtgtacattctctacccggcaaggcattgatggactaaccggtgtagtgaggaggcaaatcattcagctttggcagccactagctcgttctagagatgaaggcaacacatagagtactgtactgaggcaagaagagacagtataggtggttgatggcgatggaagcggttgattgtgtctaaacctttaaagcagtaccggcttgatttggtttgaattgaagacttcttctgctgcatgatatgaaccttaaagttgtcttctctcatctctaattttcatgttcttagaaaccttttcaccttttcattttgatgttctctcatcttgaagacttgagaggaatttccgagtagtgagatcaaaccgaagaagacattttaacttcattcgcttgtttattgcttttagatctcc

SEQ ID NO: 85508 - protein, 145 aa, Arabidopsis thaliana
  peptide (1)..(145): Ceres Seq. ID no. 12680774
  misc_feature (27)..(103): Pfam Name: Helicase conserved C-terminal domain Pfam Description: Helicase conserved C-terminal domain
  misc_feature (1)..(145): Homolog of NCBI NO: 11358812 NR Description: RNA helicase RH6 [imported] - Arabidopsis (fragment) >gi|3775991|emb|CAA09198.1| RNA helicase [Arabidopsis
  misc_feature (5)..(145): Homolog of NCBI NO: 14532476 NR Description: At2g45810/F4I18.21 [Arabidopsis thaliana]
  misc_feature (5)..(145): Homolog of NCBI NO: 15225898 NR Description: DEAD/DEAH box RNA helicase, putative; protein id:
  misc_feature (5)..(145): Homolog of NCBI NO: 11267538 NR Description: RNA helicase RH12 [imported] - Arabidopsis
  misc_feature (5)..(145): Homolog of NCBI NO: 15233064 NR Description: DEAD/DEAH box RNA helicase, putative; protein id:
  misc_feature (5)..(145): Homolog of NCBI NO: 37535822 NR Description: putative RNA helicase [Oryza sativa (japonica group)] >gi|10140782|gb|AAG13612.1| putative RNA helicase [Oryza
  misc_feature (4)..(145): Homolog of NCBI NO: 22758337 NR Description: putative RNA helicase [Oryza sativa (japonica
  misc_feature (5)..(145): Homolog of NCBI NO: 7436453 NR Description: probable RNA helicase (EC 3.6.1.-) F6N23.6 -
  misc_feature (5)..(145): Homolog of NCBI NO: 22328183 NR Description: DEAD/DEAH box RNA helicase, putative; protein id: supported by cDNA: gi_19423938, supported by cDNA: gi_21280838 thaliana] >gi|19423939|gb|AAL87312.1| putative RNA putative RNA
  misc_feature (5)..(145): Homolog of NCBI NO: 11267537 NR Description: RNA helicase RH8 [imported] - Arabidopsis
FYLLQLQINQSIIFCNSVNRVELLAKKITELGYSCFYIHAKMVQDHRNRVFHDFRNGACRNLVCTDLFTRGIDIQAVNVVINFDFPRTSESYLHRVGRSGRFGHLGLAVNLVTYEDRFKMYQTEQELGTEIKPIPSLIDKAIYCQ

SEQ ID NO: 85509 - protein, 104 aa, Arabidopsis thaliana
  peptide (1)..(104): Ceres Seq. ID no. 12680775
  misc_feature (1)..(62): Pfam Name: Helicase conserved C-terminal domain Pfam Description: Helicase conserved C-terminal domain
  misc_feature (1)..(104): Homolog of NCBI NO: 11358812 NR Description: RNA helicase RH6 [imported] - Arabidopsis (fragment) >gi|3775991|emb|CAA09198.1| RNA helicase [Arabidopsis
  misc_feature (1)..(104): Homolog of NCBI NO: 14532476 NR Description: At2g45810/F4I18.21 [Arabidopsis thaliana]
  misc_feature (1)..(104): Homolog of NCBI NO: 15225898 NR Description: DEAD/DEAH box RNA helicase, putative; protein id:
  misc_feature (1)..(104): Homolog of NCBI NO: 11267538 NR Description: RNA helicase RH12 [imported] - Arabidopsis
  misc_feature (1)..(104): Homolog of NCBI NO: 15233064 NR Description: DEAD/DEAH box RNA helicase, putative; protein id:
  misc_feature (1)..(104): Homolog of NCBI NO: 37535822 NR Description: putative RNA helicase [Oryza sativa (japonica group)] >gi|10140782|gb|AAG13612.1| putative RNA helicase [Oryza
  misc_feature (1)..(104): Homolog of NCBI NO: 22758337 NR Description: putative RNA helicase [Oryza sativa (japonica
  misc_feature (1)..(104): Homolog of NCBI NO: 7436453 NR Description: probable RNA helicase (EC 3.6.1.-) F6N23.6 -
  misc_feature (1)..(104): Homolog of NCBI NO: 22328183 NR Description: DEAD/DEAH box RNA helicase, putative; protein id: supported by cDNA: gi_19423938, supported by cDNA: gi_21280838 thaliana] >gi|19423939|gb|AAL87312.1| putative RNA putative RNA
  misc_feature (1)..(104): Homolog of NCBI NO: 11267537 NR Description: RNA helicase RH8 [imported] - Arabidopsis
MVQDHRNRVFHDFRNGACRNLVCTDLFTRGIDIQAVNVVINFDFPRTSESYLHRVGRSGRFGHLGLAVNLVTYEDRFKMYQTEQELGTEIKPIPSLIDKAIYCQ

SEQ ID NO: 85510 - DNA, 3516 bp, Arabidopsis thaliana
  misc_feature (1)..(3516): Ceres Seq. ID no. 12680789
  misc_feature: MA Experiment ID: 20000179 Result: Up-regulated in Transcription
  misc_feature: MA Experiment 20000179 PARAMETER Experiment Name: At_Germinating_Seeds_P Parameter: Age (hr) Value: 6 vs. 0
  misc_feature: MA Experiment 20000179 PARAMETER Experiment Name: At_Germinating_Seeds_P Parameter: Tissue Value: Germinating Seeds
  misc_feature: MA Experiment ID: 20000180 Result: Up-regulated in Transcription
  misc_feature: MA Experiment 20000180 PARAMETER Experiment Name: At_Germinating_Seeds_P Parameter: Age (hr) Value: 24 vs. 0
  misc_feature: MA Experiment 20000180 PARAMETER Experiment Name: At_Germinating_Seeds_P Parameter: Tissue Value: Germinating Seeds
  misc_feature: MA Experiment ID: 20000185 Result: Up-regulated in Transcription
  misc_feature: MA Experiment 20000185 PARAMETER Experiment Name: At_Roots__P Parameter: Age (day) Value: 7 vs. 21
  misc_feature: MA Experiment 20000185 PARAMETER Experiment Name: At_Roots__P Parameter: Organism Value: A. thaliana
  misc_feature: MA Experiment 20000185 PARAMETER Experiment Name: At_Roots__P Parameter: Tissue Value: Roots vs. Whole Plant
  misc_feature: MA Experiment ID: 20000234 Result: Up-regulated in Transcription
  misc_feature: MA Experiment 20000234 PARAMETER Experiment Name: At_Siliques_P Parameter: Age (day) Value: 21
  misc_feature: MA Experiment 20000234 PARAMETER Experiment Name: At_Siliques_P Parameter: Organism Value: A. thaliana
  misc_feature: MA Experiment 20000234 PARAMETER Experiment Name: At_Siliques_P Parameter: Plant Line Value: WS
  misc_feature: MA Experiment 20000234 PARAMETER Experiment Name: At_Siliques_P Parameter: Tissue Value: Less Than 5mm Siliques vs. Whole Plant
  misc_feature: MA Experiment ID: 20000235 Result: Up-regulated in Transcription
  misc_feature: MA Experiment 20000235 PARAMETER Experiment Name: At_Siliques_P Parameter: Age (day) Value: 21
  misc_feature: MA Experiment 20000235 PARAMETER Experiment Name: At_Siliques_P Parameter: Organism Value: A. thaliana
  misc_feature: MA Experiment 20000235 PARAMETER Experiment Name: At_Siliques_P Parameter: Plant Line Value: WS
  misc_feature: MA Experiment 20000235 PARAMETER Experiment Name: At_Siliques_P Parameter: Tissue Value: 5-10mm Siliques vs. Whole Plant
  misc_feature: MA Experiment ID: 20000264 Result: Up-regulated in Transcription
  misc_feature: MA Experiment 20000264 PARAMETER Experiment Name: At_Open_Flower_P Parameter: Age (day) Value: 21
  misc_feature: MA Experiment 20000264 PARAMETER Experiment Name: At_Open_Flower_P Parameter: Plant Line Value: WS
  misc_feature: MA Experiment 20000264 PARAMETER Experiment Name: At_Open_Flower_P Parameter: Tissue Value: Open Flower vs. Whole Plant
  misc_feature: MA Experiment ID: 20000286 Result: Up-regulated in Transcription
  misc_feature: MA Experiment 20000286 PARAMETER Experiment Name: At_Open_Flower_P Parameter: Age (day) Value: 21
  misc_feature: MA Experiment 20000286 PARAMETER Experiment Name: At_Open_Flower_P Parameter: Plant Line Value: WS
  misc_feature: MA Experiment 20000286 PARAMETER Experiment Name: At_Open_Flower_P Parameter: Tissue Value: Half Open vs. Whole Plant
  misc_feature: MA Experiment ID: 20000438 Result: Up-regulated in Transcription
  misc_feature: MA Experiment 20000438 PARAMETER Experiment Name: At_Shoots__P Parameter: Age (day) Value: 14
  misc_feature: MA Experiment 20000438 PARAMETER Experiment Name: At_Shoots__P Parameter: Tissue Value: Shoots vs. Whole Plant
  misc_feature: MA Experiment ID: 20000439 Result: Up-regulated in Transcription
  misc_feature: MA Experiment 20000439 PARAMETER Experiment Name: At_Roots__P Parameter: Age (day) Value: 14 vs. 21
  misc_feature: MA Experiment 20000439 PARAMETER Experiment Name: At_Roots__P Parameter: Organism Value: A. thaliana
  misc_feature: MA Experiment 20000439 PARAMETER Experiment Name: At_Roots__P Parameter: Tissue Value: Roots vs. Whole Plant
  misc_feature: MA Experiment ID: 20000441 Result: Up-regulated in Transcription
  misc_feature: MA Experiment 20000441 PARAMETER Experiment Name: At_1uM_BR-BRZ__P Parameter: Tissue Value: Shoot Apices
  misc_feature: MA Experiment 20000441 PARAMETER Experiment Name: At_1uM_BR-BRZ__P Parameter: Treatment Value: 1uM BR vs. No Treatment
  misc_feature: MA Experiment ID: 20000443 Result: Up-regulated in Transcription
  misc_feature: MA Experiment 20000443 PARAMETER Experiment Name: At_1uM_BR-BRZ__P Parameter: Tissue Value: Shoot Apices
  misc_feature: MA Experiment 20000443 PARAMETER Experiment Name: At_1uM_BR-BRZ__P Parameter: Treatment Value: 1uM BRZ vs. No Treatment
  misc_feature: MA Experiment ID: 20000495 Result: Down-regulated in Transcription
  misc_feature: MA Experiment 20000495 PARAMETER Experiment Name: At_Guard_Cells_P Parameter: Harvest Date Value: 8/2/2002
  misc_feature: MA Experiment 20000495 PARAMETER Experiment Name: At_Guard_Cells_P Parameter: Organism Value: A. thaliana
  misc_feature: MA Experiment 20000495 PARAMETER Experiment Name: At_Guard_Cells_P Parameter: Tissue Value: Guard Cells vs. Leaves
  misc_feature: MA Experiment ID: 20000573 Result: Down-regulated in Transcription
  misc_feature: MA Experiment 20000573 PARAMETER Experiment Name: At_100uM_ABA_Mutants__P Parameter: Organism Value: A. thaliana
  misc_feature: MA Experiment 20000573 PARAMETER Experiment Name: At_100uM_ABA_Mutants__P Parameter: Plant Line Value: CS22 vs. Ler wt
  misc_feature: MA Experiment 20000573 PARAMETER Experiment Name: At_100uM_ABA_Mutants__P Parameter: Timepoint (hr) Value: N/A
  misc_feature: MA Experiment 20000573 PARAMETER Experiment Name: At_100uM_ABA_Mutants__P Parameter: Tissue Value: Whole Plant
  misc_feature: MA Experiment 20000573 PARAMETER Experiment Name: At_100uM_ABA_Mutants__P Parameter: Treatment Value: None
  misc_feature: MA Experiment ID: 20000794 Result: Up-regulated in Transcription
  misc_feature: MA Experiment 20000794 PARAMETER Experiment Name: At_Petals_P Parameter: Age (day) Value: 23-25 days
  misc_feature: MA Experiment 20000794 PARAMETER Experiment Name: At_Petals_P Parameter: Plant Line Value: WS
  misc_feature: MA Experiment 20000794 PARAMETER Experiment Name: At_Petals_P Parameter: Tissue Value: Petals vs. Whole plant
  misc_feature: MA Experiment ID: 20001248 Result: Down-regulated in Transcription
  misc_feature: MA Experiment 20001248 PARAMETER Experiment Name: At_Far-red-induction_P Parameter: Age (day) Value: 7
  misc_feature: MA Experiment 20001248 PARAMETER Experiment Name: At_Far-red-induction_P Parameter: Light Value: Far-red vs. White
  misc_feature: MA Experiment 20001248 PARAMETER Experiment Name: At_Far-red-induction_P Parameter: Organism Value: A. thaliana
  misc_feature: MA Experiment 20001248 PARAMETER Experiment Name: At_Far-red-induction_P Parameter: Plant Line Value: Columbia
  misc_feature: MA Experiment 20001248 PARAMETER Experiment Name: At_Far-red-induction_P Parameter: Timepoint (hr) Value: 4
  misc_feature: MA Experiment 20001248 PARAMETER Experiment Name: At_Far-red-induction_P Parameter: Tissue Value: Whole Plant
  misc_feature: MA Experiment ID: 20001450 Result: Down-regulated in Transcription
  misc_feature: MA Experiment 20001450 PARAMETER Experiment Name: At_Far-red-induction_P Parameter: Age (day) Value: 7
  misc_feature: MA Experiment 20001450 PARAMETER Experiment Name: At_Far-red-induction_P Parameter: Light Value: Far-red vs. White
  misc_feature: MA Experiment 20001450 PARAMETER Experiment Name: At_Far-red-induction_P Parameter: Organism Value: A. thaliana
  misc_feature: MA Experiment 20001450 PARAMETER Experiment Name: At_Far-red-induction_P Parameter: Plant Line Value: Columbia
  misc_feature: MA Experiment 20001450 PARAMETER Experiment Name: At_Far-red-induction_P Parameter: Timepoint (hr) Value: 8
  misc_feature: MA Experiment 20001450 PARAMETER Experiment Name: At_Far-red-induction_P Parameter: Tissue Value: Whole Plant
aatttatagcctcacctttcttcttcttcttcttcttcttctgtgtgtttttgaatttgctttcttcaagaggtttcttctccacaccgcttcggtgtatgatctgattgtgatctctctcgatatctgggatcttcggggtatggaggctgtagattattattattattacgtgtggtgctgatgcaatgagtgttgatgcctgttatggaaagagtagctgaagaaactgtggcgactaacaacatacaattgaaagcacgagtggatgatgttccttgtaataagcttgatgctcgtcataacgatatggtgattcaatcagaaactgcaaacagtgattgtcctggaagctcagctcacaggaatgttgatttgactaagccgccgcctcctgaggaagccgcaggagctaagctttctgttgaagagttgacattggggaactacaggattgttcaagggagtaataatactaatgtggatagtcctagggctggcaagtttgagcatctttatcgtttggctagagggtctgcttttagggcaggagatggggatcttgattctcaacctcgtgatatggatcaaatgttgtccagaatcagacaacagcttgctggagctccttctgagaggcaaaacttgaaaccttttatgtctaggaggagcgatcagaatcttgaagctttttctgaacgtctaagagcagctggtgagaatagtattatgaatgctcctgcattgatcagtgaaggtgtccaaatgaaaacgccggtgagttcttcgaatttttctcagttgttacttaaaagagctatgaaagggaaaggggtagtaggaaagaaccaggaaactcctcctgaatttgtctctgatcaagatttaggaagcaaggaaaaaaagttggatattagcaagtcgcctactcctcacgatgtgttacctctaaaatcaagtcccaaaggaaatggtatggtatcacatggtgatgggaatcatagtaaatcttctattggaatcagtttgagggagtttcttagatcaagttatgctaaaagagaaaaaagacatggcctttgtctatttaggcagctggtggaactggttgactcagcccattcaaaaagattattcttgctagacttgagaccatcccttttcactttagttccatcaaagaaacttagatatattggtaattttggaaagaacgatctagaatcagatgttgacgaagatttgaataggaggaggcctgttgttgaggaatcatctagtggaggtagggattcgaagaaaagaaaaatggacttgcatttgaattctccagggaatcaacttcaggccacttcaaccgggcgacctttcaaaaggaaaagccctgtgattgatttaaacatggttgatgcacgtaatccagacagttgcgagcttcaacagcaagactacataaaaaatttaagcgtgtcttcagtgtcgagaaaacagtctatgtccacatggctagaagagcaatggtatacttgtccagaggagataaatggagaagatattggagaaaaatcaaatatttatgcccttggtgttcttctgtttgagttgctatgccattgcgagtcaggcgagatgcatgctgcaatgatggcagatttacgccatcggattctcccaccaacatttctctcgaaatacccgaaggaagctggattttgtctttggcttctacatcctgaaccctcctcccgaccatcagctagagatatactaaagtcagagttgatatgcgaggatgattcagttaaatcgactgctgctgctgaggagatatctgagctgttacttcattttttgtcttcattagaagtgcagaagaagaaaaaagcatctaaacttttgcaagatatccagaccttagaggatgatattaaggaggccgagcgaagatattcttcaaatgtatctctggtgagatctcatggagctattgaaaaaagggtgcaatcatctcccctagacgagcactgtacaacttccagtgccttgtttgtaccaactgctaatacagacaggctgatgagtaatatccgtcaacttgaagatgcatattttttcatgcgatcacaaatcaacttatcgagttctgctgctactgcccgttctgacaaaacactaaaggacagggacagatgctctgaaaaccaaaatgaaaatcaggatatgagtaccaaaggaaaatcttcagatcaactcgaagtgtttttcgaggggttgtgcaaatttgctcggtatagcaagttcgaaacctgtgggacaataagaagtggggaccttttaaactctgcaagtgtggtctgctcgttgagttttgaccctgatgaagaacacatagcagcagctgggatatcaaagaagatcaagatttttgacttcaatgcatttatgaatgaatctgtcggtgttcattatccactagtagagatggtcaacaaatctaaattaagctgtgtttgctggaatagctacatcaaaaactacttggcctcgactgactacgatggtgtagttcagatatgggatgccggcactggacaaggattttcgcagtacacagaacaccagaagagagcctggtcagttgatttttctccatctgacccgacaaaatttgttagtggaagtgatgactgctcggtgaagctttggagcatcaatgagaaacgttcattaggcacaatctggagtccagcaaatgtgtgttgcgtgcaattctcttcttattccaatcacttattggcatttgggtcagctgattacaaggtctattgctatgaccttcggtatgtcaaaacaccttggtgcacattggctggtcatgagaaagcggtgagttatgttaaatttatggattcagaaaccattgtttctgcttccactgataactctctcaagctttggaatcttaacaagacaaattcctctggtttatctcctggtgcttgttcattgacatataaaggacatacaaatcagaagaatttcgttggattgtcggttttggacggatacatagcttgtggttcagagaccaatgaggtatatagttactataaatctttaccgatgccaatgacttcatacaagtttggatccgtcgatcccatttctggaaacgaatactttgatgacaatggacagtttgtgtcgagcgtctgttggaggaaaaaatcgaatatgcttgtagctgcaaactctactggaaacatgaagctactaaaacttgtttgacaacttggccttttcgctactactgcgggcattggactttttgagtctgaaactaggacaaagcaggtctgactttgaagcaaacgtttttgtcctggaaactatgatcccatatgaccagaagagaaaaaaagttcgaaatcttggagaagttgaagaagcaaaactgtctgtgataatatattatttgattcttcttcctgtaattctatatatatgagatataat

SEQ ID NO: 85511 - protein, 1029 aa, Arabidopsis thaliana
  peptide (1)..(1029): Ceres Seq. ID no. 12680790
  misc_feature (441)..(529): Pfam Name: Protein kinase domain Pfam Description: Protein kinase domain
  misc_feature (521)..(1029): Homolog of NCBI NO: 25408984 NR Description: probable photomorphogenesis repressor protein - Arabidopsis thaliana >gi|4559377|gb|AAD23037.1| putative
  misc_feature (1)..(469): Homolog of NCBI NO: 25408985 NR Description: hypothetical protein At2g46350 [imported] - thaliana >gi|4559378|gb|AAD23038.1| hypothetical protein
  misc_feature (596)..(1029): Homolog of NCBI NO: 15219179 NR Description: phytochrome A supressor spa1, putative; protein At1g53090.1 [Arabidopsis thaliana] >gi|14532798|gb|AAK64180.1| phytochrome A supressor spa1 protein [Arabidopsis thaliana]
  misc_feature (414)..(602): Homolog of NCBI NO: 15219179 NR Description: phytochrome A supressor spa1, putative; protein At1g53090.1 [Arabidopsis thaliana] >gi|14532798|gb|AAK64180.1| phytochrome A supressor spa1 protein [Arabidopsis thaliana]
  misc_feature (275)..(352): Homolog of NCBI NO: 15219179 NR Description: phytochrome A supressor spa1, putative; protein At1g53090.1 [Arabidopsis thaliana] >gi|14532798|gb|AAK64180.1| phytochrome A supressor spa1 protein [Arabidopsis thaliana]
  misc_feature (596)..(1029): Homolog of NCBI NO: 9294263 NR Description: photomorphogenesis repressor protein-like
  misc_feature (437)..(583): Homolog of NCBI NO: 9294263 NR Description: photomorphogenesis repressor protein-like
  misc_feature (275)..(348): Homolog of NCBI NO: 9294263 NR Description: photomorphogenesis repressor protein-like
  misc_feature (596)..(1029): Homolog of NCBI NO: 22331100 NR Description: similar to phytochrome A supressor spa1,
  misc_feature (437)..(583): Homolog of NCBI NO: 22331100 NR Description: similar to phytochrome A supressor spa1,
MPVMERVAEETVATNNIQLKARVDDVPCNKLDARHNDMVIQSETANSDCPGSSAHRNVDLTKPPPPEEAAGAKLSVEELTLGNYRIVQGSNNTNVDSPRAGKFEHLYRLARGSAFRAGDGDLDSQPRDMDQMLSRIRQQLAGAPSERQNLKPFMSRRSDQNLEAFSERLRAAGENSIMNAPALISEGVQMKTPVSSSNFSQLLLKRAMKGKGVVGKNQETPPEFVSDQDLGSKEKKLDISKSPTPHDVLPLKSSPKGNGMVSHGDGNHSKSSIGISLREFLRSSYAKREKRHGLCLFRQLVELVDSAHSKRLFLLDLRPSLFTLVPSKKLRYIGNFGKNDLESDVDEDLNRRRPVVEESSSGGRDSKKRKMDLHLNSPGNQLQATSTGRPFKRKSPVIDLNMVDARNPDSCELQQQDYIKNLSVSSVSRKQSMSTWLEEQWYTCPEEINGEDIGEKSNIYALGVLLFELLCHCESGEMHAAMMADLRHRILPPTFLSKYPKEAGFCLWLLHPEPSSRPSARDILKSELICEDDSVKSTAAAEEISELLLHFLSSLEVQKKKKASKLLQDIQTLEDDIKEAERRYSSNVSLVRSHGAIEKRVQSSPLDEHCTTSSALFVPTANTDRLMSNIRQLEDAYFFMRSQINLSSSAATARSDKTLKDRDRCSENQNENQDMSTKGKSSDQLEVFFEGLCKFARYSKFETCGTIRSGDLLNSASVVCSLSFDPDEEHIAAAGISKKIKIFDFNAFMNESVGVHYPLVEMVNKSKLSCVCWNSYIKNYLASTDYDGVVQIWDAGTGQGFSQYTEHQKRAWSVDFSPSDPTKFVSGSDDCSVKLWSINEKRSLGTIWSPANVCCVQFSSYSNHLLAFGSADYKVYCYDLRYVKTPWCTLAGHEKAVSYVKFMDSETIVSASTDNSLKLWNLNKTNSSGLSPGACSLTYKGHTNQKNFVGLSVLDGYIACGSETNEVYSYYKSLPMPMTSYKFGSVDPISGNEYFDDNGQFVSSVCWRKKSNMLVAANSTGNMKLLKLV

SEQ ID NO: 85512 - protein, 1026 aa, Arabidopsis thaliana
  peptide (1)..(1026): Ceres Seq. ID no. 12680791
  misc_feature (438)..(526): Pfam Name: Protein kinase domain Pfam Description: Protein kinase domain
  misc_feature (518)..(1026): Homolog of NCBI NO: 25408984 NR Description: probable photomorphogenesis repressor protein - Arabidopsis thaliana >gi|4559377|gb|AAD23037.1| putative
  misc_feature (1)..(466): Homolog of NCBI NO: 25408985 NR Description: hypothetical protein At2g46350 [imported] - thaliana >gi|4559378|gb|AAD23038.1| hypothetical protein
  misc_feature (593)..(1026): Homolog of NCBI NO: 15219179 NR Description: phytochrome A supressor spa1, putative; protein At1g53090.1 [Arabidopsis thaliana] >gi|14532798|gb|AAK64180.1| phytochrome A supressor spa1 protein [Arabidopsis thaliana]
  misc_feature (411)..(599): Homolog of NCBI NO: 15219179 NR Description: phytochrome A supressor spa1, putative; protein At1g53090.1 [Arabidopsis thaliana] >gi|14532798|gb|AAK64180.1| phytochrome A supressor spa1 protein [Arabidopsis thaliana]
  misc_feature (272)..(349): Homolog of NCBI NO: 15219179 NR Description: phytochrome A supressor spa1, putative; protein At1g53090.1 [Arabidopsis thaliana] >gi|14532798|gb|AAK64180.1| phytochrome A supressor spa1 protein [Arabidopsis thaliana]
  misc_feature (593)..(1026): Homolog of NCBI NO: 9294263 NR Description: photomorphogenesis repressor protein-like
  misc_feature (434)..(580): Homolog of NCBI NO: 9294263 NR Description: photomorphogenesis repressor protein-like
  misc_feature (272)..(345): Homolog of NCBI NO: 9294263 NR Description: photomorphogenesis repressor protein-like
  misc_feature (593)..(1026): Homolog of NCBI NO: 22331100 NR Description: similar to phytochrome A supressor spa1,
  misc_feature (434)..(580): Homolog of NCBI NO: 22331100 NR Description: similar to phytochrome A supressor spa1,
MERVAEETVATNNIQLKARVDDVPCNKLDARHNDMVIQSETANSDCPGSSAHRNVDLTKPPPPEEAAGAKLSVEELTLGNYRIVQGSNNTNVDSPRAGKFEHLYRLARGSAFRAGDGDLDSQPRDMDQMLSRIRQQLAGAPSERQNLKPFMSRRSDQNLEAFSERLRAAGENSIMNAPALISEGVQMKTPVSSSNFSQLLLKRAMKGKGVVGKNQETPPEFVSDQDLGSKEKKLDISKSPTPHDVLPLKSSPKGNGMVSHGDGNHSKSSIGISLREFLRSSYAKREKRHGLCLFRQLVELVDSAHSKRLFLLDLRPSLFTLVPSKKLRYIGNFGKNDLESDVDEDLNRRRPVVEESSSGGRDSKKRKMDLHLNSPGNQLQATSTGRPFKRKSPVIDLNMVDARNPDSCELQQQDYIKNLSVSSVSRKQSMSTWLEEQWYTCPEEINGEDIGEKSNIYALGVLLFELLCHCESGEMHAAMMADLRHRILPPTFLSKYPKEAGFCLWLLHPEPSSRPSARDILKSELICEDDSVKSTAAAEEISELLLHFLSSLEVQKKKKASKLLQDIQTLEDDIKEAERRYSSNVSLVRSHGAIEKRVQSSPLDEHCTTSSALFVPTANTDRLMSNIRQLEDAYFFMRSQINLSSSAATARSDKTLKDRDRCSENQNENQDMSTKGKSSDQLEVFFEGLCKFARYSKFETCGTIRSGDLLNSASVVCSLSFDPDEEHIAAAGISKKIKIFDFNAFMNESVGVHYPLVEMVNKSKLSCVCWNSYIKNYLASTDYDGVVQIWDAGTGQGFSQYTEHQKRAWSVDFSPSDPTKFVSGSDDCSVKLWSINEKRSLGTIWSPANVCCVQFSSYSNHLLAFGSADYKVYCYDLRYVKTPWCTLAGHEKAVSYVKFMDSETIVSASTDNSLKLWNLNKTNSSGLSPGACSLTYKGHTNQKNFVGLSVLDGYIACGSETNEVYSYYKSLPMPMTSYKFGSVDPISGNEYFDDNGQFVSSVCWRKKSNMLVAANSTGNMKLLKLV

SEQ ID NO: 85513 - protein, 992 aa, Arabidopsis thaliana
  peptide (1)..(992): Ceres Seq. ID no. 12680792
  misc_feature (404)..(492): Pfam Name: Protein kinase domain Pfam Description: Protein kinase domain
  misc_feature (484)..(992): Homolog of NCBI NO: 25408984 NR Description: probable photomorphogenesis repressor protein - Arabidopsis thaliana >gi|4559377|gb|AAD23037.1| putative
  misc_feature (1)..(432): Homolog of NCBI NO: 25408985 NR Description: hypothetical protein At2g46350 [imported] - thaliana >gi|4559378|gb|AAD23038.1| hypothetical protein
  misc_feature (559)..(992): Homolog of NCBI NO: 15219179 NR Description: phytochrome A supressor spa1, putative; protein At1g53090.1 [Arabidopsis thaliana] >gi|14532798|gb|AAK64180.1| phytochrome A supressor spa1 protein [Arabidopsis thaliana]
  misc_feature (377)..(565): Homolog of NCBI NO: 15219179 NR Description: phytochrome A supressor spa1, putative; protein At1g53090.1 [Arabidopsis thaliana] >gi|14532798|gb|AAK64180.1| phytochrome A supressor spa1 protein [Arabidopsis thaliana]
  misc_feature (238)..(315): Homolog of NCBI NO: 15219179 NR Description: phytochrome A supressor spa1, putative; protein At1g53090.1 [Arabidopsis thaliana] >gi|14532798|gb|AAK64180.1| phytochrome A supressor spa1 protein [Arabidopsis thaliana]
  misc_feature (559)..(992): Homolog of NCBI NO: 9294263 NR Description: photomorphogenesis repressor protein-like
  misc_feature (400)..(546): Homolog of NCBI NO: 9294263 NR Description: photomorphogenesis repressor protein-like
  misc_feature (238)..(311): Homolog of NCBI NO: 9294263 NR Description: photomorphogenesis repressor protein-like
  misc_feature (559)..(992): Homolog of NCBI NO: 22331100 NR Description: similar to phytochrome A supressor spa1,
  misc_feature (400)..(546): Homolog of NCBI NO: 22331100 NR Description: similar to phytochrome A supressor spa1,
MVIQSETANSDCPGSSAHRNVDLTKPPPPEEAAGAKLSVEELTLGNYRIVQGSNNTNVDSPRAGKFEHLYRLARGSAFRAGDGDLDSQPRDMDQMLSRIRQQLAGAPSERQNLKPFMSRRSDQNLEAFSERLRAAGENSIMNAPALISEGVQMKTPVSSSNFSQLLLKRAMKGKGVVGKNQETPPEFVSDQDLGSKEKKLDISKSPTPHDVLPLKSSPKGNGMVSHGDGNHSKSSIGISLREFLRSSYAKREKRHGLCLFRQLVELVDSAHSKRLFLLDLRPSLFTLVPSKKLRYIGNFGKNDLESDVDEDLNRRRPVVEESSSGGRDSKKRKMDLHLNSPGNQLQATSTGRPFKRKSPVIDLNMVDARNPDSCELQQQDYIKNLSVSSVSRKQSMSTWLEEQWYTCPEEINGEDIGEKSNIYALGVLLFELLCHCESGEMHAAMMADLRHRILPPTFLSKYPKEAGFCLWLLHPEPSSRPSARDILKSELICEDDSVKSTAAAEEISELLLHFLSSLEVQKKKKASKLLQDIQTLEDDIKEAERRYSSNVSLVRSHGAIEKRVQSSPLDEHCTTSSALFVPTANTDRLMSNIRQLEDAYFFMRSQINLSSSAATARSDKTLKDRDRCSENQNENQDMSTKGKSSDQLEVFFEGLCKFARYSKFETCGTIRSGDLLNSASVVCSLSFDPDEEHIAAAGISKKIKIFDFNAFMNESVGVHYPLVEMVNKSKLSCVCWNSYIKNYLASTDYDGVVQIWDAGTGQGFSQYTEHQKRAWSVDFSPSDPTKFVSGSDDCSVKLWSINEKRSLGTIWSPANVCCVQFSSYSNHLLAFGSADYKVYCYDLRYVKTPWCTLAGHEKAVSYVKFMDSETIVSASTDNSLKLWNLNKTNSSGLSPGACSLTYKGHTNQKNFVGLSVLDGYIACGSETNEVYSYYKSLPMPMTSYKFGSVDPISGNEYFDDNGQFVSSVCWRKKSNMLVAANSTGNMKLLKLV

SEQ ID NO: 85514 - DNA, 1554 bp, Arabidopsis thaliana
  misc_feature (1)..(1554): Ceres Seq. ID no. 12680828
  misc_feature: MA Experiment ID: 20000451 Result: Up-regulated in Transcription
  misc_feature: MA Experiment 20000451 PARAMETER Experiment Name: At_CS6879_Shoots-Roots_P Parameter: Age (day) Value: 14
  misc_feature: MA Experiment 20000451 PARAMETER Experiment Name: At_CS6879_Shoots-Roots_P Parameter: Organism Value: A. thaliana
  misc_feature: MA Experiment 20000451 PARAMETER Experiment Name: At_CS6879_Shoots-Roots_P Parameter: Plant Line Value: CS6879 vs. WS
  misc_feature: MA Experiment 20000451 PARAMETER Experiment Name: At_CS6879_Shoots-Roots_P Parameter: Tissue Value: Roots
aatcaatatctccaaaaagagttagaaagaaaaaaaataacttaagatggtagatctttatgagttctgggctgtgatagtttcactcatagtggtgaagctgtgtcactcgatctatcagtggaggaatccaaaaagtaatggagaacttcctccaggatctatgggttatccaatcattggagagactttcgagttcatgaagcctcatgacgctattcagttaccaacattcgtgaaggagaaagtactcagacatggaccagtttttaggacaagcttatttggaggaaaagttataatttcgactgatattgggttgaacatggagatagcaaagacaaatcatattcctggtatgccgaagagcttagcgcggctatttggggcaaacaacttgttcgtgaataaggatactcataaacatgcccgcagcttgacaaaccagtttttaggttcgcaagctttgaaattaagaatgcttcaagacatcgatttcttggttcgcacacacctgaaggaaggagctaggaaaggcagccttgacatcaaggaaacgacaagcaagatcattattgaatgtcttgcgaagaaagtaatgggggagatggaaccagatgcagcaaaagaactcacactctgttggacatttttcccaagggaatggtttggattcgcttggaatatcccggggactggtgtctatcgaatggtgaaggcaagaaatcggatgatgaaggtactaaaggagacggtacttaagaaaagagcatcaggagaggaattgggggactttttcaagactatctttggagatactgaaagaggcgtgaaaactataagtttagagagtgccaccgagtacatatttactctgtttttgcttgctaacgaaacaacaccagcggtccttgcggctacaataaagctcataagtgaccatcctaaagtgatgcaagagttacagagagagcatgaaggaattgtccgagataagattgagaaaaatgagaaagctgacctaacatgggaagactacaaatcaatgacttttacccagatggtgataaatgagtcgcttaggatcacaagcacggtaccgacggtgcttagaataattgatcatgagtttcaatttggtgagtatacaattccagcaggttggatctttatgggttatccttatgtgcatttcaatgcagaaaagtatgatgaccctttagcatttaatccatggcgctggaagggaaaagacttgagcgcgattgtctccaggacttacattccctttggctcgggttctagactatgtgtaggagctgaatttgttaagttgaagatggccatttttatccatcatttgtctagatacaggtggtcaatgaagacagagactactttacttcgaagatttgtacttatacttccacgtggatcagatgttcaaatcttagaagacaccaaagctaaataactttgttggttacttggttattagaatgattgtattacattgtactatgttatgcgataataataaaattcagtttaaaa

SEQ ID NO: 85515 - protein, 475 aa, Arabidopsis thaliana
  peptide (1)..(475): Ceres Seq. ID no. 12680829
  misc_feature (1)..(475): Homolog of NCBI NO: 30683237 NR Description: cytochrome P450 -related [Arabidopsis thaliana]
  misc_feature (38)..(475): Homolog of NCBI NO: 18700149 NR Description: At4g15396 [Arabidopsis thaliana]
  misc_feature (1)..(400): Homolog of NCBI NO: 30683232 NR Description: cytochrome P450 -related [Arabidopsis thaliana] unknown protein [Arabidopsis thaliana]
  misc_feature (1)..(473): Homolog of NCBI NO: 15218776 NR Description: cytochrome P450, putative; protein id:
  misc_feature (1)..(441): Homolog of NCBI NO: 6686409 NR Description: F1E22.5 [Arabidopsis thaliana]
  misc_feature (11)..(441): Homolog of NCBI NO: 2190554 NR Description: Similar to Arabidopsis cytochrome P450 CYP90
  misc_feature (1)..(473): Homolog of NCBI NO: 9294334 NR Description: cytochrome P450-like protein [Arabidopsis
  misc_feature (71)..(473): Homolog of NCBI NO: 15233767 NR Description: steroid 22-alpha-hydroxylase(cytochrome p450), protein id: At4g15300.1 [Arabidopsis thaliana]
  misc_feature (75)..(473): Homolog of NCBI NO: 15230741 NR Description: cytochrome P450, putative; protein id:
  misc_feature (6)..(471): Homolog of NCBI NO: 15222806 NR Description: cytochrome P450, putative; protein id:
MVDLYEFWAVIVSLIVVKLCHSIYQWRNPKSNGELPPGSMGYPIIGETFEFMKPHDAIQLPTFVKEKVLRHGPVFRTSLFGGKVIISTDIGLNMEIAKTNHIPGMPKSLARLFGANNLFVNKDTHKHARSLTNQFLGSQALKLRMLQDIDFLVRTHLKEGARKGSLDIKETTSKIIIECLAKKVMGEMEPDAAKELTLCWTFFPREWFGFAWNIPGTGVYRMVKARNRMMKVLKETVLKKRASGEELGDFFKTIFGDTERGVKTISLESATEYIFTLFLLANETTPAVLAATIKLISDHPKVMQELQREHEGIVRDKIEKNEKADLTWEDYKSMTFTQMVINESLRITSTVPTVLRIIDHEFQFGEYTIPAGWIFMGYPYVHFNAEKYDDPLAFNPWRWKGKDLSAIVSRTYIPFGSGSRLCVGAEFVKLKMAIFIHHLSRYRWSMKTETTLLRRFVLILPRGSDVQILEDTKAK

SEQ ID NO: 85516 - protein, 436 aa, Arabidopsis thaliana
  peptide (1)..(436): Ceres Seq. ID no. 12680830
  misc_feature (1)..(436): Homolog of NCBI NO: 30683237 NR Description: cytochrome P450 -related [Arabidopsis thaliana]
  misc_feature (1)..(436): Homolog of NCBI NO: 18700149 NR Description: At4g15396 [Arabidopsis thaliana]
  misc_feature (1)..(361): Homolog of NCBI NO: 30683232 NR Description: cytochrome P450 -related [Arabidopsis thaliana] unknown protein [Arabidopsis thaliana]
  misc_feature (1)..(434): Homolog of NCBI NO: 15218776 NR Description: cytochrome P450, putative; protein id:
  misc_feature (1)..(402): Homolog of NCBI NO: 6686409 NR Description: F1E22.5 [Arabidopsis thaliana]
  misc_feature (1)..(402): Homolog of NCBI NO: 2190554 NR Description: Similar to Arabidopsis cytochrome P450 CYP90
  misc_feature (1)..(434): Homolog of NCBI NO: 9294334 NR Description: cytochrome P450-like protein [Arabidopsis
  misc_feature (32)..(434): Homolog of NCBI NO: 15233767 NR Description: steroid 22-alpha-hydroxylase(cytochrome p450), protein id: At4g15300.1 [Arabidopsis thaliana]
  misc_feature (36)..(434): Homolog of NCBI NO: 15230741 NR Description: cytochrome P450, putative; protein id:
  misc_feature (1)..(432): Homolog of NCBI NO: 15222806 NR Description: cytochrome P450, putative; protein id:
MGYPIIGETFEFMKPHDAIQLPTFVKEKVLRHGPVFRTSLFGGKVIISTDIGLNMEIAKTNHIPGMPKSLARLFGANNLFVNKDTHKHARSLTNQFLGSQALKLRMLQDIDFLVRTHLKEGARKGSLDIKETTSKIIIECLAKKVMGEMEPDAAKELTLCWTFFPREWFGFAWNIPGTGVYRMVKARNRMMKVLKETVLKKRASGEELGDFFKTIFGDTERGVKTISLESATEYIFTLFLLANETTPAVLAATIKLISDHPKVMQELQREHEGIVRDKIEKNEKADLTWEDYKSMTFTQMVINESLRITSTVPTVLRIIDHEFQFGEYTIPAGWIFMGYPYVHFNAEKYDDPLAFNPWRWKGKDLSAIVSRTYIPFGSGSRLCVGAEFVKLKMAIFIHHLSRYRWSMKTETTLLRRFVLILPRGSDVQILEDTKAK

SEQ ID NO: 85517 - protein, 424 aa, Arabidopsis thaliana
  peptide (1)..(424): Ceres Seq. ID no. 12680831
  misc_feature (1)..(424): Homolog of NCBI NO: 30683237 NR Description: cytochrome P450 -related [Arabidopsis thaliana]
  misc_feature (1)..(424): Homolog of NCBI NO: 18700149 NR Description: At4g15396 [Arabidopsis thaliana]
  misc_feature (1)..(349): Homolog of NCBI NO: 30683232 NR Description: cytochrome P450 -related [Arabidopsis thaliana] unknown protein [Arabidopsis thaliana]
  misc_feature (1)..(422): Homolog of NCBI NO: 15218776 NR Description: cytochrome P450, putative; protein id:
  misc_feature (1)..(390): Homolog of NCBI NO: 6686409 NR Description: F1E22.5 [Arabidopsis thaliana]
  misc_feature (1)..(390): Homolog of NCBI NO: 2190554 NR Description: Similar to Arabidopsis cytochrome P450 CYP90
  misc_feature (1)..(422): Homolog of NCBI NO: 9294334 NR Description: cytochrome P450-like protein [Arabidopsis
  misc_feature (20)..(422): Homolog of NCBI NO: 15233767 NR Description: steroid 22-alpha-hydroxylase(cytochrome p450), protein id: At4g15300.1 [Arabidopsis thaliana]
  misc_feature (24)..(422): Homolog of NCBI NO: 15230741 NR Description: cytochrome P450, putative; protein id:
  misc_feature (1)..(420): Homolog of NCBI NO: 15222806 NR Description: cytochrome P450, putative; protein id:
MKPHDAIQLPTFVKEKVLRHGPVFRTSLFGGKVIISTDIGLNMEIAKTNHIPGMPKSLARLFGANNLFVNKDTHKHARSLTNQFLGSQALKLRMLQDIDFLVRTHLKEGARKGSLDIKETTSKIIIECLAKKVMGEMEPDAAKELTLCWTFFPREWFGFAWNIPGTGVYRMVKARNRMMKVLKETVLKKRASGEELGDFFKTIFGDTERGVKTISLESATEYIFTLFLLANETTPAVLAATIKLISDHPKVMQELQREHEGIVRDKIEKNEKADLTWEDYKSMTFTQMVINESLRITSTVPTVLRIIDHEFQFGEYTIPAGWIFMGYPYVHFNAEKYDDPLAFNPWRWKGKDLSAIVSRTYIPFGSGSRLCVGAEFVKLKMAIFIHHLSRYRWSMKTETTLLRRFVLILPRGSDVQILEDTKAK

SEQ ID NO: 85518 - DNA, 1357 bp, Arabidopsis thaliana
  misc_feature (1)..(1357): Ceres Seq. ID no. 12680840
  misc_feature: MA Experiment ID: 20000179 Result: Down-regulated in Transcription
  misc_feature: MA Experiment 20000179 PARAMETER Experiment Name: At_Germinating_Seeds_P Parameter: Age (hr) Value: 6 vs. 0
  misc_feature: MA Experiment 20000179 PARAMETER Experiment Name: At_Germinating_Seeds_P Parameter: Tissue Value: Germinating Seeds
  misc_feature: MA Experiment ID: 20000182 Result: Up-regulated in Transcription
  misc_feature: MA Experiment 20000182 PARAMETER Experiment Name: At_2mM_SA_P Parameter: Age (day) Value: 14
  misc_feature: MA Experiment 20000182 PARAMETER Experiment Name: At_2mM_SA_P Parameter: Organism Value: A. thaliana
  misc_feature: MA Experiment 20000182 PARAMETER Experiment Name: At_2mM_SA_P Parameter: Plant Line Value: WS
  misc_feature: MA Experiment 20000182 PARAMETER Experiment Name: At_2mM_SA_P Parameter: Timepoint (hr) Value: 6
  misc_feature: MA Experiment 20000182 PARAMETER Experiment Name: At_2mM_SA_P Parameter: Tissue Value: Aerial
  misc_feature: MA Experiment 20000182 PARAMETER Experiment Name: At_2mM_SA_P Parameter: Treatment Value: 2mM SA vs. No Treatment
  misc_feature: MA Experiment ID: 20000185 Result: Down-regulated in Transcription
  misc_feature: MA Experiment 20000185 PARAMETER Experiment Name: At_Roots__P Parameter: Age (day) Value: 7 vs. 21
  misc_feature: MA Experiment 20000185 PARAMETER Experiment Name: At_Roots__P Parameter: Organism Value: A. thaliana
  misc_feature: MA Experiment 20000185 PARAMETER Experiment Name: At_Roots__P Parameter: Tissue Value: Roots vs. Whole Plant
  misc_feature: MA Experiment ID: 20000234 Result: Down-regulated in Transcription
  misc_feature: MA Experiment 20000234 PARAMETER Experiment Name: At_Siliques_P Parameter: Age (day) Value: 21
  misc_feature: MA Experiment 20000234 PARAMETER Experiment Name: At_Siliques_P Parameter: Organism Value: A. thaliana
  misc_feature: MA Experiment 20000234 PARAMETER Experiment Name: At_Siliques_P Parameter: Plant Line Value: WS
  misc_feature: MA Experiment 20000234 PARAMETER Experiment Name: At_Siliques_P Parameter: Tissue Value: Less Than 5mm Siliques vs. Whole Plant
  misc_feature: MA Experiment ID: 20000235 Result: Down-regulated in Transcription
  misc_feature: MA Experiment 20000235 PARAMETER Experiment Name: At_Siliques_P Parameter: Age (day) Value: 21
  misc_feature: MA Experiment 20000235 PARAMETER Experiment Name: At_Siliques_P Parameter: Organism Value: A. thaliana
  misc_feature: MA Experiment 20000235 PARAMETER Experiment Name: At_Siliques_P Parameter: Plant Line Value: WS
  misc_feature: MA Experiment 20000235 PARAMETER Experiment Name: At_Siliques_P Parameter: Tissue Value: 5-10mm Siliques vs. Whole Plant
  misc_feature: MA Experiment ID: 20000264 Result: Down-regulated in Transcription
  misc_feature: MA Experiment 20000264 PARAMETER Experiment Name: At_Open_Flower_P Parameter: Age (day) Value: 21
  misc_feature: MA Experiment 20000264 PARAMETER Experiment Name: At_Open_Flower_P Parameter: Plant Line Value: WS
  misc_feature: MA Experiment 20000264 PARAMETER Experiment Name: At_Open_Flower_P Parameter: Tissue Value: Open Flower vs. Whole Plant
  misc_feature: MA Experiment ID: 20000265 Result: Down-regulated in Transcription
  misc_feature: MA Experiment 20000265 PARAMETER Experiment Name: At_Open_Flower_P Parameter: Age (day) Value: 21
  misc_feature: MA Experiment 20000265 PARAMETER Experiment Name: At_Open_Flower_P Parameter: Plant Line Value: WS
  misc_feature: MA Experiment 20000265 PARAMETER Experiment Name: At_Open_Flower_P Parameter: Tissue Value: Closed Flower vs. Whole Plant
  misc_feature: MA Experiment ID: 20000268 Result: Down-regulated in Transcription
  misc_feature: MA Experiment 20000268 PARAMETER Experiment Name: At_100mM_NaCl__P Parameter: Age (day) Value: 14
  misc_feature: MA Experiment 20000268 PARAMETER Experiment Name: At_100mM_NaCl__P Parameter: Organism Value: A. thaliana
  misc_feature: MA Experiment 20000268 PARAMETER Experiment Name: At_100mM_NaCl__P Parameter: Plant Line Value: WS
  misc_feature: MA Experiment 20000268 PARAMETER Experiment Name: At_100mM_NaCl__P Parameter: Timepoint (hr) Value: 6
  misc_feature: MA Experiment 20000268 PARAMETER Experiment Name: At_100mM_NaCl__P Parameter: Tissue Value: Whole Plant
  misc_feature: MA Experiment 20000268 PARAMETER Experiment Name: At_100mM_NaCl__P Parameter: Treatment Value: 100mM NaCl vs. No Treatment
  misc_feature: MA Experiment ID: 20000286 Result: Down-regulated in Transcription
  misc_feature: MA Experiment 20000286 PARAMETER Experiment Name: At_Open_Flower_P Parameter: Age (day) Value: 21
  misc_feature: MA Experiment 20000286 PARAMETER Experiment Name: At_Open_Flower_P Parameter: Plant Line Value: WS
  misc_feature: MA Experiment 20000286 PARAMETER Experiment Name: At_Open_Flower_P Parameter: Tissue Value: Half Open vs. Whole Plant
  misc_feature: MA Experiment ID: 20000308 Result: Down-regulated in Transcription
  misc_feature: MA Experiment 20000308 PARAMETER Experiment Name: At_100mM_NaCl__P Parameter: Age (day) Value: 17
  misc_feature: MA Experiment 20000308 PARAMETER Experiment Name: At_100mM_NaCl__P Parameter: Organism Value: A. thaliana
  misc_feature: MA Experiment 20000308 PARAMETER Experiment Name: At_100mM_NaCl__P Parameter: Plant Line Value: WS
  misc_feature: MA Experiment 20000308 PARAMETER Experiment Name: At_100mM_NaCl__P Parameter: Timepoint (hr) Value: 72
  misc_feature: MA Experiment 20000308 PARAMETER Experiment Name: At_100mM_NaCl__P Parameter: Tissue Value: Whole Plant
  misc_feature: MA Experiment 20000308 PARAMETER Experiment Name: At_100mM_NaCl__P Parameter: Treatment Value: 100mM NaCl vs. No Treatment
  misc_feature: MA Experiment ID: 20000436 Result: Down-regulated in Transcription
  misc_feature: MA Experiment 20000436 PARAMETER Experiment Name: At_Drought_P Parameter: Age (day) Value: 7
  misc_feature: MA Experiment 20000436 PARAMETER Experiment Name: At_Drought_P Parameter: Organism Value: A. thaliana
  misc_feature: MA Experiment 20000436 PARAMETER Experiment Name: At_Drought_P Parameter: Plant Line Value: WS
  misc_feature: MA Experiment 20000436 PARAMETER Experiment Name: At_Drought_P Parameter: Timepoint (hr) Value: 12
  misc_feature: MA Experiment 20000436 PARAMETER Experiment Name: At_Drought_P Parameter: Tissue Value: Whole Plant
  misc_feature: MA Experiment 20000436 PARAMETER Experiment Name: At_Drought_P Parameter: Treatment Value: Drought vs. No Drought
  misc_feature: MA Experiment ID: 20000437 Result: Down-regulated in Transcription
  misc_feature: MA Experiment 20000437 PARAMETER Experiment Name: At_Drought_P Parameter: Age (day) Value: 8
  misc_feature: MA Experiment 20000437 PARAMETER Experiment Name: At_Drought_P Parameter: Organism Value: A. thaliana
  misc_feature: MA Experiment 20000437 PARAMETER Experiment Name: At_Drought_P Parameter: Plant Line Value: WS
  misc_feature: MA Experiment 20000437 PARAMETER Experiment Name: At_Drought_P Parameter: Timepoint (hr) Value: 24
  misc_feature: MA Experiment 20000437 PARAMETER Experiment Name: At_Drought_P Parameter: Tissue Value: Whole Plant
  misc_feature: MA Experiment 20000437 PARAMETER Experiment Name: At_Drought_P Parameter: Treatment Value: Drought vs. No Drought
  misc_feature: MA Experiment ID: 20000456 Result: Up-regulated in Transcription
  misc_feature: MA Experiment 20000456 PARAMETER Experiment Name: At_100uM_BA_P Parameter: Age (day) Value: 14
  misc_feature: MA Experiment 20000456 PARAMETER Experiment Name: At_100uM_BA_P Parameter: Organism Value: A. thaliana
  misc_feature: MA Experiment 20000456 PARAMETER Experiment Name: At_100uM_BA_P Parameter: Plant Line Value: WS
  misc_feature: MA Experiment 20000456 PARAMETER Experiment Name: At_100uM_BA_P Parameter: Timepoint (hr) Value: 6
  misc_feature: MA Experiment 20000456 PARAMETER Experiment Name: At_100uM_BA_P Parameter: Tissue Value: Aerial
  misc_feature: MA Experiment 20000456 PARAMETER Experiment Name: At_100uM_BA_P Parameter: Treatment Value: 100uM BA vs. No Treatment
  misc_feature: MA Experiment ID: 20000495 Result: Down-regulated in Transcription
  misc_feature: MA Experiment 20000495 PARAMETER Experiment Name: At_Guard_Cells_P Parameter: Harvest Date Value: 8/2/2002
  misc_feature: MA Experiment 20000495 PARAMETER Experiment Name: At_Guard_Cells_P Parameter: Organism Value: A. thaliana
  misc_feature: MA Experiment 20000495 PARAMETER Experiment Name: At_Guard_Cells_P Parameter: Tissue Value: Guard Cells vs. Leaves
  misc_feature: MA Experiment ID: 20000709 Result: Up-regulated in Transcription
  misc_feature: MA Experiment 20000709 PARAMETER Experiment Name: At_15mM_NH4NO3_L-to-H_P Parameter: Age (hr) Value: 14
  misc_feature: MA Experiment 20000709 PARAMETER Experiment Name: At_15mM_NH4NO3_L-to-H_P Parameter: Organism Value: A. thaliana
  misc_feature: MA Experiment 20000709 PARAMETER Experiment Name: At_15mM_NH4NO3_L-to-H_P Parameter: Plant Line Value: WS
  misc_feature: MA Experiment 20000709 PARAMETER Experiment Name: At_15mM_NH4NO3_L-to-H_P Parameter: Timepoint (hr) Value: 4
  misc_feature: MA Experiment 20000709 PARAMETER Experiment Name: At_15mM_NH4NO3_L-to-H_P Parameter: Tissue Value: Aerial
  misc_feature: MA Experiment 20000709 PARAMETER Experiment Name: At_15mM_NH4NO3_L-to-H_P Parameter: Treatment Value: 15mM NH4NO3 vs. 30mM Mannitol
  misc_feature: MA Experiment ID: 20000794 Result: Down-regulated in Transcription
  misc_feature: MA Experiment 20000794 PARAMETER Experiment Name: At_Petals_P Parameter: Age (day) Value: 23-25 days
  misc_feature: MA Experiment 20000794 PARAMETER Experiment Name: At_Petals_P Parameter: Plant Line Value: WS
  misc_feature: MA Experiment 20000794 PARAMETER Experiment Name: At_Petals_P Parameter: Tissue Value: Petals vs. Whole plant
  misc_feature: MA Experiment ID: 20001247 Result: Up-regulated in Transcription
  misc_feature: MA Experiment 20001247 PARAMETER Experiment Name: At_Far-red-induction_P Parameter: Age (day) Value: 7
  misc_feature: MA Experiment 20001247 PARAMETER Experiment Name: At_Far-red-induction_P Parameter: Light Value: Far-red vs. White
  misc_feature: MA Experiment 20001247 PARAMETER Experiment Name: At_Far-red-induction_P Parameter: Organism Value: A. thaliana
  misc_feature: MA Experiment 20001247 PARAMETER Experiment Name: At_Far-red-induction_P Parameter: Plant Line Value: Columbia
  misc_feature: MA Experiment 20001247 PARAMETER Experiment Name: At_Far-red-induction_P Parameter: Timepoint (hr) Value: 1
  misc_feature: MA Experiment 20001247 PARAMETER Experiment Name: At_Far-red-induction_P Parameter: Tissue Value: Whole Plant
  misc_feature: MA Experiment ID: 20001248 Result: Up-regulated in Transcription
  misc_feature: MA Experiment 20001248 PARAMETER Experiment Name: At_Far-red-induction_P Parameter: Age (day) Value: 7
  misc_feature: MA Experiment 20001248 PARAMETER Experiment Name: At_Far-red-induction_P Parameter: Light Value: Far-red vs. White
  misc_feature: MA Experiment 20001248 PARAMETER Experiment Name: At_Far-red-induction_P Parameter: Organism Value: A. thaliana
  misc_feature: MA Experiment 20001248 PARAMETER Experiment Name: At_Far-red-induction_P Parameter: Plant Line Value: Columbia
  misc_feature: MA Experiment 20001248 PARAMETER Experiment Name: At_Far-red-induction_P Parameter: Timepoint (hr) Value: 4
  misc_feature: MA Experiment 20001248 PARAMETER Experiment Name: At_Far-red-induction_P Parameter: Tissue Value: Whole Plant
  misc_feature: MA Experiment ID: 20001450 Result: Up-regulated in Transcription
  misc_feature: MA Experiment 20001450 PARAMETER Experiment Name: At_Far-red-induction_P Parameter: Age (day) Value: 7
  misc_feature: MA Experiment 20001450 PARAMETER Experiment Name: At_Far-red-induction_P Parameter: Light Value: Far-red vs. White
  misc_feature: MA Experiment 20001450 PARAMETER Experiment Name: At_Far-red-induction_P Parameter: Organism Value: A. thaliana
  misc_feature: MA Experiment 20001450 PARAMETER Experiment Name: At_Far-red-induction_P Parameter: Plant Line Value: Columbia
  misc_feature: MA Experiment 20001450 PARAMETER Experiment Name: At_Far-red-induction_P Parameter: Timepoint (hr) Value: 8
  misc_feature: MA Experiment 20001450 PARAMETER Experiment Name: At_Far-red-induction_P Parameter: Tissue Value: Whole Plant
  misc_feature: MA Experiment ID: 20001554 Result: Down-regulated in Transcription
  misc_feature: MA Experiment 20001554 PARAMETER Experiment Name: At_Drought_Soil_Dry_P Parameter: Age (day) Value: 21
  misc_feature: MA Experiment 20001554 PARAMETER Experiment Name: At_Drought_Soil_Dry_P Parameter: Organism Value: A. thaliana
  misc_feature: MA Experiment 20001554 PARAMETER Experiment Name: At_Drought_Soil_Dry_P Parameter: Plant Line Value: WS
  misc_feature: MA Experiment 20001554 PARAMETER Experiment Name: At_Drought_Soil_Dry_P Parameter: Post Timepoint (hr) Value: None
  misc_feature: MA Experiment 20001554 PARAMETER Experiment Name: At_Drought_Soil_Dry_P Parameter: Post-Treatment Value: None
  misc_feature: MA Experiment 20001554 PARAMETER Experiment Name: At_Drought_Soil_Dry_P Parameter: Timepoint (day) Value: 7
  misc_feature: MA Experiment 20001554 PARAMETER Experiment Name: At_Drought_Soil_Dry_P Parameter: Treatment Value: Drought vs. No Drought
  misc_feature: MA Experiment ID: 20001555 Result: Down-regulated in Transcription
  misc_feature: MA Experiment 20001555 PARAMETER Experiment Name: At_Drought_Soil_Dry_P Parameter: Age (day) Value: 24
  misc_feature: MA Experiment 20001555 PARAMETER Experiment Name: At_Drought_Soil_Dry_P Parameter: Organism Value: A. thaliana
  misc_feature: MA Experiment 20001555 PARAMETER Experiment Name: At_Drought_Soil_Dry_P Parameter: Plant Line Value: WS
  misc_feature: MA Experiment 20001555 PARAMETER Experiment Name: At_Drought_Soil_Dry_P Parameter: Post Timepoint (hr) Value: None
  misc_feature: MA Experiment 20001555 PARAMETER Experiment Name: At_Drought_Soil_Dry_P Parameter: Post-Treatment Value: None
  misc_feature: MA Experiment 20001555 PARAMETER Experiment Name: At_Drought_Soil_Dry_P Parameter: Timepoint (day) Value: 10
  misc_feature: MA Experiment 20001555 PARAMETER Experiment Name: At_Drought_Soil_Dry_P Parameter: Treatment Value: Drought vs. No Drought
  misc_feature: MA Experiment ID: 20001556 Result: Down-regulated in Transcription
  misc_feature: MA Experiment 20001556 PARAMETER Experiment Name: At_Drought_Soil_Dry_P Parameter: Age (day) Value: 26
  misc_feature: MA Experiment 20001556 PARAMETER Experiment Name: At_Drought_Soil_Dry_P Parameter: Organism Value: A. thaliana
  misc_feature: MA Experiment 20001556 PARAMETER Experiment Name: At_Drought_Soil_Dry_P Parameter: Plant Line Value: WS
  misc_feature: MA Experiment 20001556 PARAMETER Experiment Name: At_Drought_Soil_Dry_P Parameter: Post Timepoint (hr) Value: None
  misc_feature: MA Experiment 20001556 PARAMETER Experiment Name: At_Drought_Soil_Dry_P Parameter: Post-Treatment Value: None
  misc_feature: MA Experiment 20001556 PARAMETER Experiment Name: At_Drought_Soil_Dry_P Parameter: Timepoint (day) Value: 12
  misc_feature: MA Experiment 20001556 PARAMETER Experiment Name: At_Drought_Soil_Dry_P Parameter: Treatment Value: Drought vs. No Drought
  misc_feature: MA Experiment ID: 20001559 Result: Down-regulated in Transcription
  misc_feature: MA Experiment 20001559 PARAMETER Experiment Name: At_Drought_Soil_Dry_P Parameter: Age (day) Value: 28
  misc_feature: MA Experiment 20001559 PARAMETER Experiment Name: At_Drought_Soil_Dry_P Parameter: Organism Value: A. thaliana
  misc_feature: MA Experiment 20001559 PARAMETER Experiment Name: At_Drought_Soil_Dry_P Parameter: Plant Line Value: WS
  misc_feature: MA Experiment 20001559 PARAMETER Experiment Name: At_Drought_Soil_Dry_P Parameter: Post Timepoint (hr) Value: 29
  misc_feature: MA Experiment 20001559 PARAMETER Experiment Name: At_Drought_Soil_Dry_P Parameter: Post-Treatment Value: Re-Water vs. No Drought
  misc_feature: MA Experiment 20001559 PARAMETER Experiment Name: At_Drought_Soil_Dry_P Parameter: Timepoint (day) Value: 14
  misc_feature: MA Experiment 20001559 PARAMETER Experiment Name: At_Drought_Soil_Dry_P Parameter: Treatment Value: Drought vs. No Drought
  misc_feature: MA Experiment ID: 20001757 Result: Up-regulated in Transcription
  misc_feature: MA Experiment 20001757 PARAMETER Experiment Name: At_50mM_NH4NO3_L-to-H_P Parameter: Timepoint (hr) Value: 6
  misc_feature: MA Experiment 20001757 PARAMETER Experiment Name: At_50mM_NH4NO3_L-to-H_P Parameter: Tissue Value: Leaf
  misc_feature: MA Experiment 20001757 PARAMETER Experiment Name: At_50mM_NH4NO3_L-to-H_P Parameter: Treatment Value: 50mM NH4NO3 vs 100mM Mannitol
  misc_feature: MA Experiment ID: 20001905 Result: Down-regulated in Transcription
  misc_feature: MA Experiment 20001905 PARAMETER Experiment Name: At_Drought_Reproduction_P Parameter: Age (day) Value: 40
  misc_feature: MA Experiment 20001905 PARAMETER Experiment Name: At_Drought_Reproduction_P Parameter: Organism Value: A. thaliana
  misc_feature: MA Experiment 20001905 PARAMETER Experiment Name: At_Drought_Reproduction_P Parameter: Plant Line Value: WS
  misc_feature: MA Experiment 20001905 PARAMETER Experiment Name: At_Drought_Reproduction_P Parameter: Timepoint (day) Value: 10
  misc_feature: MA Experiment 20001905 PARAMETER Experiment Name: At_Drought_Reproduction_P Parameter: Tissue Value: Rosettes
  misc_feature: MA Experiment 20001905 PARAMETER Experiment Name: At_Drought_Reproduction_P Parameter: Treatment Value: Drought vs. No Drought
  misc_feature: MA Experiment ID: 20001906 Result: Down-regulated in Transcription
  misc_feature: MA Experiment 20001906 PARAMETER Experiment Name: At_Drought_Reproduction_P Parameter: Age (day) Value: 35
  misc_feature: MA Experiment 20001906 PARAMETER Experiment Name: At_Drought_Reproduction_P Parameter: Organism Value: A. thaliana
  misc_feature: MA Experiment 20001906 PARAMETER Experiment Name: At_Drought_Reproduction_P Parameter: Plant Line Value: WS
  misc_feature: MA Experiment 20001906 PARAMETER Experiment Name: At_Drought_Reproduction_P Parameter: Timepoint (day) Value: 5
  misc_feature: MA Experiment 20001906 PARAMETER Experiment Name: At_Drought_Reproduction_P Parameter: Tissue Value: Siliques
  misc_feature: MA Experiment 20001906 PARAMETER Experiment Name: At_Drought_Reproduction_P Parameter: Treatment Value: Drought vs. No Drought
  misc_feature: MA Experiment ID: 20001907 Result: Down-regulated in Transcription
  misc_feature: MA Experiment 20001907 PARAMETER Experiment Name: At_Drought_Reproduction_P Parameter: Age (day) Value: 37
  misc_feature: MA Experiment 20001907 PARAMETER Experiment Name: At_Drought_Reproduction_P Parameter: Organism Value: A. thaliana
  misc_feature: MA Experiment 20001907 PARAMETER Experiment Name: At_Drought_Reproduction_P Parameter: Plant Line Value: WS
  misc_feature: MA Experiment 20001907 PARAMETER Experiment Name: At_Drought_Reproduction_P Parameter: Timepoint (day) Value: 7
  misc_feature: MA Experiment 20001907 PARAMETER Experiment Name: At_Drought_Reproduction_P Parameter: Tissue Value: Siliques
  misc_feature: MA Experiment 20001907 PARAMETER Experiment Name: At_Drought_Reproduction_P Parameter: Treatment Value: Drought vs. No Drought
  misc_feature: MA Experiment ID: 20001910 Result: Down-regulated in Transcription
  misc_feature: MA Experiment 20001910 PARAMETER Experiment Name: At_Drought_Reproduction_P Parameter: Age (day) Value: 37
  misc_feature: MA Experiment 20001910 PARAMETER Experiment Name: At_Drought_Reproduction_P Parameter: Organism Value: A. thaliana
  misc_feature: MA Experiment 20001910 PARAMETER Experiment Name: At_Drought_Reproduction_P Parameter: Plant Line Value: WS
  misc_feature: MA Experiment 20001910 PARAMETER Experiment Name: At_Drought_Reproduction_P Parameter: Timepoint (day) Value: 7
  misc_feature: MA Experiment 20001910 PARAMETER Experiment Name: At_Drought_Reproduction_P Parameter: Tissue Value: Flowers
  misc_feature: MA Experiment 20001910 PARAMETER Experiment Name: At_Drought_Reproduction_P Parameter: Treatment Value: Drought vs. No Drought
  misc_feature: MA Experiment ID: 20001911 Result: Down-regulated in Transcription
  misc_feature: MA Experiment 20001911 PARAMETER Experiment Name: At_Drought_Reproduction_P Parameter: Age (day) Value: 40
  misc_feature: MA Experiment 20001911 PARAMETER Experiment Name: At_Drought_Reproduction_P Parameter: Organism Value: A. thaliana
  misc_feature: MA Experiment 20001911 PARAMETER Experiment Name: At_Drought_Reproduction_P Parameter: Plant Line Value: WS
  misc_feature: MA Experiment 20001911 PARAMETER Experiment Name: At_Drought_Reproduction_P Parameter: Timepoint (day) Value: 10
  misc_feature: MA Experiment 20001911 PARAMETER Experiment Name: At_Drought_Reproduction_P Parameter: Tissue Value: Flowers
  misc_feature: MA Experiment 20001911 PARAMETER Experiment Name: At_Drought_Reproduction_P Parameter: Treatment Value: Drought vs. No Drought
tattaaaacaactccccaaacaaaactttagatctgaaaatctcagctttgaaatggaggaaatcggaatagttatcgtcggcggcggaatcgctggtctcgccacttccattgctcttcataggaaaggaataaagagtgtggtgttggagagagcagagaaagtgagatcggaaggagctggaatcggaactctctccaatggttggagagcccttgatacagcttggcgttggtgatcgccttcgtctcaattcttctcttattcacaaggcacggaccatgttgattgagaatggaaaaaaacgagaattcgtttcaaatatagtagacgaagctcgttgtattaaaaggaacgatcttgttgaggccttatccgatgcccttccgaaaggaaccatccggttcggttctcatattgtttctattgagcaggacaaaactacgttgtttccggttgttcacttagccaatggaaatagcatcaaagccaaggtcctgattggatgcgatggtgccaattctatcgtcagtgattatttgcagttaaacccgaaaaaggcgtttgcttgtcgtgcggtgagagggtttactaagtacccaaacggccatggatttccacaagaggttctaaggataaagcaaggaaatgtcttaataggaaggcttcctttgacggataatcaagtcttttggtttctagtacatatgcaagacaataatcacaatggtaaagatcaagaatcgattgcgaatctgtgtcgaaaatgggccgatgacttgtctgaagattggaaagaaatggtaaaaatatgcaatgtggagtcattaacactcacacacttaaggtaccgagcgccatcggaaatcatgttagggaaatttcgtcgtgggacagtgactgtagccggcgatgcgatgcacgtgatgggtccgttcttggcacagggcggctcagcggcgctagaggatgcggttgttttagctaggtgtctagctaggaaagttggtccggaccacggagacttgttaaaggattgttcgatgaaaaacattgaagaagctattgatgagtatgtggatgaacgtaggatgagattactcgggctttcggtgcagacttatttgaccggacgttcgctacaaacgtcatcaaaggttctgaggctaatgtttatagctttgttgttacttttgtttggtcgtgatcaaattcgtcatactaggtacgactgtggccgtctctagagatttgatggacattttgtattttttagtgtgaggttgtgtgctttaaactttttttgtgtgtttctttttcttataacatcctcctttctcaatataacaagagttt

SEQ ID NO: 85519 - protein, 348 aa, Arabidopsis thaliana
  peptide (1)..(348): Ceres Seq. ID no. 12680841
  misc_feature (96)..(308): Pfam Name: Monooxygenase Pfam Description: Monooxygenase
  misc_feature (6)..(348): Homolog of NCBI NO: 11358512 NR Description: monooxygenase 1 [imported] - Arabidopsis thaliana
  misc_feature (1)..(348): Homolog of NCBI NO: 30683387 NR Description: monooxygenase 1 (MO1), putative [Arabidopsis
  misc_feature (25)..(186): Homolog of NCBI NO: 7485202 NR Description: hypothetical protein - Arabidopsis thaliana hypothetical protein [Arabidopsis thaliana]
  misc_feature (192)..(338): Homolog of NCBI NO: 7485202 NR Description: hypothetical protein - Arabidopsis thaliana hypothetical protein [Arabidopsis thaliana]
  misc_feature (45)..(348): Homolog of NCBI NO: 15233923 NR Description: monooxygenase 2 (MO2); protein id: At4g38540.1
  misc_feature (45)..(348): Homolog of NCBI NO: 15239070 NR Description: monooxygenase 2 (MO2), putative; protein id: supported by cDNA: 120478. [Arabidopsis thaliana] monooxygenase [Arabidopsis thaliana] >gi|27808600|gb|AAO24580.1|
  misc_feature (45)..(323): Homolog of NCBI NO: 21537119 NR Description: monooxygenase [Arabidopsis thaliana]
  misc_feature (9)..(348): Homolog of NCBI NO: 24745927 NR Description: monooxygenase [Solanum tuberosum]
  misc_feature (35)..(345): Homolog of NCBI NO: 25408403 NR Description: probable monooxygenase [imported] - Arabidopsis
  misc_feature (9)..(345): Homolog of NCBI NO: 4164576 NR Description: CTF2A [Arabidopsis thaliana]
MVGEPLIQLGVGDRLRLNSSLIHKARTMLIENGKKREFVSNIVDEARCIKRNDLVEALSDALPKGTIRFGSHIVSIEQDKTTLFPVVHLANGNSIKAKVLIGCDGANSIVSDYLQLNPKKAFACRAVRGFTKYPNGHGFPQEVLRIKQGNVLIGRLPLTDNQVFWFLVHMQDNNHNGKDQESIANLCRKWADDLSEDWKEMVKICNVESLTLTHLRYRAPSEIMLGKFRRGTVTVAGDAMHVMGPFLAQGGSAALEDAVVLARCLARKVGPDHGDLLKDCSMKNIEEAIDEYVDERRMRLLGLSVQTYLTGRSLQTSSKVLRLMFIALLLLLFGRDQIRHTRYDCGRL

SEQ ID NO: 85520 - protein, 321 aa, Arabidopsis thaliana
  peptide (1)..(321): Ceres Seq. ID no. 12680842
  misc_feature (69)..(281): Pfam Name: Monooxygenase Pfam Description: Monooxygenase
  misc_feature (1)..(321): Homolog of NCBI NO: 11358512 NR Description: monooxygenase 1 [imported] - Arabidopsis thaliana
  misc_feature (1)..(321): Homolog of NCBI NO: 30683387 NR Description: monooxygenase 1 (MO1), putative [Arabidopsis
  misc_feature (1)..(159): Homolog of NCBI NO: 7485202 NR Description: hypothetical protein - Arabidopsis thaliana hypothetical protein [Arabidopsis thaliana]
  misc_feature (165)..(311): Homolog of NCBI NO: 7485202 NR Description: hypothetical protein - Arabidopsis thaliana hypothetical protein [Arabidopsis thaliana]
  misc_feature (18)..(321): Homolog of NCBI NO: 15233923 NR Description: monooxygenase 2 (MO2); protein id: At4g38540.1
  misc_feature (18)..(321): Homolog of NCBI NO: 15239070 NR Description: monooxygenase 2 (MO2), putative; protein id: supported by cDNA: 120478. [Arabidopsis thaliana] monooxygenase [Arabidopsis thaliana] >gi|27808600|gb|AAO24580.1|
  misc_feature (18)..(296): Homolog of NCBI NO: 21537119 NR Description: monooxygenase [Arabidopsis thaliana]
  misc_feature (1)..(321): Homolog of NCBI NO: 24745927 NR Description: monooxygenase [Solanum tuberosum]
  misc_feature (8)..(318): Homolog of NCBI NO: 25408403 NR Description: probable monooxygenase [imported] - Arabidopsis
  misc_feature (1)..(318): Homolog of NCBI NO: 4164576 NR Description: CTF2A [Arabidopsis thaliana]
MLIENGKKREFVSNIVDEARCIKRNDLVEALSDALPKGTIRFGSHIVSIEQDKTTLFPVVHLANGNSIKAKVLIGCDGANSIVSDYLQLNPKKAFACRAVRGFTKYPNGHGFPQEVLRIKQGNVLIGRLPLTDNQVFWFLVHMQDNNHNGKDQESIANLCRKWADDLSEDWKEMVKICNVESLTLTHLRYRAPSEIMLGKFRRGTVTVAGDAMHVMGPFLAQGGSAALEDAVVLARCLARKVGPDHGDLLKDCSMKNIEEAIDEYVDERRMRLLGLSVQTYLTGRSLQTSSKVLRLMFIALLLLLFGRDQIRHTRYDCGRL

SEQ ID NO: 85521 - protein, 179 aa, Arabidopsis thaliana
  peptide (1)..(179): Ceres Seq. ID no. 12680843
  misc_feature (1)..(139): Pfam Name: Monooxygenase Pfam Description: Monooxygenase
  misc_feature (1)..(179): Homolog of NCBI NO: 11358512 NR Description: monooxygenase 1 [imported] - Arabidopsis thaliana
  misc_feature (1)..(179): Homolog of NCBI NO: 30683387 NR Description: monooxygenase 1 (MO1), putative [Arabidopsis
  misc_feature (1)..(17): Homolog of NCBI NO: 7485202 NR Description: hypothetical protein - Arabidopsis thaliana hypothetical protein [Arabidopsis thaliana]
  misc_feature (23)..(169): Homolog of NCBI NO: 7485202 NR Description: hypothetical protein - Arabidopsis thaliana hypothetical protein [Arabidopsis thaliana]
  misc_feature (1)..(179): Homolog of NCBI NO: 15233923 NR Description: monooxygenase 2 (MO2); protein id: At4g38540.1
  misc_feature (1)..(179): Homolog of NCBI NO: 15239070 NR Description: monooxygenase 2 (MO2), putative; protein id: supported by cDNA: 120478. [Arabidopsis thaliana] monooxygenase [Arabidopsis thaliana] >gi|27808600|gb|AAO24580.1|
  misc_feature (1)..(154): Homolog of NCBI NO: 21537119 NR Description: monooxygenase [Arabidopsis thaliana]
  misc_feature (1)..(179): Homolog of NCBI NO: 24745927 NR Description: monooxygenase [Solanum tuberosum]
  misc_feature (1)..(176): Homolog of NCBI NO: 25408403 NR Description: probable monooxygenase [imported] - Arabidopsis
  misc_feature (1)..(176): Homolog of NCBI NO: 4164576 NR Description: CTF2A [Arabidopsis thaliana]
MQDNNHNGKDQESIANLCRKWADDLSEDWKEMVKICNVESLTLTHLRYRAPSEIMLGKFRRGTVTVAGDAMHVMGPFLAQGGSAALEDAVVLARCLARKVGPDHGDLLKDCSMKNIEEAIDEYVDERRMRLLGLSVQTYLTGRSLQTSSKVLRLMFIALLLLLFGRDQIRHTRYDCGRL

SEQ ID NO: 85522 - DNA, 1255 bp, Arabidopsis thaliana
  misc_feature (1)..(1255): Ceres Seq. ID no. 12680896
  misc_feature: MA Experiment ID: 20000113 Result: Up-regulated in Transcription
  misc_feature: MA Experiment 20000113 PARAMETER Experiment Name: At_42deg_Heat_cDNA_P Parameter: Temperature (deg C) Value: 42 vs. 22
  misc_feature: MA Experiment 20000113 PARAMETER Experiment Name: At_42deg_Heat_cDNA_P Parameter: Timepoint (hr) Value: 8
  misc_feature: MA Experiment 20000113 PARAMETER Experiment Name: At_42deg_Heat_cDNA_P Parameter: Tissue Value: Aerial
  misc_feature: MA Experiment ID: 20000439 Result: Up-regulated in Transcription
  misc_feature: MA Experiment 20000439 PARAMETER Experiment Name: At_Roots__P Parameter: Age (day) Value: 14 vs. 21
  misc_feature: MA Experiment 20000439 PARAMETER Experiment Name: At_Roots__P Parameter: Organism Value: A. thaliana
  misc_feature: MA Experiment 20000439 PARAMETER Experiment Name: At_Roots__P Parameter: Tissue Value: Roots vs. Whole Plant
  misc_feature: MA Experiment ID: 20001451 Result: Down-regulated in Transcription
  misc_feature: MA Experiment 20001451 PARAMETER Experiment Name: At_Far-red-induction_P Parameter: Age (day) Value: 7
  misc_feature: MA Experiment 20001451 PARAMETER Experiment Name: At_Far-red-induction_P Parameter: Light Value: Far-red vs. White
  misc_feature: MA Experiment 20001451 PARAMETER Experiment Name: At_Far-red-induction_P Parameter: Organism Value: A. thaliana
  misc_feature: MA Experiment 20001451 PARAMETER Experiment Name: At_Far-red-induction_P Parameter: Plant Line Value: Columbia
  misc_feature: MA Experiment 20001451 PARAMETER Experiment Name: At_Far-red-induction_P Parameter: Timepoint (hr) Value: 24
  misc_feature: MA Experiment 20001451 PARAMETER Experiment Name: At_Far-red-induction_P Parameter: Tissue Value: Whole Plant
ctccactctgctaaatccgacgagagacgacgatgccaagcggtggtaacggaacaagtaacggagtcgctaacgcgaattccaccggtaacgcaggaacaagcggaaacgttccgatatataagccataccgtcacctgaaaaccctagaaggtcacacggcggcgatctcttgcgtcaaattctccaacgacggcaatcttctcgcttccgcttccgtagacaaaaccatgatcctctggtcagcaacaaactactctctcattcatcgttacgaaggtcactctagtggtatctccgatctagcttggtcttctgattcgcattacacttgctctgcttctgatgattgtacgcttcgaatctgggacgctagatctccttatgaatgtcttaaggttcttagaggtcatacgaatttcgtcttctgtgttaatttcaatcctccttcgaatttgattgtgtctggatcgttcgatgagacgattcgtatttgggaggttaagactgggaagtgtgttaggatgattaaagctcattcgatgccgatttcgagtgtgcattttaatagagatggatcgttgattgtttcggcaagtcatgatggttcttgtaagatttgggatgctaaagaaggaacttgcttgaagactcttattgatgataaatctccggctgtttctttcgctaagttctcgcccaatggcaagtttatactcgttgctactctcgatagtactctcaagctgtcgaactatgcgacggggaagtttttgaaagtgtatacaggacatactaacaaagtgttctgtatcacatcggcgttttctgtaacgaatgggaagtacattgtgagtggatcagaggataattgtgtgtatctgtgggatcttcaagcgagaaatatactgcagagactagaaggccacacagacgcagtgatctcagtgagttgccatccggttcagaacgagatatcttcatcgggtaatcatttggataaaactatcaggatttggaaacaggatgcttgaaaaacatgaatatatgtgtatggaattaatggtaacaacaatagttgagattgtgaatctgtttgatctgaacacactattttgatgtttcggaatgggatgaaatctcttgcaagttggtgttaatatttatgacagagatatcatctatgttctctccccaatatgtggatgatacttactttaaaactaaagctttttaataagagctactaaactaa

SEQ ID NO: 85523 - protein, 333 aa, Arabidopsis thaliana; identical to SEQ ID NO: 37530
  peptide (1)..(333): Ceres Seq. ID no. 12680897
  misc_feature (1)..(333): Homolog of NCBI NO: 15235470 NR Description: G-protein beta family; protein id: At4g02730.1, by cDNA: 41490., supported by cDNA: gi_16612251 [Arabidopsis
  misc_feature (120)..(332): Homolog of NCBI NO: 34394218 NR Description: putative WD repeat domain 5 protein [Oryza sativa
  misc_feature (28)..(115): Homolog of NCBI NO: 34394218 NR Description: putative WD repeat domain 5 protein [Oryza sativa
  misc_feature (17)..(332): Homolog of NCBI NO: 30353827 NR Description: Unknown (protein for MGC:56591) [Danio rerio]
  misc_feature (13)..(332): Homolog of NCBI NO: 6714707 NR Description: hypothetical protein [Homo sapiens]
  misc_feature (13)..(332): Homolog of NCBI NO: 16554627 NR Description: WD repeat domain 5 protein; WD-repeat protein 5
  misc_feature (13)..(332): Homolog of NCBI NO: 34853150 NR Description: similar to hypothetical protein [Rattus
  misc_feature (1)..(332): Homolog of NCBI NO: 20302740 NR Description: unknown [Branchiostoma floridae]
  misc_feature (1)..(332): Homolog of NCBI NO: 17864654 NR Description: will die slowly CG17437-PA Will die slowly protein >gi|6946677|emb|CAB72292.1| version:''084'',
  misc_feature (18)..(329): Homolog of NCBI NO: 23199987 NR Description: WD repeat domain 5B [Homo sapiens]

SEQ ID NO: 85524 - protein, 267 aa, Arabidopsis thaliana; identical to SEQ ID NO: 37531
  peptide (1)..(267): Ceres Seq. ID no. 12680898
  misc_feature (1)..(267): Homolog of NCBI NO: 15235470 NR Description: G-protein beta family; protein id: At4g02730.1, by cDNA: 41490., supported by cDNA: gi_16612251 [Arabidopsis
  misc_feature (54)..(266): Homolog of NCBI NO: 34394218 NR Description: putative WD repeat domain 5 protein [Oryza sativa
  misc_feature (1)..(49): Homolog of NCBI NO: 34394218 NR Description: putative WD repeat domain 5 protein [Oryza sativa
  misc_feature (1)..(266): Homolog of NCBI NO: 30353827 NR Description: Unknown (protein for MGC:56591) [Danio rerio]
  misc_feature (1)..(266): Homolog of NCBI NO: 6714707 NR Description: hypothetical protein [Homo sapiens]
  misc_feature (1)..(266): Homolog of NCBI NO: 16554627 NR Description: WD repeat domain 5 protein; WD-repeat protein 5
  misc_feature (1)..(266): Homolog of NCBI NO: 34853150 NR Description: similar to hypothetical protein [Rattus
  misc_feature (1)..(266): Homolog of NCBI NO: 20302740 NR Description: unknown [Branchiostoma floridae]
  misc_feature (1)..(266): Homolog of NCBI NO: 17864654 NR Description: will die slowly CG17437-PA Will die slowly protein >gi|6946677|emb|CAB72292.1| version:''084'',
  misc_feature (1)..(263): Homolog of NCBI NO: 23199987 NR Description: WD repeat domain 5B [Homo sapiens]

SEQ ID NO: 85525 - protein, 169 aa, Arabidopsis thaliana; identical to SEQ ID NO: 37532
  peptide (1)..(169): Ceres Seq. ID no. 12680899
  misc_feature (1)..(169): Homolog of NCBI NO: 15235470 NR Description: G-protein beta family; protein id: At4g02730.1, by cDNA: 41490., supported by cDNA: gi_16612251 [Arabidopsis
  misc_feature (1)..(168): Homolog of NCBI NO: 34394218 NR Description: putative WD repeat domain 5 protein [Oryza sativa
  misc_feature (1)..(168): Homolog of NCBI NO: 30353827 NR Description: Unknown (protein for MGC:56591) [Danio rerio]
  misc_feature (1)..(168): Homolog of NCBI NO: 6714707 NR Description: hypothetical protein [Homo sapiens]
  misc_feature (1)..(168): Homolog of NCBI NO: 16554627 NR Description: WD repeat domain 5 protein; WD-repeat protein 5
  misc_feature (1)..(168): Homolog of NCBI NO: 34853150 NR Description: similar to hypothetical protein [Rattus
  misc_feature (1)..(168): Homolog of NCBI NO: 20302740 NR Description: unknown [Branchiostoma floridae]
  misc_feature (1)..(168): Homolog of NCBI NO: 17864654 NR Description: will die slowly CG17437-PA Will die slowly protein >gi|6946677|emb|CAB72292.1| version:''084'',
  misc_feature (1)..(165): Homolog of NCBI NO: 23199987 NR Description: WD repeat domain 5B [Homo sapiens]
  misc_feature (1)..(165): Homolog of NCBI NO: 7023854 NR Description: unnamed protein product [Homo sapiens]

SEQ ID NO: 85526 - DNA, 1397 bp, Arabidopsis thaliana
  misc_feature (1)..(1397): Ceres Seq. ID no. 12680908
  misc_feature: MA Experiment ID: 108462 Result: Up-regulated in Transcription
  misc_feature: MA Experiment 108462 PARAMETER Experiment Name: At_Germinating_Seeds_cDNA_P Parameter: Age (day) Value: 2 vs. 0
  misc_feature: MA Experiment 108462 PARAMETER Experiment Name: At_Germinating_Seeds_cDNA_P Parameter: Tissue Value: Germinating Seeds
  misc_feature: MA Experiment ID: 108463 Result: Up-regulated in Transcription
  misc_feature: MA Experiment 108463 PARAMETER Experiment Name: At_Germinating_Seeds_cDNA_P Parameter: Age (day) Value: 3 vs. 0
  misc_feature: MA Experiment 108463 PARAMETER Experiment Name: At_Germinating_Seeds_cDNA_P Parameter: Tissue Value: Germinating Seeds
  misc_feature: MA Experiment ID: 108464 Result: Up-regulated in Transcription
  misc_feature: MA Experiment 108464 PARAMETER Experiment Name: At_Germinating_Seeds_cDNA_P Parameter: Age (day) Value: 4 vs. 0
  misc_feature: MA Experiment 108464 PARAMETER Experiment Name: At_Germinating_Seeds_cDNA_P Parameter: Tissue Value: Germinating Seeds
  misc_feature: MA Experiment ID: 108488 Result: Down-regulated in Transcription
  misc_feature: MA Experiment ID: 20000184 Result: Down-regulated in Transcription
  misc_feature: MA Experiment 20000184 PARAMETER Experiment Name: At_Shoots__P Parameter: Age (day) Value: 7
  misc_feature: MA Experiment 20000184 PARAMETER Experiment Name: At_Shoots__P Parameter: Tissue Value: Shoots vs. Whole Plant
  misc_feature: MA Experiment ID: 20000185 Result: Up-regulated in Transcription
  misc_feature: MA Experiment 20000185 PARAMETER Experiment Name: At_Roots__P Parameter: Age (day) Value: 7 vs. 21
  misc_feature: MA Experiment 20000185 PARAMETER Experiment Name: At_Roots__P Parameter: Organism Value: A. thaliana
  misc_feature: MA Experiment 20000185 PARAMETER Experiment Name: At_Roots__P Parameter: Tissue Value: Roots vs. Whole Plant
  misc_feature: MA Experiment ID: 20000224 Result: Up-regulated in Transcription
  misc_feature: MA Experiment ID: 20000794 Result: Up-regulated in Transcription
  misc_feature: MA Experiment 20000794 PARAMETER Experiment Name: At_Petals_P Parameter: Age (day) Value: 23-25 days
  misc_feature: MA Experiment 20000794 PARAMETER Experiment Name: At_Petals_P Parameter: Plant Line Value: WS
  misc_feature: MA Experiment 20000794 PARAMETER Experiment Name: At_Petals_P Parameter: Tissue Value: Petals vs. Whole plant
  misc_feature: MA Experiment ID: 20001451 Result: Down-regulated in Transcription
  misc_feature: MA Experiment 20001451 PARAMETER Experiment Name: At_Far-red-induction_P Parameter: Age (day) Value: 7
  misc_feature: MA Experiment 20001451 PARAMETER Experiment Name: At_Far-red-induction_P Parameter: Light Value: Far-red vs. White
  misc_feature: MA Experiment 20001451 PARAMETER Experiment Name: At_Far-red-induction_P Parameter: Organism Value: A. thaliana
  misc_feature: MA Experiment 20001451 PARAMETER Experiment Name: At_Far-red-induction_P Parameter: Plant Line Value: Columbia
  misc_feature: MA Experiment 20001451 PARAMETER Experiment Name: At_Far-red-induction_P Parameter: Timepoint (hr) Value: 24
  misc_feature: MA Experiment 20001451 PARAMETER Experiment Name: At_Far-red-induction_P Parameter: Tissue Value: Whole Plant
  misc_feature: MA Experiment ID: 20001558 Result: Down-regulated in Transcription
  misc_feature: MA Experiment 20001558 PARAMETER Experiment Name: At_Drought_Soil_Dry_P Parameter: Age (day) Value: 27
  misc_feature: MA Experiment 20001558 PARAMETER Experiment Name: At_Drought_Soil_Dry_P Parameter: Organism Value: A. thaliana
  misc_feature: MA Experiment 20001558 PARAMETER Experiment Name: At_Drought_Soil_Dry_P Parameter: Plant Line Value: WS
  misc_feature: MA Experiment 20001558 PARAMETER Experiment Name: At_Drought_Soil_Dry_P Parameter: Post Timepoint (hr) Value: 6
  misc_feature: MA Experiment 20001558 PARAMETER Experiment Name: At_Drought_Soil_Dry_P Parameter: Post-Treatment Value: Re-Water vs. No Drought
  misc_feature: MA Experiment 20001558 PARAMETER Experiment Name: At_Drought_Soil_Dry_P Parameter: Timepoint (day) Value: 13
  misc_feature: MA Experiment 20001558 PARAMETER Experiment Name: At_Drought_Soil_Dry_P Parameter: Treatment Value: Drought vs. No Drought
  misc_feature: MA Experiment ID: 20001560 Result: Down-regulated in Transcription
  misc_feature: MA Experiment 20001560 PARAMETER Experiment Name: At_Drought_Soil_Dry_P Parameter: Age (day) Value: 28
  misc_feature: MA Experiment 20001560 PARAMETER Experiment Name: At_Drought_Soil_Dry_P Parameter: Organism Value: A. thaliana
  misc_feature: MA Experiment 20001560 PARAMETER Experiment Name: At_Drought_Soil_Dry_P Parameter: Plant Line Value: WS
  misc_feature: MA Experiment 20001560 PARAMETER Experiment Name: At_Drought_Soil_Dry_P Parameter: Post Timepoint (hr) Value: None
  misc_feature: MA Experiment 20001560 PARAMETER Experiment Name: At_Drought_Soil_Dry_P Parameter: Post-Treatment Value: None
  misc_feature: MA Experiment 20001560 PARAMETER Experiment Name: At_Drought_Soil_Dry_P Parameter: Timepoint (day) Value: 14
  misc_feature: MA Experiment 20001560 PARAMETER Experiment Name: At_Drought_Soil_Dry_P Parameter: Treatment Value: Drought vs. No Drought
ttgacgatttctccgatcctttctgggaaactcctccgattcctctcaatcccgactcttctaagcctgttacggcggatgaagttagccagagtcaaccggaatggactttcgagatgtttctcgaagagatttcttcgtcggcggtgagctctgagccacttggtaacaacaacaacgcgatcgtcggtgtttcttcggcgcaatctcttccttctgtttccggacagaatgatttcgaggatgatagtcgatttcgtgatcgcgattcgggaaatttggattgtgctgctcccatgacgacgaagacggtgattgttgattccgatgattatcgtcgtgttcttaagaacaagcttgagactgagtgcgctactgttgtttctcttcgggttgggtctgtgaagcctgaagattcgactagttctccagaaactcaacttcaaccagttcaatccagtcctcttactcaaggagaacttggtgttacttcttccttaccagctgaggtgaaaaaaactggtgtatcaatgaagcaggttactagtggatcgtcgagagaatattctgatgacgaggaccttgatgaagagaatgaaaccaccggttccttgaagccagaggacgttaaaaaatctagaaggatgctgtcaaatcgtgagtcagctaggcgatctagaaggagaaagcaggagcaaacaagtgacctcgaaacacaggttaatgatctaaaaggtgagcattcatcacttcttaaacaactgagcaacatgaatcacaagtatgacgaggctgctgttggcaatagaatactaaaggctgacattgagacattaagagctaaggtgaaaatggcggaagaaaccgtgaagagagtaacaggaatgaatccgatgcttctcggaagatcaagtggacataacaacaacaacagaatgccaataactggtaacaacaggatggattcttctagcattattccagcttatcaaccacactcaaacctaaaccatatgtcaaaccaaaacatcgggatcccaaccattctacctccaagactcggaaacaatttcgctgctcctccatcccaaaccagctctcccttgcagagaattagaaatgggcaaaatcaccatgttactccaagcgccaacccgtatggctggaataccgaacctcagaacgattcagcatggccgaaaaaatgcgtggactgatcaaacaagaagcgggtttcgcactatattaatgtctatgcatctgtaatttgtaagtgttattaagttacgaatcatgagaaaacatcttgtgaaaatacagtctcatggcttatatatatatataagctctgtcttataacattacaagattcttatttgagaatcgtctttctattt

SEQ ID NO: 85527 - protein, 404 aa, Arabidopsis thaliana
  peptide (1)..(404): Ceres Seq. ID no. 12680909
  misc_feature (206)..(270): Pfam Name: bZIP transcription factor Pfam Description: bZIP transcription factor
  misc_feature (1)..(404): Homolog of NCBI NO: 15235433 NR Description: bZIP protein; protein id: At4g02640.1, supported
  misc_feature (1)..(404): Homolog of NCBI NO: 19423919 NR Description: unknown protein [Arabidopsis thaliana]
  misc_feature (1)..(404): Homolog of NCBI NO: 30679226 NR Description: bZIP protein [Arabidopsis thaliana]
  misc_feature (1)..(345): Homolog of NCBI NO: 30694089 NR Description: bZIP transcription factor-related protein
  misc_feature (14)..(371): Homolog of NCBI NO: 100163 NR Description: light-induced protein CPRF-2 - parsley
  misc_feature (14)..(371): Homolog of NCBI NO: 2842757 NR Description: Light-inducible protein CPRF-2
  misc_feature (16)..(361): Homolog of NCBI NO: 16797791 NR Description: bZIP transcription factor [Nicotiana tabacum]
  misc_feature (1)..(344): Homolog of NCBI NO: 542188 NR Description: OHP2 protein - maize >gi|168428|gb|AAA33439.1|
DDFSDPFWETPPIPLNPDSSKPVTADEVSQSQPEWTFEMFLEEISSSAVSSEPLGNNNNAIVGVSSAQSLPSVSGQNDFEDDSRFRDRDSGNLDCAAPMTTKTVIVDSDDYRRVLKNKLETECATVVSLRVGSVKPEDSTSSPETQLQPVQSSPLTQGELGVTSSLPAEVKKTGVSMKQVTSGSSREYSDDEDLDEENETTGSLKPEDVKKSRRMLSNRESARRSRRRKQEQTSDLETQVNDLKGEHSSLLKQLSNMNHKYDEAAVGNRILKADIETLRAKVKMAEETVKRVTGMNPMLLGRSSGHNNNNRMPITGNNRMDSSSIIPAYQPHSNLNHMSNQNIGIPTILPPRLGNNFAAPPSQTSSPLQRIRNGQNHHVTPSANPYGWNTEPQNDSAWPKKCVD

SEQ ID NO: 85528 - protein, 366 aa, Arabidopsis thaliana; identical to SEQ ID NO: 27487
  peptide (1)..(366): Ceres Seq. ID no. 12680910
  misc_feature (168)..(232): Pfam Name: bZIP transcription factor Pfam Description: bZIP transcription factor
  misc_feature (1)..(366): Homolog of NCBI NO: 15235433 NR Description: bZIP protein; protein id: At4g02640.1, supported
  misc_feature (1)..(366): Homolog of NCBI NO: 19423919 NR Description: unknown protein [Arabidopsis thaliana]
  misc_feature (1)..(366): Homolog of NCBI NO: 30679226 NR Description: bZIP protein [Arabidopsis thaliana]
  misc_feature (1)..(307): Homolog of NCBI NO: 30694089 NR Description: bZIP transcription factor-related protein
  misc_feature (1)..(333): Homolog of NCBI NO: 100163 NR Description: light-induced protein CPRF-2 - parsley
  misc_feature (1)..(333): Homolog of NCBI NO: 2842757 NR Description: Light-inducible protein CPRF-2
  misc_feature (1)..(323): Homolog of NCBI NO: 16797791 NR Description: bZIP transcription factor [Nicotiana tabacum]
  misc_feature (1)..(306): Homolog of NCBI NO: 542188 NR Description: OHP2 protein - maize >gi|168428|gb|AAA33439.1|

SEQ ID NO: 85529 - protein, 306 aa, Arabidopsis thaliana
  peptide (1)..(306): Ceres Seq. ID no. 12680911
  misc_feature (108)..(172): Pfam Name: bZIP transcription factor Pfam Description: bZIP transcription factor
  misc_feature (1)..(306): Homolog of NCBI NO: 15235433 NR Description: bZIP protein; protein id: At4g02640.1, supported
  misc_feature (1)..(306): Homolog of NCBI NO: 19423919 NR Description: unknown protein [Arabidopsis thaliana]
  misc_feature (1)..(306): Homolog of NCBI NO: 30679226 NR Description: bZIP protein [Arabidopsis thaliana]
  misc_feature (1)..(247): Homolog of NCBI NO: 30694089 NR Description: bZIP transcription factor-related protein
  misc_feature (1)..(273): Homolog of NCBI NO: 100163 NR Description: light-induced protein CPRF-2 - parsley
  misc_feature (1)..(273): Homolog of NCBI NO: 2842757 NR Description: Light-inducible protein CPRF-2
  misc_feature (1)..(263): Homolog of NCBI NO: 16797791 NR Description: bZIP transcription factor [Nicotiana tabacum]
  misc_feature (1)..(246): Homolog of NCBI NO: 542188 NR Description: OHP2 protein - maize >gi|168428|gb|AAA33439.1|
MTTKTVIVDSDDYRRVLKNKLETECATVVSLRVGSVKPEDSTSSPETQLQPVQSSPLTQGELGVTSSLPAEVKKTGVSMKQVTSGSSREYSDDEDLDEENETTGSLKPEDVKKSRRMLSNRESARRSRRRKQEQTSDLETQVNDLKGEHSSLLKQLSNMNHKYDEAAVGNRILKADIETLRAKVKMAEETVKRVTGMNPMLLGRSSGHNNNNRMPITGNNRMDSSSIIPAYQPHSNLNHMSNQNIGIPTILPPRLGNNFAAPPSQTSSPLQRIRNGQNHHVTPSANPYGWNTEPQNDSAWPKKCVD

SEQ ID NO: 85530 - DNA, 1820 bp, Arabidopsis thaliana
  misc_feature (1)..(1820): Ceres Seq. ID no. 12680912
  misc_feature: MA Experiment ID: 20000265 Result: Down-regulated in Transcription
  misc_feature: MA Experiment 20000265 PARAMETER Experiment Name: At_Open_Flower_P Parameter: Age (day) Value: 21
  misc_feature: MA Experiment 20000265 PARAMETER Experiment Name: At_Open_Flower_P Parameter: Plant Line Value: WS
  misc_feature: MA Experiment 20000265 PARAMETER Experiment Name: At_Open_Flower_P Parameter: Tissue Value: Closed Flower vs. Whole Plant
  misc_feature: MA Experiment ID: 20001247 Result: Up-regulated in Transcription
  misc_feature: MA Experiment 20001247 PARAMETER Experiment Name: At_Far-red-induction_P Parameter: Age (day) Value: 7
  misc_feature: MA Experiment 20001247 PARAMETER Experiment Name: At_Far-red-induction_P Parameter: Light Value: Far-red vs. White
  misc_feature: MA Experiment 20001247 PARAMETER Experiment Name: At_Far-red-induction_P Parameter: Organism Value: A. thaliana
  misc_feature: MA Experiment 20001247 PARAMETER Experiment Name: At_Far-red-induction_P Parameter: Plant Line Value: Columbia
  misc_feature: MA Experiment 20001247 PARAMETER Experiment Name: At_Far-red-induction_P Parameter: Timepoint (hr) Value: 1
  misc_feature: MA Experiment 20001247 PARAMETER Experiment Name: At_Far-red-induction_P Parameter: Tissue Value: Whole Plant
  misc_feature: MA Experiment ID: 20001554 Result: Down-regulated in Transcription
  misc_feature: MA Experiment 20001554 PARAMETER Experiment Name: At_Drought_Soil_Dry_P Parameter: Age (day) Value: 21
  misc_feature: MA Experiment 20001554 PARAMETER Experiment Name: At_Drought_Soil_Dry_P Parameter: Organism Value: A. thaliana
  misc_feature: MA Experiment 20001554 PARAMETER Experiment Name: At_Drought_Soil_Dry_P Parameter: Plant Line Value: WS
  misc_feature: MA Experiment 20001554 PARAMETER Experiment Name: At_Drought_Soil_Dry_P Parameter: Post Timepoint (hr) Value: None
  misc_feature: MA Experiment 20001554 PARAMETER Experiment Name: At_Drought_Soil_Dry_P Parameter: Post-Treatment Value: None
  misc_feature: MA Experiment 20001554 PARAMETER Experiment Name: At_Drought_Soil_Dry_P Parameter: Timepoint (day) Value: 7
  misc_feature: MA Experiment 20001554 PARAMETER Experiment Name: At_Drought_Soil_Dry_P Parameter: Treatment Value: Drought vs. No Drought
  misc_feature: MA Experiment ID: 20001555 Result: Down-regulated in Transcription
  misc_feature: MA Experiment 20001555 PARAMETER Experiment Name: At_Drought_Soil_Dry_P Parameter: Age (day) Value: 24
  misc_feature: MA Experiment 20001555 PARAMETER Experiment Name: At_Drought_Soil_Dry_P Parameter: Organism Value: A. thaliana
  misc_feature: MA Experiment 20001555 PARAMETER Experiment Name: At_Drought_Soil_Dry_P Parameter: Plant Line Value: WS
  misc_feature: MA Experiment 20001555 PARAMETER Experiment Name: At_Drought_Soil_Dry_P Parameter: Post Timepoint (hr) Value: None
  misc_feature: MA Experiment 20001555 PARAMETER Experiment Name: At_Drought_Soil_Dry_P Parameter: Post-Treatment Value: None
  misc_feature: MA Experiment 20001555 PARAMETER Experiment Name: At_Drought_Soil_Dry_P Parameter: Timepoint (day) Value: 10
  misc_feature: MA Experiment 20001555 PARAMETER Experiment Name: At_Drought_Soil_Dry_P Parameter: Treatment Value: Drought vs. No Drought
  misc_feature: MA Experiment ID: 20001556 Result: Down-regulated in Transcription
  misc_feature: MA Experiment 20001556 PARAMETER Experiment Name: At_Drought_Soil_Dry_P Parameter: Age (day) Value: 26
  misc_feature: MA Experiment 20001556 PARAMETER Experiment Name: At_Drought_Soil_Dry_P Parameter: Organism Value: A. thaliana
  misc_feature: MA Experiment 20001556 PARAMETER Experiment Name: At_Drought_Soil_Dry_P Parameter: Plant Line Value: WS
  misc_feature: MA Experiment 20001556 PARAMETER Experiment Name: At_Drought_Soil_Dry_P Parameter: Post Timepoint (hr) Value: None
  misc_feature: MA Experiment 20001556 PARAMETER Experiment Name: At_Drought_Soil_Dry_P Parameter: Post-Treatment Value: None
  misc_feature: MA Experiment 20001556 PARAMETER Experiment Name: At_Drought_Soil_Dry_P Parameter: Timepoint (day) Value: 12
  misc_feature: MA Experiment 20001556 PARAMETER Experiment Name: At_Drought_Soil_Dry_P Parameter: Treatment Value: Drought vs. No Drought
gtagagagagaaaaaaaaaactcagaggagagaaagagaagacgacgaagacgaccattttttttttttttgtcaagagagaagacggagacaacaatggcggaagcgaaggaggagaatagggagaaaaacgaagaagaagagagcgtaaagcttttcgtcggacaaattccgaaacatatgtcggaatctcaactcttaacattgtttcaagagttcgctgtcgttgacgaggtcaatatcatcaaggacaagattacacgcgcctctcgaggatgttgttttctgctatgtccatcgagagaagaagcagataagttggtcaatgcttgccataacaagaagacattgcctggggctaacagtctattgcaagtaaagtatgcagatggcgaattagaaaggctagagcataagctatttgttggtatgcttccaaagaatgtctctgaagctgaagttcaatctttattctccaagtacgggaccataaaggatctacagattctaagaggtgctcaacaaacgagcaaaggctgtgcatttctgaagtatgagacaaaagaacaagctgtttccgccatggaatctatcaacggaaaacataaaatggagggttcaactgttcctttagttgtcaaatgggcagacacagaacgagaaagacacacaagaagacttcaaaaggctcaatctcacatcgcccgactagggaacggtgatccaacaaatccctcattgtttggagcattacctatgggttatgtaccaccatataatggatatggttatcatcctcctggaacttatggttacatgctaccaccaattcagaaccaagctgcattttccaatatgattgcacaaccaaaccaaggtaataacaatgcattgcaaggaacatcgcctgactctgtgccgcctcgtttggcccgtagaaactttcctatgcctcctggaaactacatgggatctggttatcctgctatgcgaggtcatccttttccatttgcttatcccagaggaattgttagtcctcgccctctaagtagctctcctggatctatatcacctggcatgtcaacacctttaggcattggtttgagttctgtggttcaaaccgaaggtccagaaggtgcaaatctgtttatctataacatacctcgggagttcggggatcaagaactcgcggctgcatttcaatctttcggtattgttctgagtgccaaggtttttgtagacaaagccactggtgtaagcaaatgtttcggtaagctctcttttgatctagtttttcctcttttaaaactggttcattgtgaaggtagaaagaaagcattcttttgctgttgctgttggttgcaggttttgttagctatgactcacaagccgcggcgcagaacgctattgacatgatgaatggtcgccatttaggcggtaagaaattgaaagtccagcttaagagagacagcaacaatggccaaccgagtagtaatccttccttaatctcctgaaagtgctaaaactcctcctctcttcaacttgaaagttcataacagaaaaaaacaaaaaacatattcgggcttatgggtcgacccggttcaaagatttggaccgatcttgaatggatgcatctgtatagatccaaatctcattgtgggtcaaaatgtcccatcaactcaaaagctccaaactggatcatctcttttctttttttttttaatctgcaaataacaatttgtaatttatgtttattattgaaactcatgtagaaattttatgatttattaacattaaattcattgaattcttcttctatc

SEQ ID NO: 85531 - protein, 471 aa, Arabidopsis thaliana
  peptide (1)..(471): Ceres Seq. ID no. 12680913
  misc_feature (52)..(124): Pfam Name: RNA recognition motif. (a.k.a. RRM, RBD, or RNP domain) Pfam Description: RNA recognition motif. (a.k.a. RRM, RBD, or RNP
  misc_feature (33)..(471): Homolog of NCBI NO: 30679366 NR Description: RNA-binding protein, putative [Arabidopsis >gi|17529054|gb|AAL38737.1| putative ribonucleoprotein
  misc_feature (33)..(429): Homolog of NCBI NO: 18412143 NR Description: RNA-binding CELF protein, putative; protein id: supported by cDNA: 114653. [Arabidopsis thaliana]
  misc_feature (33)..(429): Homolog of NCBI NO: 7488303 NR Description: ribonucleoprotein homolog T4I9.1 - Arabidopsis >gi|3924594|gb|AAC79095.1| putative ribonucleoprotein thaliana] >gi|4262139|gb|AAD14439.1| putative ribonucleoprotein
  misc_feature (42)..(429): Homolog of NCBI NO: 22329313 NR Description: RNA-binding CELF protein, putative; protein id: [Arabidopsis thaliana] >gi|26449591|dbj|BAC41921.1| putative [Arabidopsis thaliana] >gi|28950997|gb|AAO63422.1| At1g03457
  misc_feature (45)..(429): Homolog of NCBI NO: 25386552 NR Description: protein F21B7.8 [imported] - Arabidopsis thaliana
  misc_feature (46)..(429): Homolog of NCBI NO: 34907248 NR Description: putative ribonucleoprotein [Oryza sativa cultivar- group)] >gi|20160777|dbj|BAB89718.1| putative
  misc_feature (42)..(326): Homolog of NCBI NO: 7488302 NR Description: ribonucleoprotein homolog F21B7.26 - Arabidopsis
  misc_feature (48)..(429): Homolog of NCBI NO: 33354192 NR Description: putative CUG triplet repeat RNA-binding protein 1
  misc_feature (45)..(358): Homolog of NCBI NO: 27369577 NR Description: CUG-BP and ETR-3 like factor 3 [Mus musculus]
  misc_feature (373)..(429): Homolog of NCBI NO: 27369577 NR Description: CUG-BP and ETR-3 like factor 3 [Mus musculus]
VEREKKNSEERKRRRRRRPFFFFLSREKTETTMAEAKEENREKNEEEESVKLFVGQIPKHMSESQLLTLFQEFAVVDEVNIIKDKITRASRGCCFLLCPSREEADKLVNACHNKKTLPGANSLLQVKYADGELERLEHKLFVGMLPKNVSEAEVQSLFSKYGTIKDLQILRGAQQTSKGCAFLKYETKEQAVSAMESINGKHKMEGSTVPLVVKWADTERERHTRRLQKAQSHIARLGNGDPTNPSLFGALPMGYVPPYNGYGYHPPGTYGYMLPPIQNQAAFSNMIAQPNQGNNNALQGTSPDSVPPRLARRNFPMPPGNYMGSGYPAMRGHPFPFAYPRGIVSPRPLSSSPGSISPGMSTPLGIGLSSVVQTEGPEGANLFIYNIPREFGDQELAAAFQSFGIVLSAKVFVDKATGVSKCFGKLSFDLVFPLLKLVHCEGRKKAFFCCCCWLQVLLAMTHKPRRRTLLT

SEQ ID NO: 85532 - protein, 439 aa, Arabidopsis thaliana
  peptide (1)..(439): Ceres Seq. ID no. 12680914
  misc_feature (20)..(92): Pfam Name: RNA recognition motif. (a.k.a. RRM, RBD, or RNP domain) Pfam Description: RNA recognition motif. (a.k.a. RRM, RBD, or RNP
  misc_feature (1)..(439): Homolog of NCBI NO: 30679366 NR Description: RNA-binding protein, putative [Arabidopsis >gi|17529054|gb|AAL38737.1| putative ribonucleoprotein
  misc_feature (1)..(397): Homolog of NCBI NO: 18412143 NR Description: RNA-binding CELF protein, putative; protein id: supported by cDNA: 114653. [Arabidopsis thaliana]
  misc_feature (1)..(397): Homolog of NCBI NO: 7488303 NR Description: ribonucleoprotein homolog T4I9.1 - Arabidopsis >gi|3924594|gb|AAC79095.1| putative ribonucleoprotein thaliana] >gi|4262139|gb|AAD14439.1| putative ribonucleoprotein
  misc_feature (10)..(397): Homolog of NCBI NO: 22329313 NR Description: RNA-binding CELF protein, putative; protein id: [Arabidopsis thaliana] >gi|26449591|dbj|BAC41921.1| putative [Arabidopsis thaliana] >gi|28950997|gb|AAO63422.1| At1g03457
  misc_feature (13)..(397): Homolog of NCBI NO: 25386552 NR Description: protein F21B7.8 [imported] - Arabidopsis thaliana
  misc_feature (14)..(397): Homolog of NCBI NO: 34907248 NR Description: putative ribonucleoprotein [Oryza sativa cultivar- group)] >gi|20160777|dbj|BAB89718.1| putative
  misc_feature (10)..(294): Homolog of NCBI NO: 7488302 NR Description: ribonucleoprotein homolog F21B7.26 - Arabidopsis
  misc_feature (16)..(397): Homolog of NCBI NO: 33354192 NR Description: putative CUG triplet repeat RNA-binding protein 1
  misc_feature (13)..(326): Homolog of NCBI NO: 27369577 NR Description: CUG-BP and ETR-3 like factor 3 [Mus musculus]
  misc_feature (341)..(397): Homolog of NCBI NO: 27369577 NR Description: CUG-BP and ETR-3 like factor 3 [Mus musculus]
MAEAKEENREKNEEEESVKLFVGQIPKHMSESQLLTLFQEFAVVDEVNIIKDKITRASRGCCFLLCPSREEADKLVNACHNKKTLPGANSLLQVKYADGELERLEHKLFVGMLPKNVSEAEVQSLFSKYGTIKDLQILRGAQQTSKGCAFLKYETKEQAVSAMESINGKHKMEGSTVPLVVKWADTERERHTRRLQKAQSHIARLGNGDPTNPSLFGALPMGYVPPYNGYGYHPPGTYGYMLPPIQNQAAFSNMIAQPNQGNNNALQGTSPDSVPPRLARRNFPMPPGNYMGSGYPAMRGHPFPFAYPRGIVSPRPLSSSPGSISPGMSTPLGIGLSSVVQTEGPEGANLFIYNIPREFGDQELAAAFQSFGIVLSAKVFVDKATGVSKCFGKLSFDLVFPLLKLVHCEGRKKAFFCCCCWLQVLLAMTHKPRRRTLLT

SEQ ID NO: 85533 - protein, 411 aa, Arabidopsis thaliana
  peptide (1)..(411): Ceres Seq. ID no. 12680915
  misc_feature (1)..(64): Pfam Name: RNA recognition motif. (a.k.a. RRM, RBD, or RNP domain) Pfam Description: RNA recognition motif. (a.k.a. RRM, RBD, or RNP
  misc_feature (1)..(411): Homolog of NCBI NO: 30679366 NR Description: RNA-binding protein, putative [Arabidopsis >gi|17529054|gb|AAL38737.1| putative ribonucleoprotein
  misc_feature (1)..(369): Homolog of NCBI NO: 18412143 NR Description: RNA-binding CELF protein, putative; protein id: supported by cDNA: 114653. [Arabidopsis thaliana]
  misc_feature (1)..(369): Homolog of NCBI NO: 7488303 NR Description: ribonucleoprotein homolog T4I9.1 - Arabidopsis >gi|3924594|gb|AAC79095.1| putative ribonucleoprotein thaliana] >gi|4262139|gb|AAD14439.1| putative ribonucleoprotein
  misc_feature (1)..(369): Homolog of NCBI NO: 22329313 NR Description: RNA-binding CELF protein, putative; protein id: [Arabidopsis thaliana] >gi|26449591|dbj|BAC41921.1| putative [Arabidopsis thaliana] >gi|28950997|gb|AAO63422.1| At1g03457
  misc_feature (1)..(369): Homolog of NCBI NO: 25386552 NR Description: protein F21B7.8 [imported] - Arabidopsis thaliana
  misc_feature (1)..(369): Homolog of NCBI NO: 34907248 NR Description: putative ribonucleoprotein [Oryza sativa cultivar- group)] >gi|20160777|dbj|BAB89718.1| putative
  misc_feature (1)..(266): Homolog of NCBI NO: 7488302 NR Description: ribonucleoprotein homolog F21B7.26 - Arabidopsis
  misc_feature (1)..(369): Homolog of NCBI NO: 33354192 NR Description: putative CUG triplet repeat RNA-binding protein 1
  misc_feature (1)..(298): Homolog of NCBI NO: 27369577 NR Description: CUG-BP and ETR-3 like factor 3 [Mus musculus]
  misc_feature (313)..(369): Homolog of NCBI NO: 27369577 NR Description: CUG-BP and ETR-3 like factor 3 [Mus musculus]
MSESQLLTLFQEFAVVDEVNIIKDKITRASRGCCFLLCPSREEADKLVNACHNKKTLPGANSLLQVKYADGELERLEHKLFVGMLPKNVSEAEVQSLFSKYGTIKDLQILRGAQQTSKGCAFLKYETKEQAVSAMESINGKHKMEGSTVPLVVKWADTERERHTRRLQKAQSHIARLGNGDPTNPSLFGALPMGYVPPYNGYGYHPPGTYGYMLPPIQNQAAFSNMIAQPNQGNNNALQGTSPDSVPPRLARRNFPMPPGNYMGSGYPAMRGHPFPFAYPRGIVSPRPLSSSPGSISPGMSTPLGIGLSSVVQTEGPEGANLFIYNIPREFGDQELAAAFQSFGIVLSAKVFVDKATGVSKCFGKLSFDLVFPLLKLVHCEGRKKAFFCCCCWLQVLLAMTHKPRRRTLLT

SEQ ID NO: 85534 - DNA, 3209 bp, Arabidopsis thaliana
  misc_feature (1)..(3209): Ceres Seq. ID no. 12680920
  misc_feature: MA Experiment ID: 20000180 Result: Down-regulated in Transcription
  misc_feature: MA Experiment 20000180 PARAMETER Experiment Name: At_Germinating_Seeds_P Parameter: Age (hr) Value: 24 vs. 0
  misc_feature: MA Experiment 20000180 PARAMETER Experiment Name: At_Germinating_Seeds_P Parameter: Tissue Value: Germinating Seeds
  misc_feature: MA Experiment ID: 20001458 Result: Up-regulated in Transcription
  misc_feature: MA Experiment 20001458 PARAMETER Experiment Name: At_50mM_NH4NO3_L-to-H_P Parameter: Age (day) Value: Undefined
  misc_feature: MA Experiment 20001458 PARAMETER Experiment Name: At_50mM_NH4NO3_L-to-H_P Parameter: Organism Value: Undefined
  misc_feature: MA Experiment 20001458 PARAMETER Experiment Name: At_50mM_NH4NO3_L-to-H_P Parameter: Plant Line Value: Undefined
  misc_feature: MA Experiment 20001458 PARAMETER Experiment Name: At_50mM_NH4NO3_L-to-H_P Parameter: Timepoint (hr) Value: 2
  misc_feature: MA Experiment 20001458 PARAMETER Experiment Name: At_50mM_NH4NO3_L-to-H_P Parameter: Tissue Value: Siliques
  misc_feature: MA Experiment 20001458 PARAMETER Experiment Name: At_50mM_NH4NO3_L-to-H_P Parameter: Treatment Value: 50mM NH4NO3 vs. 100mM Manitol
  misc_feature: MA Experiment ID: 20001557 Result: Up-regulated in Transcription
  misc_feature: MA Experiment 20001557 PARAMETER Experiment Name: At_Drought_Soil_Dry_P Parameter: Age (day) Value: 27
  misc_feature: MA Experiment 20001557 PARAMETER Experiment Name: At_Drought_Soil_Dry_P Parameter: Organism Value: A. thaliana
  misc_feature: MA Experiment 20001557 PARAMETER Experiment Name: At_Drought_Soil_Dry_P Parameter: Plant Line Value: WS
  misc_feature: MA Experiment 20001557 PARAMETER Experiment Name: At_Drought_Soil_Dry_P Parameter: Post Timepoint (hr) Value: 3
  misc_feature: MA Experiment 20001557 PARAMETER Experiment Name: At_Drought_Soil_Dry_P Parameter: Post-Treatment Value: Re-Water vs. No Drought
  misc_feature: MA Experiment 20001557 PARAMETER Experiment Name: At_Drought_Soil_Dry_P Parameter: Timepoint (day) Value: 13
  misc_feature: MA Experiment 20001557 PARAMETER Experiment Name: At_Drought_Soil_Dry_P Parameter: Treatment Value: Drought vs. No Drought
  misc_feature: MA Experiment ID: 20001558 Result: Up-regulated in Transcription
  misc_feature: MA Experiment 20001558 PARAMETER Experiment Name: At_Drought_Soil_Dry_P Parameter: Age (day) Value: 27
  misc_feature: MA Experiment 20001558 PARAMETER Experiment Name: At_Drought_Soil_Dry_P Parameter: Organism Value: A. thaliana
  misc_feature: MA Experiment 20001558 PARAMETER Experiment Name: At_Drought_Soil_Dry_P Parameter: Plant Line Value: WS
  misc_feature: MA Experiment 20001558 PARAMETER Experiment Name: At_Drought_Soil_Dry_P Parameter: Post Timepoint (hr) Value: 6
  misc_feature: MA Experiment 20001558 PARAMETER Experiment Name: At_Drought_Soil_Dry_P Parameter: Post-Treatment Value: Re-Water vs. No Drought
  misc_feature: MA Experiment 20001558 PARAMETER Experiment Name: At_Drought_Soil_Dry_P Parameter: Timepoint (day) Value: 13
  misc_feature: MA Experiment 20001558 PARAMETER Experiment Name: At_Drought_Soil_Dry_P Parameter: Treatment Value: Drought vs. No Drought
ttttttcttctcttttaattcaaaaacaaaaaatagtctctgaaaaaaaaagaaaggtttttactttgtggagaagacagagtccgtccgtcgtaactcgccaccgttctccgccgtgaattcttcttactccttcgatctgaactttctacctagttctttcgtccagtgccgtagtctttccttctttgattcgctttctaggtttcgtcttctcatttctctgcttctggttcagtattttggctgttgcgggatcgatttatacccgtaaagtggtttccaatgggctcgaagccttggctacatccagctcctcagtataaaaccctagaaaccttttgggatgatgaagacgatgctcctggtcctagatgcgctcatacacttacggctgttgcagctactaagactcacggtcctcgtcttattctcttcggcggcgccaccgctattgagggagggagttcttccgttcctgggatcaggttagctggtgttaccaatacggtgcattcttatgatattctcactaggaagtggacaaggcttaaaccggctggtgagcctccgtctcctagggctgctcacgccgcagctgcagttggcaccatggtcgtttttcagggtggcattggaccggcggggcattctactgatgatctttacgttcttgacatgactaatgataagttcaagtggcacagggtggtggttcaaggggatggtccaggccctcgctatggccatgttatggatttagtttctcagaggtatcttgttacagtcaccggaaatgatgggaaacgagctctttctgacgcttgggcactggatacagctcagaaaccatatgtatggcagagattgaacccagatggtgaccgaccaagtgctagaatgtatgcttctggcagtgctcgttctgatggcatgtttttgctctgcgggggaagagacaccttgggggcgccgttgggagatgcttatgggctactgatgcatagaaatggtcagtgggagtggactctggctccaggtgtagctccttctccaagatatcaacatgcagcggtttttgtaggtgcaagattacatgtcagtggtggtgtgctgagaggaggccgtgtaatagacgctgaagcatctgttgcagtgcttgatactgctgccggtgtatggttggatagaaatgggcaagttacttctgcacgtggaagtaagggacaaatcgatcaagatccgtcttttgaacttatgcgacgctgtcgccatggcgcggcatcagttggtatccggatctatgtgcatggtggtctaagaggagatgtgttacttgacgattttctagttgctgaaaattcaacattccagtcagacatcagttctcctttgctagcatcagatagaacccaacaaagttctactcccaggttttcttatgccgcacgacctccttcaggctctgaaccaagcttctccatgtctgagggactgagcttggatgaaaattcgttggagaaattgacggaggcttctgcagctgaagcagaggtagctagttctgtttggcgagctgcacaactaggagctggtactctggatgaagaaccctctacctctgatgccagctcgccaattgtagaatctactactgatggtaccgcaaatgaaggagatgtcaggcttcatccgagagctgttgtggtagcaaaagagacggttggtagtctgggcggcatggtaagacagctaagcttggatcagtttcagaatgagagccgacggatggttcccatgaacaatagcgatgtgccacaacctaccaagaagttcacgagacagaagtctccgcaaggcctgcataaaaaggtcattgctgctttgttaagacctcgaaactggaaacctcctggcaataggaaatttttcttggattcttacgaagttggggaactctgttatgctgccgaacaaatatttatgcatgaacaaacggttcttcagctaaaggctcctatcaaagtatttggcgatctccatgggcaatttggcgatttaatgcgtttatttgatgaatatggatttccctcaacagctggagacatcacgtatattgactatttattcttgggagattacgttgaccggggacaacacagcctggagactataacgttgctgcttgcattgaagattgaatatccggagaatgttcacttgattcgtggaaaccacgaggctgctgacattaatgcactatttggtttccgtcttgaatgcatagaaagaatgggagagaatgatggcatctgggcgtggacaagatttaatcaactttttaattatcttcctcttgctgcactaatcgagaacaaaattatatgtatgcatggtggaattgggaggtcaatcagtacagtggaacagattgaaaagattgaaagacccataacaatggatgctggatcccttgttctaatggatttattatggtctgatcctacagagaacgatagtatcgagggtttaagaccaaacgccagaggacctggccttgtcacgtttgggcctgatagagtcacagaattctgtaagaggaataaactacagctaattatcagggcccatgaatgtgtgatggatggattcgaaagatttgcacagggacagttgattacgcttttctccgccacaaattactgcggaactgcgaacaatgcaggagctatattggtggttggcagaggattggtgattgttcccaagttaattcatcctcttccacctcccatcttatctccagagaactctccagaacattctggagacgacgcttggatgcaggagctgaatatccagagaccgccgactccaacacgaggcaggccacaaccagattttgacagaagctcgcttgcatacatctgaatctgattgcattcccggtttctgcctgcaactcatgaagtcaaccaatattggattttggtacaactttatacaagtatagtaagattttatgtttcaaaatttgcagtgttcatatactctgccgcacatgtgtaatataatccactataccaccagagagtgagaatggtatagtactatttttttgcttttcttctaaaaaactctttagtgagagatgatttatatttcttcaaacatagatttggtttttggaatgttaaaactacaacaca

SEQ ID NO: 85535 - protein, 881 aa, Arabidopsis thaliana
  peptide (1)..(881): Ceres Seq. ID no. 12680921
  misc_feature (577)..(786): Pfam Name: Calcineurin-like phosphoesterase Pfam Description: Calcineurin-like phosphoesterase
  misc_feature (396)..(881): Homolog of NCBI NO: 15223207 NR Description: protein serine/threonine phosphatase alpha,
  misc_feature (10)..(459): Homolog of NCBI NO: 15223207 NR Description: protein serine/threonine phosphatase alpha,
  misc_feature (523)..(881): Homolog of NCBI NO: 30683436 NR Description: phospho protein phosphatase -related [Arabidopsis
  misc_feature (10)..(290): Homolog of NCBI NO: 30683436 NR Description: phospho protein phosphatase -related [Arabidopsis
  misc_feature (241)..(638): Homolog of NCBI NO: 25513585 NR Description: probable phosphoprotein phosphatase (EC 3.1.3.16) - Arabidopsis thaliana >gi|6664307|gb|AAF22889.1|AC006932_6
  misc_feature (632)..(881): Homolog of NCBI NO: 25513585 NR Description: probable phosphoprotein phosphatase (EC 3.1.3.16) - Arabidopsis thaliana >gi|6664307|gb|AAF22889.1|AC006932_6
  misc_feature (69)..(172): Homolog of NCBI NO: 25513585 NR Description: probable phosphoprotein phosphatase (EC 3.1.3.16) - Arabidopsis thaliana >gi|6664307|gb|AAF22889.1|AC006932_6
  misc_feature (10)..(61): Homolog of NCBI NO: 25513585 NR Description: probable phosphoprotein phosphatase (EC 3.1.3.16) - Arabidopsis thaliana >gi|6664307|gb|AAF22889.1|AC006932_6
  misc_feature (521)..(867): Homolog of NCBI NO: 9280670 NR Description: F21B7.7 [Arabidopsis thaliana]
  misc_feature (31)..(315): Homolog of NCBI NO: 9280670 NR Description: F21B7.7 [Arabidopsis thaliana]
MGSKPWLHPAPQYKTLETFWDDEDDAPGPRCAHTLTAVAATKTHGPRLILFGGATAIEGGSSSVPGIRLAGVTNTVHSYDILTRKWTRLKPAGEPPSPRAAHAAAAVGTMVVFQGGIGPAGHSTDDLYVLDMTNDKFKWHRVVVQGDGPGPRYGHVMDLVSQRYLVTVTGNDGKRALSDAWALDTAQKPYVWQRLNPDGDRPSARMYASGSARSDGMFLLCGGRDTLGAPLGDAYGLLMHRNGQWEWTLAPGVAPSPRYQHAAVFVGARLHVSGGVLRGGRVIDAEASVAVLDTAAGVWLDRNGQVTSARGSKGQIDQDPSFELMRRCRHGAASVGIRIYVHGGLRGDVLLDDFLVAENSTFQSDISSPLLASDRTQQSSTPRFSYAARPPSGSEPSFSMSEGLSLDENSLEKLTEASAAEAEVASSVWRAAQLGAGTLDEEPSTSDASSPIVESTTDGTANEGDVRLHPRAVVVAKETVGSLGGMVRQLSLDQFQNESRRMVPMNNSDVPQPTKKFTRQKSPQGLHKKVIAALLRPRNWKPPGNRKFFLDSYEVGELCYAAEQIFMHEQTVLQLKAPIKVFGDLHGQFGDLMRLFDEYGFPSTAGDITYIDYLFLGDYVDRGQHSLETITLLLALKIEYPENVHLIRGNHEAADINALFGFRLECIERMGENDGIWAWTRFNQLFNYLPLAALIENKIICMHGGIGRSISTVEQIEKIERPITMDAGSLVLMDLLWSDPTENDSIEGLRPNARGPGLVTFGPDRVTEFCKRNKLQLIIRAHECVMDGFERFAQGQLITLFSATNYCGTANNAGAILVVGRGLVIVPKLIHPLPPPILSPENSPEHSGDDAWMQELNIQRPPTPTRGRPQPDFDRSSLAYI

SEQ ID NO: 85536 - protein, 772 aa, Arabidopsis thaliana
  peptide (1)..(772): Ceres Seq. ID no. 12680922
  misc_feature (468)..(677): Pfam Name: Calcineurin-like phosphoesterase Pfam Description: Calcineurin-like phosphoesterase
  misc_feature (287)..(772): Homolog of NCBI NO: 15223207 NR Description: protein serine/threonine phosphatase alpha,
  misc_feature (1)..(350): Homolog of NCBI NO: 15223207 NR Description: protein serine/threonine phosphatase alpha,
  misc_feature (414)..(772): Homolog of NCBI NO: 30683436 NR Description: phospho protein phosphatase -related [Arabidopsis
  misc_feature (1)..(181): Homolog of NCBI NO: 30683436 NR Description: phospho protein phosphatase -related [Arabidopsis
  misc_feature (132)..(529): Homolog of NCBI NO: 25513585 NR Description: probable phosphoprotein phosphatase (EC 3.1.3.16) - Arabidopsis thaliana >gi|6664307|gb|AAF22889.1|AC006932_6
  misc_feature (523)..(772): Homolog of NCBI NO: 25513585 NR Description: probable phosphoprotein phosphatase (EC 3.1.3.16) - Arabidopsis thaliana >gi|6664307|gb|AAF22889.1|AC006932_6
  misc_feature (1)..(63): Homolog of NCBI NO: 25513585 NR Description: probable phosphoprotein phosphatase (EC 3.1.3.16) - Arabidopsis thaliana >gi|6664307|gb|AAF22889.1|AC006932_6
  misc_feature (412)..(758): Homolog of NCBI NO: 9280670 NR Description: F21B7.7 [Arabidopsis thaliana]
  misc_feature (1)..(206): Homolog of NCBI NO: 9280670 NR Description: F21B7.7 [Arabidopsis thaliana]
  misc_feature (414)..(745): Homolog of NCBI NO: 25513447 NR Description: probable phosphoprotein phosphatase (EC 3.1.3.16)
MVVFQGGIGPAGHSTDDLYVLDMTNDKFKWHRVVVQGDGPGPRYGHVMDLVSQRYLVTVTGNDGKRALSDAWALDTAQKPYVWQRLNPDGDRPSARMYASGSARSDGMFLLCGGRDTLGAPLGDAYGLLMHRNGQWEWTLAPGVAPSPRYQHAAVFVGARLHVSGGVLRGGRVIDAEASVAVLDTAAGVWLDRNGQVTSARGSKGQIDQDPSFELMRRCRHGAASVGIRIYVHGGLRGDVLLDDFLVAENSTFQSDISSPLLASDRTQQSSTPRFSYAARPPSGSEPSFSMSEGLSLDENSLEKLTEASAAEAEVASSVWRAAQLGAGTLDEEPSTSDASSPIVESTTDGTANEGDVRLHPRAVVVAKETVGSLGGMVRQLSLDQFQNESRRMVPMNNSDVPQPTKKFTRQKSPQGLHKKVIAALLRPRNWKPPGNRKFFLDSYEVGELCYAAEQIFMHEQTVLQLKAPIKVFGDLHGQFGDLMRLFDEYGFPSTAGDITYIDYLFLGDYVDRGQHSLETITLLLALKIEYPENVHLIRGNHEAADINALFGFRLECIERMGENDGIWAWTRFNQLFNYLPLAALIENKIICMHGGIGRSISTVEQIEKIERPITMDAGSLVLMDLLWSDPTENDSIEGLRPNARGPGLVTFGPDRVTEFCKRNKLQLIIRAHECVMDGFERFAQGQLITLFSATNYCGTANNAGAILVVGRGLVIVPKLIHPLPPPILSPENSPEHSGDDAWMQELNIQRPPTPTRGRPQPDFDRSSLAYI

SEQ ID NO: 85537 - protein, 750 aa, Arabidopsis thaliana
  peptide (1)..(750): Ceres Seq. ID no. 12680923
  misc_feature (446)..(655): Pfam Name: Calcineurin-like phosphoesterase Pfam Description: Calcineurin-like phosphoesterase
  misc_feature (265)..(750): Homolog of NCBI NO: 15223207 NR Description: protein serine/threonine phosphatase alpha,
  misc_feature (1)..(328): Homolog of NCBI NO: 15223207 NR Description: protein serine/threonine phosphatase alpha,
  misc_feature (392)..(750): Homolog of NCBI NO: 30683436 NR Description: phospho protein phosphatase -related [Arabidopsis
  misc_feature (1)..(159): Homolog of NCBI NO: 30683436 NR Description: phospho protein phosphatase -related [Arabidopsis
  misc_feature (110)..(507): Homolog of NCBI NO: 25513585 NR Description: probable phosphoprotein phosphatase (EC 3.1.3.16) - Arabidopsis thaliana >gi|6664307|gb|AAF22889.1|AC006932_6
  misc_feature (501)..(750): Homolog of NCBI NO: 25513585 NR Description: probable phosphoprotein phosphatase (EC 3.1.3.16) - Arabidopsis thaliana >gi|6664307|gb|AAF22889.1|AC006932_6
  misc_feature (1)..(41): Homolog of NCBI NO: 25513585 NR Description: probable phosphoprotein phosphatase (EC 3.1.3.16) - Arabidopsis thaliana >gi|6664307|gb|AAF22889.1|AC006932_6
  misc_feature (390)..(736): Homolog of NCBI NO: 9280670 NR Description: F21B7.7 [Arabidopsis thaliana]
  misc_feature (1)..(184): Homolog of NCBI NO: 9280670 NR Description: F21B7.7 [Arabidopsis thaliana]
  misc_feature (392)..(723): Homolog of NCBI NO: 25513447 NR Description: probable phosphoprotein phosphatase (EC 3.1.3.16)
MTNDKFKWHRVVVQGDGPGPRYGHVMDLVSQRYLVTVTGNDGKRALSDAWALDTAQKPYVWQRLNPDGDRPSARMYASGSARSDGMFLLCGGRDTLGAPLGDAYGLLMHRNGQWEWTLAPGVAPSPRYQHAAVFVGARLHVSGGVLRGGRVIDAEASVAVLDTAAGVWLDRNGQVTSARGSKGQIDQDPSFELMRRCRHGAASVGIRIYVHGGLRGDVLLDDFLVAENSTFQSDISSPLLASDRTQQSSTPRFSYAARPPSGSEPSFSMSEGLSLDENSLEKLTEASAAEAEVASSVWRAAQLGAGTLDEEPSTSDASSPIVESTTDGTANEGDVRLHPRAVVVAKETVGSLGGMVRQLSLDQFQNESRRMVPMNNSDVPQPTKKFTRQKSPQGLHKKVIAALLRPRNWKPPGNRKFFLDSYEVGELCYAAEQIFMHEQTVLQLKAPIKVFGDLHGQFGDLMRLFDEYGFPSTAGDITYIDYLFLGDYVDRGQHSLETITLLLALKIEYPENVHLIRGNHEAADINALFGFRLECIERMGENDGIWAWTRFNQLFNYLPLAALIENKIICMHGGIGRSISTVEQIEKIERPITMDAGSLVLMDLLWSDPTENDSIEGLRPNARGPGLVTFGPDRVTEFCKRNKLQLIIRAHECVMDGFERFAQGQLITLFSATNYCGTANNAGAILVVGRGLVIVPKLIHPLPPPILSPENSPEHSGDDAWMQELNIQRPPTPTRGRPQPDFDRSSLAYI

SEQ ID NO: 85538 - DNA, 1629 bp, Arabidopsis thaliana
  misc_feature (1)..(1629): Ceres Seq. ID no. 12680924
  misc_feature: MA Experiment ID: 108434 Result: Up-regulated in Transcription
  misc_feature: MA Experiment 108434 PARAMETER Experiment Name: At_Root_Tips_cDNA_P Parameter: Tissue Value: Root Tips
  misc_feature: MA Experiment ID: 108435 Result: Up-regulated in Transcription
  misc_feature: MA Experiment 108435 PARAMETER Experiment Name: At_stm_Mutants_cDNA_P Parameter: Plant Line Value: wt Landsburg vs stm
  misc_feature: MA Experiment 108435 PARAMETER Experiment Name: At_stm_Mutants_cDNA_P Parameter: Tissue Value: Shoot Apical Meristem Region
  misc_feature: MA Experiment ID: 108462 Result: Down-regulated in Transcription
  misc_feature: MA Experiment 108462 PARAMETER Experiment Name: At_Germinating_Seeds_cDNA_P Parameter: Age (day) Value: 2 vs. 0
  misc_feature: MA Experiment 108462 PARAMETER Experiment Name: At_Germinating_Seeds_cDNA_P Parameter: Tissue Value: Germinating Seeds
  misc_feature: MA Experiment ID: 108463 Result: Down-regulated in Transcription
  misc_feature: MA Experiment 108463 PARAMETER Experiment Name: At_Germinating_Seeds_cDNA_P Parameter: Age (day) Value: 3 vs. 0
  misc_feature: MA Experiment 108463 PARAMETER Experiment Name: At_Germinating_Seeds_cDNA_P Parameter: Tissue Value: Germinating Seeds
  misc_feature: MA Experiment ID: 108464 Result: Down-regulated in Transcription
  misc_feature: MA Experiment 108464 PARAMETER Experiment Name: At_Germinating_Seeds_cDNA_P Parameter: Age (day) Value: 4 vs. 0
  misc_feature: MA Experiment 108464 PARAMETER Experiment Name: At_Germinating_Seeds_cDNA_P Parameter: Tissue Value: Germinating Seeds
  misc_feature: MA Experiment ID: 108489 Result: Up-regulated in Transcription
  misc_feature: MA Experiment ID: 108573 Result: Down-regulated in Transcription
  misc_feature: MA Experiment 108573 PARAMETER Experiment Name: At_Drought_cDNA_P Parameter: Timepoint (hr) Value: 6
  misc_feature: MA Experiment 108573 PARAMETER Experiment Name: At_Drought_cDNA_P Parameter: Tissue Value: Aerial
  misc_feature: MA Experiment 108573 PARAMETER Experiment Name: At_Drought_cDNA_P Parameter: Treatment Value: Drought vs. No Drought
  misc_feature: MA Experiment ID: 108579 Result: Up-regulated in Transcription
  misc_feature: MA Experiment 108579 PARAMETER Experiment Name: At_4deg_Cold_cDNA_P Parameter: Temperature (deg C) Value: 4 vs. 22
  misc_feature: MA Experiment 108579 PARAMETER Experiment Name: At_4deg_Cold_cDNA_P Parameter: Timepoint (hr) Value: 6
  misc_feature: MA Experiment 108579 PARAMETER Experiment Name: At_4deg_Cold_cDNA_P Parameter: Tissue Value: Aerial
  misc_feature: MA Experiment ID: 20000090 Result: Up-regulated in Transcription
  misc_feature: MA Experiment ID: 20000234 Result: Up-regulated in Transcription
  misc_feature: MA Experiment 20000234 PARAMETER Experiment Name: At_Siliques_P Parameter: Age (day) Value: 21
  misc_feature: MA Experiment 20000234 PARAMETER Experiment Name: At_Siliques_P Parameter: Organism Value: A. thaliana
  misc_feature: MA Experiment 20000234 PARAMETER Experiment Name: At_Siliques_P Parameter: Plant Line Value: WS
  misc_feature: MA Experiment 20000234 PARAMETER Experiment Name: At_Siliques_P Parameter: Tissue Value: Less Than 5mm Siliques vs. Whole Plant
  misc_feature: MA Experiment ID: 20000264 Result: Up-regulated in Transcription
  misc_feature: MA Experiment 20000264 PARAMETER Experiment Name: At_Open_Flower_P Parameter: Age (day) Value: 21
  misc_feature: MA Experiment 20000264 PARAMETER Experiment Name: At_Open_Flower_P Parameter: Plant Line Value: WS
  misc_feature: MA Experiment 20000264 PARAMETER Experiment Name: At_Open_Flower_P Parameter: Tissue Value: Open Flower vs. Whole Plant
  misc_feature: MA Experiment ID: 20000437 Result: Down-regulated in Transcription
  misc_feature: MA Experiment 20000437 PARAMETER Experiment Name: At_Drought_P Parameter: Age (day) Value: 8
  misc_feature: MA Experiment 20000437 PARAMETER Experiment Name: At_Drought_P Parameter: Organism Value: A. thaliana
  misc_feature: MA Experiment 20000437 PARAMETER Experiment Name: At_Drought_P Parameter: Plant Line Value: WS
  misc_feature: MA Experiment 20000437 PARAMETER Experiment Name: At_Drought_P Parameter: Timepoint (hr) Value: 24
  misc_feature: MA Experiment 20000437 PARAMETER Experiment Name: At_Drought_P Parameter: Tissue Value: Whole Plant
  misc_feature: MA Experiment 20000437 PARAMETER Experiment Name: At_Drought_P Parameter: Treatment Value: Drought vs. No Drought
  misc_feature: MA Experiment ID: 20000495 Result: Up-regulated in Transcription
  misc_feature: MA Experiment 20000495 PARAMETER Experiment Name: At_Guard_Cells_P Parameter: Harvest Date Value: 8/2/2002
  misc_feature: MA Experiment 20000495 PARAMETER Experiment Name: At_Guard_Cells_P Parameter: Organism Value: A. thaliana
  misc_feature: MA Experiment 20000495 PARAMETER Experiment Name: At_Guard_Cells_P Parameter: Tissue Value: Guard Cells vs. Leaves
  misc_feature: MA Experiment ID: 20001247 Result: Down-regulated in Transcription
  misc_feature: MA Experiment 20001247 PARAMETER Experiment Name: At_Far-red-induction_P Parameter: Age (day) Value: 7
  misc_feature: MA Experiment 20001247 PARAMETER Experiment Name: At_Far-red-induction_P Parameter: Light Value: Far-red vs. White
  misc_feature: MA Experiment 20001247 PARAMETER Experiment Name: At_Far-red-induction_P Parameter: Organism Value: A. thaliana
  misc_feature: MA Experiment 20001247 PARAMETER Experiment Name: At_Far-red-induction_P Parameter: Plant Line Value: Columbia
  misc_feature: MA Experiment 20001247 PARAMETER Experiment Name: At_Far-red-induction_P Parameter: Timepoint (hr) Value: 1
  misc_feature: MA Experiment 20001247 PARAMETER Experiment Name: At_Far-red-induction_P Parameter: Tissue Value: Whole Plant
  misc_feature: MA Experiment ID: 20001557 Result: Up-regulated in Transcription
  misc_feature: MA Experiment 20001557 PARAMETER Experiment Name: At_Drought_Soil_Dry_P Parameter: Age (day) Value: 27
  misc_feature: MA Experiment 20001557 PARAMETER Experiment Name: At_Drought_Soil_Dry_P Parameter: Organism Value: A. thaliana
  misc_feature: MA Experiment 20001557 PARAMETER Experiment Name: At_Drought_Soil_Dry_P Parameter: Plant Line Value: WS
  misc_feature: MA Experiment 20001557 PARAMETER Experiment Name: At_Drought_Soil_Dry_P Parameter: Post Timepoint (hr) Value: 3
  misc_feature: MA Experiment 20001557 PARAMETER Experiment Name: At_Drought_Soil_Dry_P Parameter: Post-Treatment Value: Re-Water vs. No Drought
  misc_feature: MA Experiment 20001557 PARAMETER Experiment Name: At_Drought_Soil_Dry_P Parameter: Timepoint (day) Value: 13
  misc_feature: MA Experiment 20001557 PARAMETER Experiment Name: At_Drought_Soil_Dry_P Parameter: Treatment Value: Drought vs. No Drought
  misc_feature: MA Experiment ID: 20001558 Result: Up-regulated in Transcription
  misc_feature: MA Experiment 20001558 PARAMETER Experiment Name: At_Drought_Soil_Dry_P Parameter: Age (day) Value: 27
  misc_feature: MA Experiment 20001558 PARAMETER Experiment Name: At_Drought_Soil_Dry_P Parameter: Organism Value: A. thaliana
  misc_feature: MA Experiment 20001558 PARAMETER Experiment Name: At_Drought_Soil_Dry_P Parameter: Plant Line Value: WS
  misc_feature: MA Experiment 20001558 PARAMETER Experiment Name: At_Drought_Soil_Dry_P Parameter: Post Timepoint (hr) Value: 6
  misc_feature: MA Experiment 20001558 PARAMETER Experiment Name: At_Drought_Soil_Dry_P Parameter: Post-Treatment Value: Re-Water vs. No Drought
  misc_feature: MA Experiment 20001558 PARAMETER Experiment Name: At_Drought_Soil_Dry_P Parameter: Timepoint (day) Value: 13
  misc_feature: MA Experiment 20001558 PARAMETER Experiment Name: At_Drought_Soil_Dry_P Parameter: Treatment Value: Drought vs. No Drought
  misc_feature: MA Experiment ID: 20001560 Result: Up-regulated in Transcription
  misc_feature: MA Experiment 20001560 PARAMETER Experiment Name: At_Drought_Soil_Dry_P Parameter: Age (day) Value: 28
  misc_feature: MA Experiment 20001560 PARAMETER Experiment Name: At_Drought_Soil_Dry_P Parameter: Organism Value: A. thaliana
  misc_feature: MA Experiment 20001560 PARAMETER Experiment Name: At_Drought_Soil_Dry_P Parameter: Plant Line Value: WS
  misc_feature: MA Experiment 20001560 PARAMETER Experiment Name: At_Drought_Soil_Dry_P Parameter: Post Timepoint (hr) Value: None
  misc_feature: MA Experiment 20001560 PARAMETER Experiment Name: At_Drought_Soil_Dry_P Parameter: Post-Treatment Value: None
  misc_feature: MA Experiment 20001560 PARAMETER Experiment Name: At_Drought_Soil_Dry_P Parameter: Timepoint (day) Value: 14
  misc_feature: MA Experiment 20001560 PARAMETER Experiment Name: At_Drought_Soil_Dry_P Parameter: Treatment Value: Drought vs. No Drought
  misc_feature: MA Experiment ID: 20001757 Result: Up-regulated in Transcription
  misc_feature: MA Experiment 20001757 PARAMETER Experiment Name: At_50mM_NH4NO3_L-to-H_P Parameter: Timepoint (hr) Value: 6
  misc_feature: MA Experiment 20001757 PARAMETER Experiment Name: At_50mM_NH4NO3_L-to-H_P Parameter: Tissue Value: Leaf
  misc_feature: MA Experiment 20001757 PARAMETER Experiment Name: At_50mM_NH4NO3_L-to-H_P Parameter: Treatment Value: 50mM NH4NO3 vs 100mM Mannitol
gtgttcgcctttctctcgtacaagtcaaaatggcgtccgttgttcttcgaaaccctagctcgaagcgccttgttccattctcttcccagatctactctcgctgtggtgcttccgttacttcctcttactcgatctctcattctatcggtggagatgatctctcttcctctaccttcggaacctcctccttctggagatccatggccacttttactcgaaataaacctcatgtaaatgttggaactattgggcatgttgatcatggcaagaccactttaactgctgcaatcacaaaggttcttgctgaggagggcaaagctaaagctattgcctttgatgaaattgataaagctcctgaagagaagaagagaggaattactattgccacggctcatgtggagtatgaaactgcaaagcgtcactatgctcatgtggattgccctggacacgcagattatgttaaaaatatgattactggagctgcgcaaatggatggcggaattcttgtggtttcaggaccagatggacccatgccgcagacaaaggaacatattctacttgcacgccaggttggtgttccctcacttgtgtgcttcttgaacaaagttgatgtggtggatgaccctgagctcttggagcttgtcgagatggaactacgtgagctcctcagcttctacaagtttcctggggatgatattcccatcatccgaggatctgctctgtccgcattacagggcaccaatgatgaaattggaaggcaagctatattaaagctgatggatgctgttgatgaatatatacctgaccctgttcgcgtccttgacaagcctttcttgatgccaattgaagatgttttctcaattcaaggacgtggaactgttgcaaccggtcgtatcgaacagggagtcattaaagtgggtgaagaagttgagatattgggtttacgtgaggggggtgttccactgaaatcgactgtaactggggttgagatgttcaagaagattttggataatggacaggctggtgataatgtaggacttcttctgcgtgggctaaagagagaagacattcagcgtggaatggtgattgctaagcctggttcatgcaagacatacaagaagtttgaagcagagatttacgtgctcacaaaggatgaaggtggacgtcacactgcatttttctctaactacaggcctcagttttacttgaggactgcagatatcactggcaaagtggaattacccgaaaacgtgaagatggttatgcctggtgacaatgtcacagctgttttcgagttaatcatgcctgtcccactcgaaacaggtcaaagatttgccttaagggaaggaggtagaacagttggagctggtgttgtatcaaaagtgatgacctaaactactcaaaagcacattcttctccttcgttctctaggaatccatcaatttcgagatttttctttttgtctttttgctgctttgagatttctttgggtagatcaaataaacagagagaaacttaatttatgtttccaatgagaaagattagggcagagggcacgaaacgtctatttctttttgatgcttcctactttgtgaaactttcaaaaagccacttccaattctttctcac

SEQ ID NO: 85539 - protein, 463 aa, Arabidopsis thaliana; identical to SEQ ID NO: 22001
  peptide (1)..(463): Ceres Seq. ID no. 12680925
  misc_feature (74)..(270): Pfam Name: Elongation factor Tu GTP binding domain Pfam Description: Elongation factor Tu GTP binding domain
  misc_feature (10)..(463): Homolog of NCBI NO: 15236220 NR Description: mitochondrial elongation factor Tu; protein id: [Arabidopsis thaliana] >gi|25090254|sp|Q9ZT91|EFTM_ARATH factor Tu, mitochondrial precursor >gi|7443411|pir||T01400
  misc_feature (19)..(463): Homolog of NCBI NO: 1149571 NR Description: mitochondrial elongation factor Tu [Arabidopsis
  misc_feature (11)..(461): Homolog of NCBI NO: 18001149 NR Description: translational elongation factor Tu [Oryza sativa] elongation factor Tu [Oryza sativa] >gi|27573344|gb|AAO20062.1|
  misc_feature (10)..(463): Homolog of NCBI NO: 11181616 NR Description: translational elongation factor EF-TuM [Zea mays]
  misc_feature (68)..(462): Homolog of NCBI NO: 23054529 NR Description: hypothetical protein [Geobacter metallireducens]
  misc_feature (68)..(462): Homolog of NCBI NO: 27380513 NR Description: elongation factor TU [Bradyrhizobium japonicum]
  misc_feature (68)..(461): Homolog of NCBI NO: 23108387 NR Description: hypothetical protein [Novosphingobium
  misc_feature (70)..(462): Homolog of NCBI NO: 21952751 NR Description: elongation factor Tu [Myxococcus xanthus]
  misc_feature (70)..(462): Homolog of NCBI NO: 22998293 NR Description: hypothetical protein [Magnetococcus sp. MC-1]
  misc_feature (64)..(462): Homolog of NCBI NO: 22965193 NR Description: hypothetical protein [Rhodopseudomonas palustris]

SEQ ID NO: 85540 - protein, 454 aa, Arabidopsis thaliana; identical to SEQ ID NO: 22002
  peptide (1)..(454): Ceres Seq. ID no. 12680926
  misc_feature (65)..(261): Pfam Name: Elongation factor Tu GTP binding domain Pfam Description: Elongation factor Tu GTP binding domain
  misc_feature (1)..(454): Homolog of NCBI NO: 15236220 NR Description: mitochondrial elongation factor Tu; protein id: [Arabidopsis thaliana] >gi|25090254|sp|Q9ZT91|EFTM_ARATH factor Tu, mitochondrial precursor >gi|7443411|pir||T01400
  misc_feature (10)..(454): Homolog of NCBI NO: 1149571 NR Description: mitochondrial elongation factor Tu [Arabidopsis
  misc_feature (2)..(452): Homolog of NCBI NO: 18001149 NR Description: translational elongation factor Tu [Oryza sativa] elongation factor Tu [Oryza sativa] >gi|27573344|gb|AAO20062.1|
  misc_feature (1)..(454): Homolog of NCBI NO: 11181616 NR Description: translational elongation factor EF-TuM [Zea mays]
  misc_feature (59)..(453): Homolog of NCBI NO: 23054529 NR Description: hypothetical protein [Geobacter metallireducens]
  misc_feature (59)..(453): Homolog of NCBI NO: 27380513 NR Description: elongation factor TU [Bradyrhizobium japonicum]
  misc_feature (59)..(452): Homolog of NCBI NO: 23108387 NR Description: hypothetical protein [Novosphingobium
  misc_feature (61)..(453): Homolog of NCBI NO: 21952751 NR Description: elongation factor Tu [Myxococcus xanthus]
  misc_feature (61)..(453): Homolog of NCBI NO: 22998293 NR Description: hypothetical protein [Magnetococcus sp. MC-1]
  misc_feature (55)..(453): Homolog of NCBI NO: 22965193 NR Description: hypothetical protein [Rhodopseudomonas palustris]

SEQ ID NO: 85541 - protein, 397 aa, Arabidopsis thaliana; identical to SEQ ID NO: 22003
  peptide (1)..(397): Ceres Seq. ID no. 12680927
  misc_feature (8)..(204): Pfam Name: Elongation factor Tu GTP binding domain Pfam Description: Elongation factor Tu GTP binding domain
  misc_feature (1)..(397): Homolog of NCBI NO: 15236220 NR Description: mitochondrial elongation factor Tu; protein id: [Arabidopsis thaliana] >gi|25090254|sp|Q9ZT91|EFTM_ARATH factor Tu, mitochondrial precursor >gi|7443411|pir||T01400
  misc_feature (1)..(397): Homolog of NCBI NO: 1149571 NR Description: mitochondrial elongation factor Tu [Arabidopsis
  misc_feature (1)..(395): Homolog of NCBI NO: 18001149 NR Description: translational elongation factor Tu [Oryza sativa] elongation factor Tu [Oryza sativa] >gi|27573344|gb|AAO20062.1|
  misc_feature (1)..(397): Homolog of NCBI NO: 11181616 NR Description: translational elongation factor EF-TuM [Zea mays]
  misc_feature (2)..(396): Homolog of NCBI NO: 23054529 NR Description: hypothetical protein [Geobacter metallireducens]
  misc_feature (2)..(396): Homolog of NCBI NO: 27380513 NR Description: elongation factor TU [Bradyrhizobium japonicum]
  misc_feature (2)..(395): Homolog of NCBI NO: 23108387 NR Description: hypothetical protein [Novosphingobium
  misc_feature (4)..(396): Homolog of NCBI NO: 21952751 NR Description: elongation factor Tu [Myxococcus xanthus]
  misc_feature (4)..(396): Homolog of NCBI NO: 22998293 NR Description: hypothetical protein [Magnetococcus sp. MC-1]
  misc_feature (1)..(396): Homolog of NCBI NO: 22965193 NR Description: hypothetical protein [Rhodopseudomonas palustris]

SEQ ID NO: 85542 - DNA, 1057 bp, Arabidopsis thaliana
  misc_feature (1)..(1057): Ceres Seq. ID no. 12680936
  misc_feature: MA Experiment ID: 108435 Result: Down-regulated in Transcription
  misc_feature: MA Experiment 108435 PARAMETER Experiment Name: At_stm_Mutants_cDNA_P Parameter: Plant Line Value: wt Landsburg vs stm
  misc_feature: MA Experiment 108435 PARAMETER Experiment Name: At_stm_Mutants_cDNA_P Parameter: Tissue Value: Shoot Apical Meristem Region
  misc_feature: MA Experiment ID: 108461 Result: Up-regulated in Transcription
  misc_feature: MA Experiment 108461 PARAMETER Experiment Name: At_Germinating_Seeds_cDNA_P Parameter: Age (day) Value: 1 vs. 0
  misc_feature: MA Experiment 108461 PARAMETER Experiment Name: At_Germinating_Seeds_cDNA_P Parameter: Tissue Value: Germinating Seeds
  misc_feature: MA Experiment ID: 108462 Result: Up-regulated in Transcription
  misc_feature: MA Experiment 108462 PARAMETER Experiment Name: At_Germinating_Seeds_cDNA_P Parameter: Age (day) Value: 2 vs. 0
  misc_feature: MA Experiment 108462 PARAMETER Experiment Name: At_Germinating_Seeds_cDNA_P Parameter: Tissue Value: Germinating Seeds
  misc_feature: MA Experiment ID: 108463 Result: Up-regulated in Transcription
  misc_feature: MA Experiment 108463 PARAMETER Experiment Name: At_Germinating_Seeds_cDNA_P Parameter: Age (day) Value: 3 vs. 0
  misc_feature: MA Experiment 108463 PARAMETER Experiment Name: At_Germinating_Seeds_cDNA_P Parameter: Tissue Value: Germinating Seeds
  misc_feature: MA Experiment ID: 108464 Result: Up-regulated in Transcription
  misc_feature: MA Experiment 108464 PARAMETER Experiment Name: At_Germinating_Seeds_cDNA_P Parameter: Age (day) Value: 4 vs. 0
  misc_feature: MA Experiment 108464 PARAMETER Experiment Name: At_Germinating_Seeds_cDNA_P Parameter: Tissue Value: Germinating Seeds
  misc_feature: MA Experiment ID: 108488 Result: Up-regulated in Transcription
  misc_feature: MA Experiment ID: 108595 Result: Down-regulated in Transcription
  misc_feature: MA Experiment 108595 PARAMETER Experiment Name: At_Ler-pi_Ovule_cDNA_P Parameter: Plant Line Value: null
  misc_feature: MA Experiment ID: 20000071 Result: Down-regulated in Transcription
  misc_feature: MA Experiment 20000071 PARAMETER Experiment Name: At_100uM_ABA_Mutants_cDNA_P Parameter: Plant Line Value: CS8104
  misc_feature: MA Experiment 20000071 PARAMETER Experiment Name: At_100uM_ABA_Mutants_cDNA_P Parameter: Timepoint (hr) Value: 6
  misc_feature: MA Experiment 20000071 PARAMETER Experiment Name: At_100uM_ABA_Mutants_cDNA_P Parameter: Tissue Value: Aerial
  misc_feature: MA Experiment 20000071 PARAMETER Experiment Name: At_100uM_ABA_Mutants_cDNA_P Parameter: Treatment Value: 100uM ABA vs. No Treatment
  misc_feature: MA Experiment ID: 20000086 Result: Down-regulated in Transcription
  misc_feature: MA Experiment 20000086 PARAMETER Experiment Name: At_100uM_ABA_Mutants_cDNA_P Parameter: Plant Line Value: CS22
  misc_feature: MA Experiment 20000086 PARAMETER Experiment Name: At_100uM_ABA_Mutants_cDNA_P Parameter: Timepoint (hr) Value: 6
  misc_feature: MA Experiment 20000086 PARAMETER Experiment Name: At_100uM_ABA_Mutants_cDNA_P Parameter: Tissue Value: Aerial
  misc_feature: MA Experiment 20000086 PARAMETER Experiment Name: At_100uM_ABA_Mutants_cDNA_P Parameter: Treatment Value: 100uM ABA vs. No Treatment
  misc_feature: MA Experiment ID: 20000087 Result: Down-regulated in Transcription
  misc_feature: MA Experiment 20000087 PARAMETER Experiment Name: At_100uM_ABA_Mutants_cDNA_P Parameter: Plant Line Value: WS
  misc_feature: MA Experiment 20000087 PARAMETER Experiment Name: At_100uM_ABA_Mutants_cDNA_P Parameter: Timepoint (hr) Value: 6
  misc_feature: MA Experiment 20000087 PARAMETER Experiment Name: At_100uM_ABA_Mutants_cDNA_P Parameter: Tissue Value: Aerial
  misc_feature: MA Experiment 20000087 PARAMETER Experiment Name: At_100uM_ABA_Mutants_cDNA_P Parameter: Treatment Value: 100uM ABA vs. No Treatment
  misc_feature: MA Experiment ID: 20000088 Result: Down-regulated in Transcription
  misc_feature: MA Experiment 20000088 PARAMETER Experiment Name: At_100uM_ABA_Mutants_cDNA_P Parameter: Plant Line Value: Landsberg
  misc_feature: MA Experiment 20000088 PARAMETER Experiment Name: At_100uM_ABA_Mutants_cDNA_P Parameter: Timepoint (hr) Value: 6
  misc_feature: MA Experiment 20000088 PARAMETER Experiment Name: At_100uM_ABA_Mutants_cDNA_P Parameter: Tissue Value: Aerial
  misc_feature: MA Experiment 20000088 PARAMETER Experiment Name: At_100uM_ABA_Mutants_cDNA_P Parameter: Treatment Value: 100uM ABA vs. No Treatment
  misc_feature: MA Experiment ID: 20000117 Result: Down-regulated in Transcription
  misc_feature: MA Experiment 20000117 PARAMETER Experiment Name: At_100uM_ABA_Mutants_cDNA_P Parameter: Plant Line Value: Columbia
  misc_feature: MA Experiment 20000117 PARAMETER Experiment Name: At_100uM_ABA_Mutants_cDNA_P Parameter: Timepoint (hr) Value: 6
  misc_feature: MA Experiment 20000117 PARAMETER Experiment Name: At_100uM_ABA_Mutants_cDNA_P Parameter: Tissue Value: Aerial
  misc_feature: MA Experiment 20000117 PARAMETER Experiment Name: At_100uM_ABA_Mutants_cDNA_P Parameter: Treatment Value: 100uM ABA vs. No Treatment
  misc_feature: MA Experiment ID: 20000180 Result: Up-regulated in Transcription
  misc_feature: MA Experiment 20000180 PARAMETER Experiment Name: At_Germinating_Seeds_P Parameter: Age (hr) Value: 24 vs. 0
  misc_feature: MA Experiment 20000180 PARAMETER Experiment Name: At_Germinating_Seeds_P Parameter: Tissue Value: Germinating Seeds
  misc_feature: MA Experiment ID: 20000185 Result: Down-regulated in Transcription
  misc_feature: MA Experiment 20000185 PARAMETER Experiment Name: At_Roots__P Parameter: Age (day) Value: 7 vs. 21
  misc_feature: MA Experiment 20000185 PARAMETER Experiment Name: At_Roots__P Parameter: Organism Value: A. thaliana
  misc_feature: MA Experiment 20000185 PARAMETER Experiment Name: At_Roots__P Parameter: Tissue Value: Roots vs. Whole Plant
  misc_feature: MA Experiment ID: 20000438 Result: Up-regulated in Transcription
  misc_feature: MA Experiment 20000438 PARAMETER Experiment Name: At_Shoots__P Parameter: Age (day) Value: 14
  misc_feature: MA Experiment 20000438 PARAMETER Experiment Name: At_Shoots__P Parameter: Tissue Value: Shoots vs. Whole Plant
  misc_feature: MA Experiment ID: 20000439 Result: Down-regulated in Transcription
  misc_feature: MA Experiment 20000439 PARAMETER Experiment Name: At_Roots__P Parameter: Age (day) Value: 14 vs. 21
  misc_feature: MA Experiment 20000439 PARAMETER Experiment Name: At_Roots__P Parameter: Organism Value: A. thaliana
  misc_feature: MA Experiment 20000439 PARAMETER Experiment Name: At_Roots__P Parameter: Tissue Value: Roots vs. Whole Plant
  misc_feature: MA Experiment ID: 20000495 Result: Down-regulated in Transcription
  misc_feature: MA Experiment 20000495 PARAMETER Experiment Name: At_Guard_Cells_P Parameter: Harvest Date Value: 8/2/2002
  misc_feature: MA Experiment 20000495 PARAMETER Experiment Name: At_Guard_Cells_P Parameter: Organism Value: A. thaliana
  misc_feature: MA Experiment 20000495 PARAMETER Experiment Name: At_Guard_Cells_P Parameter: Tissue Value: Guard Cells vs. Leaves
  misc_feature: MA Experiment ID: 20000496 Result: Down-regulated in Transcription
  misc_feature: MA Experiment 20000496 PARAMETER Experiment Name: At_Guard_Cells_P Parameter: Harvest Date Value: 7/19/2002
  misc_feature: MA Experiment 20000496 PARAMETER Experiment Name: At_Guard_Cells_P Parameter: Organism Value: Canola
  misc_feature: MA Experiment 20000496 PARAMETER Experiment Name: At_Guard_Cells_P Parameter: Tissue Value: Guard Cells vs. Leaves
  misc_feature: MA Experiment ID: 20000794 Result: Down-regulated in Transcription
  misc_feature: MA Experiment 20000794 PARAMETER Experiment Name: At_Petals_P Parameter: Age (day) Value: 23-25 days
  misc_feature: MA Experiment 20000794 PARAMETER Experiment Name: At_Petals_P Parameter: Plant Line Value: WS
  misc_feature: MA Experiment 20000794 PARAMETER Experiment Name: At_Petals_P Parameter: Tissue Value: Petals vs. Whole plant
  misc_feature: MA Experiment ID: 20001451 Result: Down-regulated in Transcription
  misc_feature: MA Experiment 20001451 PARAMETER Experiment Name: At_Far-red-induction_P Parameter: Age (day) Value: 7
  misc_feature: MA Experiment 20001451 PARAMETER Experiment Name: At_Far-red-induction_P Parameter: Light Value: Far-red vs. White
  misc_feature: MA Experiment 20001451 PARAMETER Experiment Name: At_Far-red-induction_P Parameter: Organism Value: A. thaliana
  misc_feature: MA Experiment 20001451 PARAMETER Experiment Name: At_Far-red-induction_P Parameter: Plant Line Value: Columbia
  misc_feature: MA Experiment 20001451 PARAMETER Experiment Name: At_Far-red-induction_P Parameter: Timepoint (hr) Value: 24
  misc_feature: MA Experiment 20001451 PARAMETER Experiment Name: At_Far-red-induction_P Parameter: Tissue Value: Whole Plant
  misc_feature: MA Experiment ID: 20001557 Result: Down-regulated in Transcription
  misc_feature: MA Experiment 20001557 PARAMETER Experiment Name: At_Drought_Soil_Dry_P Parameter: Age (day) Value: 27
  misc_feature: MA Experiment 20001557 PARAMETER Experiment Name: At_Drought_Soil_Dry_P Parameter: Organism Value: A. thaliana
  misc_feature: MA Experiment 20001557 PARAMETER Experiment Name: At_Drought_Soil_Dry_P Parameter: Plant Line Value: WS
  misc_feature: MA Experiment 20001557 PARAMETER Experiment Name: At_Drought_Soil_Dry_P Parameter: Post Timepoint (hr) Value: 3
  misc_feature: MA Experiment 20001557 PARAMETER Experiment Name: At_Drought_Soil_Dry_P Parameter: Post-Treatment Value: Re-Water vs. No Drought
  misc_feature: MA Experiment 20001557 PARAMETER Experiment Name: At_Drought_Soil_Dry_P Parameter: Timepoint (day) Value: 13
  misc_feature: MA Experiment 20001557 PARAMETER Experiment Name: At_Drought_Soil_Dry_P Parameter: Treatment Value: Drought vs. No Drought
  misc_feature: MA Experiment ID: 20001757 Result: Up-regulated in Transcription
  misc_feature: MA Experiment 20001757 PARAMETER Experiment Name: At_50mM_NH4NO3_L-to-H_P Parameter: Timepoint (hr) Value: 6
  misc_feature: MA Experiment 20001757 PARAMETER Experiment Name: At_50mM_NH4NO3_L-to-H_P Parameter: Tissue Value: Leaf
  misc_feature: MA Experiment 20001757 PARAMETER Experiment Name: At_50mM_NH4NO3_L-to-H_P Parameter: Treatment Value: 50mM NH4NO3 vs 100mM Mannitol
  misc_feature: MA Experiment ID: 20001905 Result: Down-regulated in Transcription
  misc_feature: MA Experiment 20001905 PARAMETER Experiment Name: At_Drought_Reproduction_P Parameter: Age (day) Value: 40
  misc_feature: MA Experiment 20001905 PARAMETER Experiment Name: At_Drought_Reproduction_P Parameter: Organism Value: A. thaliana
  misc_feature: MA Experiment 20001905 PARAMETER Experiment Name: At_Drought_Reproduction_P Parameter: Plant Line Value: WS
  misc_feature: MA Experiment 20001905 PARAMETER Experiment Name: At_Drought_Reproduction_P Parameter: Timepoint (day) Value: 10
  misc_feature: MA Experiment 20001905 PARAMETER Experiment Name: At_Drought_Reproduction_P Parameter: Tissue Value: Rosettes
  misc_feature: MA Experiment 20001905 PARAMETER Experiment Name: At_Drought_Reproduction_P Parameter: Treatment Value: Drought vs. No Drought
gccttatctgcttctctctctccagtggtctcaaatctctctgtgtgatcccacttgtcatcctcctccacaacataaagcttgagaccataaccctttagcgttttcggctaaagctttcgctgactactacaacaatggcgtcctcatccctttcccctgctactcaggttcactcttgatcgttcgaatcgaaacaatcgggtctcttcgtataggaatttgggtttttgaaagtttggtttttttttttggtggcagcttggttctagcagaagtgctttgatggcgatgtcaagtgggttgtttgtgaagccaacgaagatgaatcatcaaatggttagaaaagagaagattggattgagaatttcttgtcaagcgtcgagtattccagcagacagagttccagatatggaaaagaggaagactttgaatcttcttcttcttggggctctttctctacctactggctacatgcttgtcccttacgctaccttctttgttcctcctggaaccggaggtggaggtggtggtactccagccaaggatgcccttggaaacgatgtagttgcagcggaatggcttaagactcatggtcccggtgaccgaaccttgacccaaggattaaagggagatccgacttacctagttgtagagaacgacaagactctagcgacatacggtatcaacgcagtgtgcactcatcttggatgtgttgtgccatggaacaaagctgagaacaagtttctatgtccttgccatggatcccaatacaacgcccaaggaagagtcgttagaggtccagccccattgtcgctagcgttggctcacgcggatatagatgaagctgggaaggttctttttgttccatgggtggaaactgacttcaggactggtgatgctccatggtggtcttaagactcttcaacaagaaaaagagaaagatttggtctttttgtgtaagacttgtttgaatgttcttataatgtataagctacatttcatcgcaattactctgtgaattcttgcctcttatatgaaatattatgttcattca

SEQ ID NO: 85543 - protein, 210 aa, Arabidopsis thaliana; identical to SEQ ID NO: 38000
  peptide (1)..(210): Ceres Seq. ID no. 12680937
  misc_feature (94)..(186): Pfam Name: Rieske [2Fe-2S] domain Pfam Description: Rieske [2Fe-2S] domain
  misc_feature (1)..(210): Homolog of NCBI NO: 15236275 NR Description: putative component of cytochrome B6-F complex; id: At4g03280.1, supported by cDNA: gi_13926181 [Arabidopsis
  misc_feature (1)..(210): Homolog of NCBI NO: 9843639 NR Description: Rieske FeS protein [Arabidopsis thaliana]
  misc_feature (1)..(210): Homolog of NCBI NO: 30679426 NR Description: Rieske FeS protein (component of cytochrome B6-F [Arabidopsis thaliana] >gi|15294210|gb|AAK95282.1|AF410296_1 [Arabidopsis thaliana] >gi|20147273|gb|AAM10350.1|
  misc_feature (1)..(210): Homolog of NCBI NO: 401249 NR Description: Cytochrome B6-F complex iron-sulfur subunit 2,
  misc_feature (1)..(210): Homolog of NCBI NO: 401247 NR Description: Cytochrome B6-F complex iron-sulfur subunit 1,
  misc_feature (1)..(210): Homolog of NCBI NO: 136712 NR Description: Cytochrome B6-F complex iron-sulfur subunit,
  misc_feature (1)..(210): Homolog of NCBI NO: 19999 NR Description: Rieske Fe/S protein of cytochrome b6/f complex
  misc_feature (1)..(210): Homolog of NCBI NO: 136707 NR Description: Cytochrome B6-F complex iron-sulfur subunit,
  misc_feature (1)..(210): Homolog of NCBI NO: 2921504 NR Description: cytochrome B6-F complex iron-sulfur subunit
  misc_feature (1)..(210): Homolog of NCBI NO: 3885886 NR Description: Rieske Fe-S precursor protein [Oryza sativa]

SEQ ID NO: 85544 - protein, 208 aa, Arabidopsis thaliana; identical to SEQ ID NO: 38001
  peptide (1)..(208): Ceres Seq. ID no. 12680938
  misc_feature (92)..(184): Pfam Name: Rieske [2Fe-2S] domain Pfam Description: Rieske [2Fe-2S] domain
  misc_feature (1)..(208): Homolog of NCBI NO: 15236275 NR Description: putative component of cytochrome B6-F complex; id: At4g03280.1, supported by cDNA: gi_13926181 [Arabidopsis
  misc_feature (1)..(208): Homolog of NCBI NO: 9843639 NR Description: Rieske FeS protein [Arabidopsis thaliana]
  misc_feature (1)..(208): Homolog of NCBI NO: 30679426 NR Description: Rieske FeS protein (component of cytochrome B6-F [Arabidopsis thaliana] >gi|15294210|gb|AAK95282.1|AF410296_1 [Arabidopsis thaliana] >gi|20147273|gb|AAM10350.1|
  misc_feature (1)..(208): Homolog of NCBI NO: 401249 NR Description: Cytochrome B6-F complex iron-sulfur subunit 2,
  misc_feature (1)..(208): Homolog of NCBI NO: 401247 NR Description: Cytochrome B6-F complex iron-sulfur subunit 1,
  misc_feature (1)..(208): Homolog of NCBI NO: 136712 NR Description: Cytochrome B6-F complex iron-sulfur subunit,
  misc_feature (1)..(208): Homolog of NCBI NO: 19999 NR Description: Rieske Fe/S protein of cytochrome b6/f complex
  misc_feature (1)..(208): Homolog of NCBI NO: 136707 NR Description: Cytochrome B6-F complex iron-sulfur subunit,
  misc_feature (1)..(208): Homolog of NCBI NO: 2921504 NR Description: cytochrome B6-F complex iron-sulfur subunit
  misc_feature (1)..(208): Homolog of NCBI NO: 3885886 NR Description: Rieske Fe-S precursor protein [Oryza sativa]

SEQ ID NO: 85545 - protein, 197 aa, Arabidopsis thaliana
  peptide (1)..(197): Ceres Seq. ID no. 12680939
  misc_feature (81)..(173): Pfam Name: Rieske [2Fe-2S] domain Pfam Description: Rieske [2Fe-2S] domain
  misc_feature (1)..(197): Homolog of NCBI NO: 15236275 NR Description: putative component of cytochrome B6-F complex; id: At4g03280.1, supported by cDNA: gi_13926181 [Arabidopsis
  misc_feature (1)..(197): Homolog of NCBI NO: 9843639 NR Description: Rieske FeS protein [Arabidopsis thaliana]
  misc_feature (1)..(197): Homolog of NCBI NO: 30679426 NR Description: Rieske FeS protein (component of cytochrome B6-F [Arabidopsis thaliana] >gi|15294210|gb|AAK95282.1|AF410296_1 [Arabidopsis thaliana] >gi|20147273|gb|AAM10350.1|
  misc_feature (1)..(197): Homolog of NCBI NO: 401249 NR Description: Cytochrome B6-F complex iron-sulfur subunit 2,
  misc_feature (1)..(197): Homolog of NCBI NO: 401247 NR Description: Cytochrome B6-F complex iron-sulfur subunit 1,
  misc_feature (1)..(197): Homolog of NCBI NO: 136712 NR Description: Cytochrome B6-F complex iron-sulfur subunit,
  misc_feature (1)..(197): Homolog of NCBI NO: 19999 NR Description: Rieske Fe/S protein of cytochrome b6/f complex
  misc_feature (1)..(197): Homolog of NCBI NO: 136707 NR Description: Cytochrome B6-F complex iron-sulfur subunit,
  misc_feature (1)..(197): Homolog of NCBI NO: 2921504 NR Description: cytochrome B6-F complex iron-sulfur subunit
  misc_feature (1)..(197): Homolog of NCBI NO: 3885886 NR Description: Rieske Fe-S precursor protein [Oryza sativa]
MNHQMVRKEKIGLRISCQASSIPADRVPDMEKRKTLNLLLLGALSLPTGYMLVPYATFFVPPGTGGGGGGTPAKDALGNDVVAAEWLKTHGPGDRTLTQGLKGDPTYLVVENDKTLATYGINAVCTHLGCVVPWNKAENKFLCPCHGSQYNAQGRVVRGPAPLSLALAHADIDEAGKVLFVPWVETDFRTGDAPWWS

SEQ ID NO: 85546 - DNA, 604 bp, Arabidopsis thaliana
  misc_feature (1)..(604): Ceres Seq. ID no. 12680942
  misc_feature: MA Experiment ID: 20000439 Result: Down-regulated in Transcription
  misc_feature: MA Experiment 20000439 PARAMETER Experiment Name: At_Roots__P Parameter: Age (day) Value: 14 vs. 21
  misc_feature: MA Experiment 20000439 PARAMETER Experiment Name: At_Roots__P Parameter: Organism Value: A. thaliana
  misc_feature: MA Experiment 20000439 PARAMETER Experiment Name: At_Roots__P Parameter: Tissue Value: Roots vs. Whole Plant
  misc_feature: MA Experiment ID: 20001905 Result: Down-regulated in Transcription
  misc_feature: MA Experiment 20001905 PARAMETER Experiment Name: At_Drought_Reproduction_P Parameter: Age (day) Value: 40
  misc_feature: MA Experiment 20001905 PARAMETER Experiment Name: At_Drought_Reproduction_P Parameter: Organism Value: A. thaliana
  misc_feature: MA Experiment 20001905 PARAMETER Experiment Name: At_Drought_Reproduction_P Parameter: Plant Line Value: WS
  misc_feature: MA Experiment 20001905 PARAMETER Experiment Name: At_Drought_Reproduction_P Parameter: Timepoint (day) Value: 10
  misc_feature: MA Experiment 20001905 PARAMETER Experiment Name: At_Drought_Reproduction_P Parameter: Tissue Value: Rosettes
  misc_feature: MA Experiment 20001905 PARAMETER Experiment Name: At_Drought_Reproduction_P Parameter: Treatment Value: Drought vs. No Drought
  misc_feature: Pfam Name: Thioredoxin Pfam Description: Thioredoxin
attggttggatcatacacattgtgacaagaaacagttatttggctcatgagagaagaatgttgctttttgtgctttagagtaaacatatcttgattctctataccagcagataacgattttggttatcactagcattgatattctacgattttagatagttcaagtggtcaatgactcgacatgggactctctagttcttaaagcaactgggcctgtagttgtcgacttttgggcaccatggtgtggaccttgcaagatgattgatccgcttgtaaacgatctagcacagcattacactgggaagatcaagttctacaaattaaacactgatgaatctcctaatactcccggccagtacggagttagaagcatcccaacgatcatgatctttgtcggtggcgagaagaaggatacaatcataggtgcagtgcccaaaaccacactcacatctagcctcgacaagttcttgccatgaaatatcacttgtggagtctgtaagatctcgtatctctctgtctctcgttcttgttctcattatctctgtaactcattatcactgaacatctagacctggataaataatatgatgtcatgtcttatgtc

SEQ ID NO: 85547 - protein, 72 aa, Arabidopsis thaliana; identical to SEQ ID NO: 36471
  peptide (1)..(72): Ceres Seq. ID no. 12680943
  misc_feature: Pfam Name: Thioredoxin Pfam Description: Thioredoxin
  misc_feature (1)..(72): Homolog of NCBI NO: 15236327 NR Description: putative M-type thioredoxin; protein id: supported by cDNA: 10950., supported by cDNA: gi_15028102, by cDNA: gi_19310724, supported by cDNA: gi_6539609 [Arabidopsis
  misc_feature (1)..(72): Homolog of NCBI NO: 6539610 NR Description: thioredoxin m2 [Arabidopsis thaliana]
  misc_feature (1)..(72): Homolog of NCBI NO: 21618235 NR Description: putative M-type thioredoxin [Arabidopsis thaliana]
  misc_feature (1)..(71): Homolog of NCBI NO: 11135407 NR Description: Thioredoxin M-type, chloroplast precursor (TRX-M)
  misc_feature (1)..(71): Homolog of NCBI NO: 30678634 NR Description: thioredoxin M-type 1, chloroplast precursor
  misc_feature (1)..(71): Homolog of NCBI NO: 1351239 NR Description: Thioredoxin M-type, chloroplast precursor (TRX-M)
  misc_feature (1)..(71): Homolog of NCBI NO: 1388088 NR Description: thioredoxin m
  misc_feature (1)..(71): Homolog of NCBI NO: 6539614 NR Description: thioredoxin m4 [Arabidopsis thaliana]
  misc_feature (1)..(71): Homolog of NCBI NO: 15232567 NR Description: thioredoxin m4; protein id: At3g15360.1, by cDNA: 42151., supported by cDNA: gi_14030704, supported by gi_16974518, supported by cDNA: gi_6539613 [Arabidopsis thaliana]
  misc_feature (1)..(71): Homolog of NCBI NO: 21354 NR Description: thioredoxin M precursor (AA -67 to 114) [Spinacia

SEQ ID NO: 85548 - DNA, 1693 bp, Arabidopsis thaliana
  misc_feature (1)..(1693): Ceres Seq. ID no. 12681009
  misc_feature: MA Experiment ID: 108434 Result: Up-regulated in Transcription
  misc_feature: MA Experiment 108434 PARAMETER Experiment Name: At_Root_Tips_cDNA_P Parameter: Tissue Value: Root Tips
  misc_feature: MA Experiment ID: 108435 Result: Up-regulated in Transcription
  misc_feature: MA Experiment 108435 PARAMETER Experiment Name: At_stm_Mutants_cDNA_P Parameter: Plant Line Value: wt Landsburg vs stm
  misc_feature: MA Experiment 108435 PARAMETER Experiment Name: At_stm_Mutants_cDNA_P Parameter: Tissue Value: Shoot Apical Meristem Region
  misc_feature: MA Experiment ID: 108461 Result: Down-regulated in Transcription
  misc_feature: MA Experiment 108461 PARAMETER Experiment Name: At_Germinating_Seeds_cDNA_P Parameter: Age (day) Value: 1 vs. 0
  misc_feature: MA Experiment 108461 PARAMETER Experiment Name: At_Germinating_Seeds_cDNA_P Parameter: Tissue Value: Germinating Seeds
  misc_feature: MA Experiment ID: 108462 Result: Down-regulated in Transcription
  misc_feature: MA Experiment 108462 PARAMETER Experiment Name: At_Germinating_Seeds_cDNA_P Parameter: Age (day) Value: 2 vs. 0
  misc_feature: MA Experiment 108462 PARAMETER Experiment Name: At_Germinating_Seeds_cDNA_P Parameter: Tissue Value: Germinating Seeds
  misc_feature: MA Experiment ID: 108463 Result: Down-regulated in Transcription
  misc_feature: MA Experiment 108463 PARAMETER Experiment Name: At_Germinating_Seeds_cDNA_P Parameter: Age (day) Value: 3 vs. 0
  misc_feature: MA Experiment 108463 PARAMETER Experiment Name: At_Germinating_Seeds_cDNA_P Parameter: Tissue Value: Germinating Seeds
  misc_feature: MA Experiment ID: 108464 Result: Down-regulated in Transcription
  misc_feature: MA Experiment 108464 PARAMETER Experiment Name: At_Germinating_Seeds_cDNA_P Parameter: Age (day) Value: 4 vs. 0
  misc_feature: MA Experiment 108464 PARAMETER Experiment Name: At_Germinating_Seeds_cDNA_P Parameter: Tissue Value: Germinating Seeds
  misc_feature: MA Experiment ID: 20000180 Result: Down-regulated in Transcription
  misc_feature: MA Experiment 20000180 PARAMETER Experiment Name: At_Germinating_Seeds_P Parameter: Age (hr) Value: 24 vs. 0
  misc_feature: MA Experiment 20000180 PARAMETER Experiment Name: At_Germinating_Seeds_P Parameter: Tissue Value: Germinating Seeds
  misc_feature: MA Experiment ID: 20001558 Result: Up-regulated in Transcription
  misc_feature: MA Experiment 20001558 PARAMETER Experiment Name: At_Drought_Soil_Dry_P Parameter: Age (day) Value: 27
  misc_feature: MA Experiment 20001558 PARAMETER Experiment Name: At_Drought_Soil_Dry_P Parameter: Organism Value: A. thaliana
  misc_feature: MA Experiment 20001558 PARAMETER Experiment Name: At_Drought_Soil_Dry_P Parameter: Plant Line Value: WS
  misc_feature: MA Experiment 20001558 PARAMETER Experiment Name: At_Drought_Soil_Dry_P Parameter: Post Timepoint (hr) Value: 6
  misc_feature: MA Experiment 20001558 PARAMETER Experiment Name: At_Drought_Soil_Dry_P Parameter: Post-Treatment Value: Re-Water vs. No Drought
  misc_feature: MA Experiment 20001558 PARAMETER Experiment Name: At_Drought_Soil_Dry_P Parameter: Timepoint (day) Value: 13
  misc_feature: MA Experiment 20001558 PARAMETER Experiment Name: At_Drought_Soil_Dry_P Parameter: Treatment Value: Drought vs. No Drought
gattcattctcttcagtcagagatttcgaaaccctagtcgatttcgagatccaaccaactctgctccttatctcagcttgttgaatttgcgaagtatgggagacgctagagacaacgaagcctacgaggaggagctcttggactatgaagaagaagacgagaaggtcccagattctggaaacaaagttaacggtgaagccgtgaaaaaagggtacgtgggaatacacagttctggattcagagacttccttttaaaaccggagcttctcagagctattgttgactctggatttgaacatccatctgaagtgcaacatgaatgtatccctcaagctatcttgggcatggatgtcatctgccaagcaaagtctggtatggggaagactgctgtgtttgtcctgtctactctacaacagattgaaccatctcctggccaggtttctgcacttgtcttgtgccatacaagagagctagcttaccagatctgcaatgagtttgtgcgattcagtacctatctgcctgatacaaaggtttcggtgttctatggtggagtcaacattaaaattcacaaagacttgctgaagaatgaatgtcctcacattgttgttggtacccctggtcgggtgcttgcacttgccagggagaaagatctctctttgaagaatgtgaggcattttattcttgatgaatgtgataaaatgctcgagtcacttgacatgcgaagggatgtgcaggagattttcaagatgactcctcatgacaaacaagtaatgatgttctcagcaacgctcagcaaagagatacgcccagtctgcaaaaaatttatgcaagatccaatggaaatatatgtcgatgatgaagccaagttgactcttcatgggcttgtccagcactatatcaaactgagcgagatggagaaaacccggaagttgaatgaccttcttgatgcgttggacttcaatcaagttgtcatttttgtgaagagcgtgagcagggctgctgagctgaacaagttactggtggaatgcaatttcccctcaatatgcatccactctggaatgtctcaagaagagaggttgactcgatacaaaagtttcaaggaagggcacaaaaggatccttgtggcgactgacttggtaggaagagggattgacattgagcgtgtcaacattgtcatcaactatgacatgccagattctgctgatacctatcttcacagggttggcagagctggtagatttggaaccaagggtcttgcaatcacatttgttgcatctgcttcagattcagaggttcttaaccaggtacaagagaggtttgaggttgatataaaggaacttccggagcagattgatacttcaacctacatgccttcttaaacaagtagcacgtccctcaggaaagaagctcttcagatttcaaccttgtaggtgttcaaagggtcatgggggttcacaactatctctcgctccgtttgttttagtgttttctatgacgacatttttttccatatgtttagaacgtctgttgtactctttaaaggagattcgagtcactctccaaatcgcacagttaaaagctgtccagttttttgtacaagagattattatgtttgaaatatcaggatttagtctcgacctgattactgtgttccttaggaatcgatctattatcaatttatcatggtgttgct

SEQ ID NO: 85549 - protein, 458 aa, Arabidopsis thaliana
  peptide (1)..(458): Ceres Seq. ID no. 12681010
  misc_feature (90)..(297): Pfam Name: DEAD/DEAH box helicase Pfam Description: DEAD/DEAH box helicase
  misc_feature (8)..(458): Homolog of NCBI NO: 11358797 NR Description: RNA helicase RH15 [imported] - Arabidopsis (fragment) >gi|3776005|emb|CAA09205.1| RNA helicase [Arabidopsis
  misc_feature (32)..(458): Homolog of NCBI NO: 18416486 NR Description: DEAD/DEAH box RNA helicase, putative; protein id:
  misc_feature (32)..(458): Homolog of NCBI NO: 18416493 NR Description: DEAD/DEAH box RNA helicase, putative; protein id: supported by cDNA: gi_14190380, supported by cDNA: gi_16323359 thaliana] >gi|14190381|gb|AAK55671.1|AF378868_1
  misc_feature (32)..(455): Homolog of NCBI NO: 8953379 NR Description: DEAD BOX RNA helicase RH15-like protein
  misc_feature (32)..(455): Homolog of NCBI NO: 8953382 NR Description: DEAD BOX RNA helicase RH15 [Arabidopsis thaliana]
  misc_feature (34)..(458): Homolog of NCBI NO: 34913862 NR Description: putative DEAD BOX RNA helicase [Oryza sativa
  misc_feature (37)..(456): Homolog of NCBI NO: 28278325 NR Description: Unknown (protein for MGC:55433) [Danio rerio]
  misc_feature (42)..(456): Homolog of NCBI NO: 16758334 NR Description: nuclear RNA helicase, DECD variant of DEAD box [Rattus norvegicus] >gi|3132829|gb|AAC16391.1| nuclear RNA
  misc_feature (42)..(277): Homolog of NCBI NO: 21040373 NR Description: DEAD/H (Asp-Glu-Ala-Asp/His) box polypeptide 39, >gi|14714632|gb|AAH10455.1|AAH10455 Unknown (protein for
  misc_feature (47)..(451): Homolog of NCBI NO: 29246670 NR Description: GLP_15_13424_14974 [Giardia lamblia ATCC 50803]
FILFSQRFRNPSRFRDPTNSAPYLSLLNLRSMGDARDNEAYEEELLDYEEEDEKVPDSGNKVNGEAVKKGYVGIHSSGFRDFLLKPELLRAIVDSGFEHPSEVQHECIPQAILGMDVICQAKSGMGKTAVFVLSTLQQIEPSPGQVSALVLCHTRELAYQICNEFVRFSTYLPDTKVSVFYGGVNIKIHKDLLKNECPHIVVGTPGRVLALAREKDLSLKNVRHFILDECDKMLESLDMRRDVQEIFKMTPHDKQVMMFSATLSKEIRPVCKKFMQDPMEIYVDDEAKLTLHGLVQHYIKLSEMEKTRKLNDLLDALDFNQVVIFVKSVSRAAELNKLLVECNFPSICIHSGMSQEERLTRYKSFKEGHKRILVATDLVGRGIDIERVNIVINYDMPDSADTYLHRVGRAGRFGTKGLAITFVASASDSEVLNQVQERFEVDIKELPEQIDTSTYMPS

SEQ ID NO: 85550 - protein, 427 aa, Arabidopsis thaliana
  peptide (1)..(427): Ceres Seq. ID no. 12681011
  misc_feature (59)..(266): Pfam Name: DEAD/DEAH box helicase Pfam Description: DEAD/DEAH box helicase
  misc_feature (1)..(427): Homolog of NCBI NO: 11358797 NR Description: RNA helicase RH15 [imported] - Arabidopsis (fragment) >gi|3776005|emb|CAA09205.1| RNA helicase [Arabidopsis
  misc_feature (1)..(427): Homolog of NCBI NO: 18416486 NR Description: DEAD/DEAH box RNA helicase, putative; protein id:
  misc_feature (1)..(427): Homolog of NCBI NO: 18416493 NR Description: DEAD/DEAH box RNA helicase, putative; protein id: supported by cDNA: gi_14190380, supported by cDNA: gi_16323359 thaliana] >gi|14190381|gb|AAK55671.1|AF378868_1
  misc_feature (1)..(424): Homolog of NCBI NO: 8953379 NR Description: DEAD BOX RNA helicase RH15-like protein
  misc_feature (1)..(424): Homolog of NCBI NO: 8953382 NR Description: DEAD BOX RNA helicase RH15 [Arabidopsis thaliana]
  misc_feature (3)..(427): Homolog of NCBI NO: 34913862 NR Description: putative DEAD BOX RNA helicase [Oryza sativa
  misc_feature (6)..(425): Homolog of NCBI NO: 28278325 NR Description: Unknown (protein for MGC:55433) [Danio rerio]
  misc_feature (11)..(425): Homolog of NCBI NO: 16758334 NR Description: nuclear RNA helicase, DECD variant of DEAD box [Rattus norvegicus] >gi|3132829|gb|AAC16391.1| nuclear RNA
  misc_feature (11)..(246): Homolog of NCBI NO: 21040373 NR Description: DEAD/H (Asp-Glu-Ala-Asp/His) box polypeptide 39, >gi|14714632|gb|AAH10455.1|AAH10455 Unknown (protein for
  misc_feature (16)..(420): Homolog of NCBI NO: 29246670 NR Description: GLP_15_13424_14974 [Giardia lamblia ATCC 50803]
MGDARDNEAYEEELLDYEEEDEKVPDSGNKVNGEAVKKGYVGIHSSGFRDFLLKPELLRAIVDSGFEHPSEVQHECIPQAILGMDVICQAKSGMGKTAVFVLSTLQQIEPSPGQVSALVLCHTRELAYQICNEFVRFSTYLPDTKVSVFYGGVNIKIHKDLLKNECPHIVVGTPGRVLALAREKDLSLKNVRHFILDECDKMLESLDMRRDVQEIFKMTPHDKQVMMFSATLSKEIRPVCKKFMQDPMEIYVDDEAKLTLHGLVQHYIKLSEMEKTRKLNDLLDALDFNQVVIFVKSVSRAAELNKLLVECNFPSICIHSGMSQEERLTRYKSFKEGHKRILVATDLVGRGIDIERVNIVINYDMPDSADTYLHRVGRAGRFGTKGLAITFVASASDSEVLNQVQERFEVDIKELPEQIDTSTYMPS

SEQ ID NO: 85551 - protein, 344 aa, Arabidopsis thaliana
  peptide (1)..(344): Ceres Seq. ID no. 12681012
  misc_feature (1)..(183): Pfam Name: DEAD/DEAH box helicase Pfam Description: DEAD/DEAH box helicase
  misc_feature (1)..(344): Homolog of NCBI NO: 11358797 NR Description: RNA helicase RH15 [imported] - Arabidopsis (fragment) >gi|3776005|emb|CAA09205.1| RNA helicase [Arabidopsis
  misc_feature (1)..(344): Homolog of NCBI NO: 18416486 NR Description: DEAD/DEAH box RNA helicase, putative; protein id:
  misc_feature (1)..(344): Homolog of NCBI NO: 18416493 NR Description: DEAD/DEAH box RNA helicase, putative; protein id: supported by cDNA: gi_14190380, supported by cDNA: gi_16323359 thaliana] >gi|14190381|gb|AAK55671.1|AF378868_1
  misc_feature (1)..(341): Homolog of NCBI NO: 8953379 NR Description: DEAD BOX RNA helicase RH15-like protein
  misc_feature (1)..(341): Homolog of NCBI NO: 8953382 NR Description: DEAD BOX RNA helicase RH15 [Arabidopsis thaliana]
  misc_feature (1)..(344): Homolog of NCBI NO: 34913862 NR Description: putative DEAD BOX RNA helicase [Oryza sativa
  misc_feature (1)..(342): Homolog of NCBI NO: 28278325 NR Description: Unknown (protein for MGC:55433) [Danio rerio]
  misc_feature (1)..(342): Homolog of NCBI NO: 16758334 NR Description: nuclear RNA helicase, DECD variant of DEAD box [Rattus norvegicus] >gi|3132829|gb|AAC16391.1| nuclear RNA
  misc_feature (1)..(163): Homolog of NCBI NO: 21040373 NR Description: DEAD/H (Asp-Glu-Ala-Asp/His) box polypeptide 39, >gi|14714632|gb|AAH10455.1|AAH10455 Unknown (protein for
  misc_feature (1)..(337): Homolog of NCBI NO: 29246670 NR Description: GLP_15_13424_14974 [Giardia lamblia ATCC 50803]
MDVICQAKSGMGKTAVFVLSTLQQIEPSPGQVSALVLCHTRELAYQICNEFVRFSTYLPDTKVSVFYGGVNIKIHKDLLKNECPHIVVGTPGRVLALAREKDLSLKNVRHFILDECDKMLESLDMRRDVQEIFKMTPHDKQVMMFSATLSKEIRPVCKKFMQDPMEIYVDDEAKLTLHGLVQHYIKLSEMEKTRKLNDLLDALDFNQVVIFVKSVSRAAELNKLLVECNFPSICIHSGMSQEERLTRYKSFKEGHKRILVATDLVGRGIDIERVNIVINYDMPDSADTYLHRVGRAGRFGTKGLAITFVASASDSEVLNQVQERFEVDIKELPEQIDTSTYMPS

SEQ ID NO: 85552 - DNA, 2770 bp, Arabidopsis thaliana
  misc_feature (1)..(2770): Ceres Seq. ID no. 12681035
  misc_feature: MA Experiment ID: 108462 Result: Up-regulated in Transcription
  misc_feature: MA Experiment 108462 PARAMETER Experiment Name: At_Germinating_Seeds_cDNA_P Parameter: Age (day) Value: 2 vs. 0
  misc_feature: MA Experiment 108462 PARAMETER Experiment Name: At_Germinating_Seeds_cDNA_P Parameter: Tissue Value: Germinating Seeds
  misc_feature: MA Experiment ID: 108463 Result: Up-regulated in Transcription
  misc_feature: MA Experiment 108463 PARAMETER Experiment Name: At_Germinating_Seeds_cDNA_P Parameter: Age (day) Value: 3 vs. 0
  misc_feature: MA Experiment 108463 PARAMETER Experiment Name: At_Germinating_Seeds_cDNA_P Parameter: Tissue Value: Germinating Seeds
  misc_feature: MA Experiment ID: 108464 Result: Up-regulated in Transcription
  misc_feature: MA Experiment 108464 PARAMETER Experiment Name: At_Germinating_Seeds_cDNA_P Parameter: Age (day) Value: 4 vs. 0
  misc_feature: MA Experiment 108464 PARAMETER Experiment Name: At_Germinating_Seeds_cDNA_P Parameter: Tissue Value: Germinating Seeds
  misc_feature: MA Experiment ID: 108488 Result: Down-regulated in Transcription
  misc_feature: MA Experiment ID: 108561 Result: Up-regulated in Transcription
  misc_feature: MA Experiment 108561 PARAMETER Experiment Name: At_100uM_ABA_cDNA_P Parameter: Timepoint (hr) Value: 6
  misc_feature: MA Experiment 108561 PARAMETER Experiment Name: At_100uM_ABA_cDNA_P Parameter: Tissue Value: Aerial
  misc_feature: MA Experiment 108561 PARAMETER Experiment Name: At_100uM_ABA_cDNA_P Parameter: Treatment Value: 100uM ABA vs. No Treatment
  misc_feature: MA Experiment ID: 108573 Result: Up-regulated in Transcription
  misc_feature: MA Experiment 108573 PARAMETER Experiment Name: At_Drought_cDNA_P Parameter: Timepoint (hr) Value: 6
  misc_feature: MA Experiment 108573 PARAMETER Experiment Name: At_Drought_cDNA_P Parameter: Tissue Value: Aerial
  misc_feature: MA Experiment 108573 PARAMETER Experiment Name: At_Drought_cDNA_P Parameter: Treatment Value: Drought vs. No Drought
  misc_feature: MA Experiment ID: 108605 Result: Up-regulated in Transcription
  misc_feature: MA Experiment 108605 PARAMETER Experiment Name: At_100uM_ABA_cDNA_P Parameter: Timepoint (hr) Value: 6
  misc_feature: MA Experiment 108605 PARAMETER Experiment Name: At_100uM_ABA_cDNA_P Parameter: Tissue Value: Aerial
  misc_feature: MA Experiment 108605 PARAMETER Experiment Name: At_100uM_ABA_cDNA_P Parameter: Treatment Value: 100uM ABA vs. No Treatment
  misc_feature: MA Experiment ID: 108607 Result: Up-regulated in Transcription
  misc_feature: MA Experiment 108607 PARAMETER Experiment Name: At_100uM_ABA_cDNA_P Parameter: Timepoint (hr) Value: 4
  misc_feature: MA Experiment 108607 PARAMETER Experiment Name: At_100uM_ABA_cDNA_P Parameter: Tissue Value: Aerial
  misc_feature: MA Experiment 108607 PARAMETER Experiment Name: At_100uM_ABA_cDNA_P Parameter: Treatment Value: 100uM ABA vs. No Treatment
  misc_feature: MA Experiment ID: 108609 Result: Up-regulated in Transcription
  misc_feature: MA Experiment 108609 PARAMETER Experiment Name: At_100uM_ABA_cDNA_P Parameter: Timepoint (hr) Value: 24
  misc_feature: MA Experiment 108609 PARAMETER Experiment Name: At_100uM_ABA_cDNA_P Parameter: Tissue Value: Aerial
  misc_feature: MA Experiment 108609 PARAMETER Experiment Name: At_100uM_ABA_cDNA_P Parameter: Treatment Value: 100uM ABA vs. No Treatment
  misc_feature: MA Experiment ID: 20000069 Result: Up-regulated in Transcription
  misc_feature: MA Experiment 20000069 PARAMETER Experiment Name: At_100uM_ABA_Mutants_cDNA_P Parameter: Plant Line Value: CS23
  misc_feature: MA Experiment 20000069 PARAMETER Experiment Name: At_100uM_ABA_Mutants_cDNA_P Parameter: Timepoint (hr) Value: 6
  misc_feature: MA Experiment 20000069 PARAMETER Experiment Name: At_100uM_ABA_Mutants_cDNA_P Parameter: Tissue Value: Aerial
  misc_feature: MA Experiment 20000069 PARAMETER Experiment Name: At_100uM_ABA_Mutants_cDNA_P Parameter: Treatment Value: 100uM ABA vs. No Treatment
  misc_feature: MA Experiment ID: 20000070 Result: Up-regulated in Transcription
  misc_feature: MA Experiment 20000070 PARAMETER Experiment Name: At_100uM_ABA_Mutants_cDNA_P Parameter: Plant Line Value: CS24
  misc_feature: MA Experiment 20000070 PARAMETER Experiment Name: At_100uM_ABA_Mutants_cDNA_P Parameter: Timepoint (hr) Value: 6
  misc_feature: MA Experiment 20000070 PARAMETER Experiment Name: At_100uM_ABA_Mutants_cDNA_P Parameter: Tissue Value: Aerial
  misc_feature: MA Experiment 20000070 PARAMETER Experiment Name: At_100uM_ABA_Mutants_cDNA_P Parameter: Treatment Value: 100uM ABA vs. No Treatment
  misc_feature: MA Experiment ID: 20000072 Result: Up-regulated in Transcription
  misc_feature: MA Experiment 20000072 PARAMETER Experiment Name: At_100uM_ABA_Mutants_cDNA_P Parameter: Plant Line Value: CS8105
  misc_feature: MA Experiment 20000072 PARAMETER Experiment Name: At_100uM_ABA_Mutants_cDNA_P Parameter: Timepoint (hr) Value: 6
  misc_feature: MA Experiment 20000072 PARAMETER Experiment Name: At_100uM_ABA_Mutants_cDNA_P Parameter: Tissue Value: Aerial
  misc_feature: MA Experiment 20000072 PARAMETER Experiment Name: At_100uM_ABA_Mutants_cDNA_P Parameter: Treatment Value: 100uM ABA vs. No Treatment
  misc_feature: MA Experiment ID: 20000086 Result: Up-regulated in Transcription
  misc_feature: MA Experiment 20000086 PARAMETER Experiment Name: At_100uM_ABA_Mutants_cDNA_P Parameter: Plant Line Value: CS22
  misc_feature: MA Experiment 20000086 PARAMETER Experiment Name: At_100uM_ABA_Mutants_cDNA_P Parameter: Timepoint (hr) Value: 6
  misc_feature: MA Experiment 20000086 PARAMETER Experiment Name: At_100uM_ABA_Mutants_cDNA_P Parameter: Tissue Value: Aerial
  misc_feature: MA Experiment 20000086 PARAMETER Experiment Name: At_100uM_ABA_Mutants_cDNA_P Parameter: Treatment Value: 100uM ABA vs. No Treatment
  misc_feature: MA Experiment ID: 20000087 Result: Up-regulated in Transcription
  misc_feature: MA Experiment 20000087 PARAMETER Experiment Name: At_100uM_ABA_Mutants_cDNA_P Parameter: Plant Line Value: WS
  misc_feature: MA Experiment 20000087 PARAMETER Experiment Name: At_100uM_ABA_Mutants_cDNA_P Parameter: Timepoint (hr) Value: 6
  misc_feature: MA Experiment 20000087 PARAMETER Experiment Name: At_100uM_ABA_Mutants_cDNA_P Parameter: Tissue Value: Aerial
  misc_feature: MA Experiment 20000087 PARAMETER Experiment Name: At_100uM_ABA_Mutants_cDNA_P Parameter: Treatment Value: 100uM ABA vs. No Treatment
  misc_feature: MA Experiment ID: 20000088 Result: Up-regulated in Transcription
  misc_feature: MA Experiment 20000088 PARAMETER Experiment Name: At_100uM_ABA_Mutants_cDNA_P Parameter: Plant Line Value: Landsberg
  misc_feature: MA Experiment 20000088 PARAMETER Experiment Name: At_100uM_ABA_Mutants_cDNA_P Parameter: Timepoint (hr) Value: 6
  misc_feature: MA Experiment 20000088 PARAMETER Experiment Name: At_100uM_ABA_Mutants_cDNA_P Parameter: Tissue Value: Aerial
  misc_feature: MA Experiment 20000088 PARAMETER Experiment Name: At_100uM_ABA_Mutants_cDNA_P Parameter: Treatment Value: 100uM ABA vs. No Treatment
  misc_feature: MA Experiment ID: 20000111 Result: Down-regulated in Transcription
  misc_feature: MA Experiment 20000111 PARAMETER Experiment Name: At_42deg_Heat_cDNA_P Parameter: Temperature (deg C) Value: 42 vs. 22
  misc_feature: MA Experiment 20000111 PARAMETER Experiment Name: At_42deg_Heat_cDNA_P Parameter: Timepoint (hr) Value: 6
  misc_feature: MA Experiment 20000111 PARAMETER Experiment Name: At_42deg_Heat_cDNA_P Parameter: Tissue Value: Aerial
  misc_feature: MA Experiment ID: 20000113 Result: Down-regulated in Transcription
  misc_feature: MA Experiment 20000113 PARAMETER Experiment Name: At_42deg_Heat_cDNA_P Parameter: Temperature (deg C) Value: 42 vs. 22
  misc_feature: MA Experiment 20000113 PARAMETER Experiment Name: At_42deg_Heat_cDNA_P Parameter: Timepoint (hr) Value: 8
  misc_feature: MA Experiment 20000113 PARAMETER Experiment Name: At_42deg_Heat_cDNA_P Parameter: Tissue Value: Aerial
  misc_feature: MA Experiment ID: 20000117 Result: Up-regulated in Transcription
  misc_feature: MA Experiment 20000117 PARAMETER Experiment Name: At_100uM_ABA_Mutants_cDNA_P Parameter: Plant Line Value: Columbia
  misc_feature: MA Experiment 20000117 PARAMETER Experiment Name: At_100uM_ABA_Mutants_cDNA_P Parameter: Timepoint (hr) Value: 6
  misc_feature: MA Experiment 20000117 PARAMETER Experiment Name: At_100uM_ABA_Mutants_cDNA_P Parameter: Tissue Value: Aerial
  misc_feature: MA Experiment 20000117 PARAMETER Experiment Name: At_100uM_ABA_Mutants_cDNA_P Parameter: Treatment Value: 100uM ABA vs. No Treatment
  misc_feature: MA Experiment ID: 20000169 Result: Up-regulated in Transcription
  misc_feature: MA Experiment 20000169 PARAMETER Experiment Name: At_100uM_ABA_P Parameter: Age (day) Value: 14
  misc_feature: MA Experiment 20000169 PARAMETER Experiment Name: At_100uM_ABA_P Parameter: Organism Value: A. thaliana
  misc_feature: MA Experiment 20000169 PARAMETER Experiment Name: At_100uM_ABA_P Parameter: Plant Line Value: WS
  misc_feature: MA Experiment 20000169 PARAMETER Experiment Name: At_100uM_ABA_P Parameter: Timepoint (hr) Value: 6
  misc_feature: MA Experiment 20000169 PARAMETER Experiment Name: At_100uM_ABA_P Parameter: Tissue Value: Aerial
  misc_feature: MA Experiment 20000169 PARAMETER Experiment Name: At_100uM_ABA_P Parameter: Treatment Value: 100uM ABA vs. No Treatment
  misc_feature: MA Experiment ID: 20000171 Result: Down-regulated in Transcription
  misc_feature: MA Experiment 20000171 PARAMETER Experiment Name: At_42deg_Heat_P Parameter: Age (day) Value: 14
  misc_feature: MA Experiment 20000171 PARAMETER Experiment Name: At_42deg_Heat_P Parameter: Organism Value: A. thaliana
  misc_feature: MA Experiment 20000171 PARAMETER Experiment Name: At_42deg_Heat_P Parameter: Plant Line Value: WS
  misc_feature: MA Experiment 20000171 PARAMETER Experiment Name: At_42deg_Heat_P Parameter: Temperature (deg C) Value: 42 vs. 22
  misc_feature: MA Experiment 20000171 PARAMETER Experiment Name: At_42deg_Heat_P Parameter: Timepoint (hr) Value: 1
  misc_feature: MA Experiment 20000171 PARAMETER Experiment Name: At_42deg_Heat_P Parameter: Tissue Value: Aerial
  misc_feature: MA Experiment ID: 20000267 Result: Up-regulated in Transcription
  misc_feature: MA Experiment 20000267 PARAMETER Experiment Name: At_Drought_P Parameter: Age (day) Value: 7
  misc_feature: MA Experiment 20000267 PARAMETER Experiment Name: At_Drought_P Parameter: Organism Value: A. thaliana
  misc_feature: MA Experiment 20000267 PARAMETER Experiment Name: At_Drought_P Parameter: Plant Line Value: WS
  misc_feature: MA Experiment 20000267 PARAMETER Experiment Name: At_Drought_P Parameter: Timepoint (hr) Value: 6
  misc_feature: MA Experiment 20000267 PARAMETER Experiment Name: At_Drought_P Parameter: Tissue Value: Whole Plant
  misc_feature: MA Experiment 20000267 PARAMETER Experiment Name: At_Drought_P Parameter: Treatment Value: Drought vs. No Drought
  misc_feature: MA Experiment ID: 20000436 Result: Up-regulated in Transcription
  misc_feature: MA Experiment 20000436 PARAMETER Experiment Name: At_Drought_P Parameter: Age (day) Value: 7
  misc_feature: MA Experiment 20000436 PARAMETER Experiment Name: At_Drought_P Parameter: Organism Value: A. thaliana
  misc_feature: MA Experiment 20000436 PARAMETER Experiment Name: At_Drought_P Parameter: Plant Line Value: WS
  misc_feature: MA Experiment 20000436 PARAMETER Experiment Name: At_Drought_P Parameter: Timepoint (hr) Value: 12
  misc_feature: MA Experiment 20000436 PARAMETER Experiment Name: At_Drought_P Parameter: Tissue Value: Whole Plant
  misc_feature: MA Experiment 20000436 PARAMETER Experiment Name: At_Drought_P Parameter: Treatment Value: Drought vs. No Drought
  misc_feature: MA Experiment ID: 20000437 Result: Up-regulated in Transcription
  misc_feature: MA Experiment 20000437 PARAMETER Experiment Name: At_Drought_P Parameter: Age (day) Value: 8
  misc_feature: MA Experiment 20000437 PARAMETER Experiment Name: At_Drought_P Parameter: Organism Value: A. thaliana
  misc_feature: MA Experiment 20000437 PARAMETER Experiment Name: At_Drought_P Parameter: Plant Line Value: WS
  misc_feature: MA Experiment 20000437 PARAMETER Experiment Name: At_Drought_P Parameter: Timepoint (hr) Value: 24
  misc_feature: MA Experiment 20000437 PARAMETER Experiment Name: At_Drought_P Parameter: Tissue Value: Whole Plant
  misc_feature: MA Experiment 20000437 PARAMETER Experiment Name: At_Drought_P Parameter: Treatment Value: Drought vs. No Drought
  misc_feature: MA Experiment ID: 20000453 Result: Up-regulated in Transcription
  misc_feature: MA Experiment 20000453 PARAMETER Experiment Name: At_100uM_ABA_P Parameter: Age (day) Value: 15
  misc_feature: MA Experiment 20000453 PARAMETER Experiment Name: At_100uM_ABA_P Parameter: Organism Value: A. thaliana
  misc_feature: MA Experiment 20000453 PARAMETER Experiment Name: At_100uM_ABA_P Parameter: Plant Line Value: WS
  misc_feature: MA Experiment 20000453 PARAMETER Experiment Name: At_100uM_ABA_P Parameter: Timepoint (hr) Value: 24
  misc_feature: MA Experiment 20000453 PARAMETER Experiment Name: At_100uM_ABA_P Parameter: Tissue Value: Aerial
  misc_feature: MA Experiment 20000453 PARAMETER Experiment Name: At_100uM_ABA_P Parameter: Treatment Value: 100uM ABA vs. No Treatment
  misc_feature: MA Experiment ID: 20001757 Result: Down-regulated in Transcription
  misc_feature: MA Experiment 20001757 PARAMETER Experiment Name: At_50mM_NH4NO3_L-to-H_P Parameter: Timepoint (hr) Value: 6
  misc_feature: MA Experiment 20001757 PARAMETER Experiment Name: At_50mM_NH4NO3_L-to-H_P Parameter: Tissue Value: Leaf
  misc_feature: MA Experiment 20001757 PARAMETER Experiment Name: At_50mM_NH4NO3_L-to-H_P Parameter: Treatment Value: 50mM NH4NO3 vs 100mM Mannitol
  misc_feature: MA Experiment ID: 20001905 Result: Up-regulated in Transcription
  misc_feature: MA Experiment 20001905 PARAMETER Experiment Name: At_Drought_Reproduction_P Parameter: Age (day) Value: 40
  misc_feature: MA Experiment 20001905 PARAMETER Experiment Name: At_Drought_Reproduction_P Parameter: Organism Value: A. thaliana
  misc_feature: MA Experiment 20001905 PARAMETER Experiment Name: At_Drought_Reproduction_P Parameter: Plant Line Value: WS
  misc_feature: MA Experiment 20001905 PARAMETER Experiment Name: At_Drought_Reproduction_P Parameter: Timepoint (day) Value: 10
  misc_feature: MA Experiment 20001905 PARAMETER Experiment Name: At_Drought_Reproduction_P Parameter: Tissue Value: Rosettes
  misc_feature: MA Experiment 20001905 PARAMETER Experiment Name: At_Drought_Reproduction_P Parameter: Treatment Value: Drought vs. No Drought
  misc_feature: MA Experiment ID: 20001906 Result: Up-regulated in Transcription
  misc_feature: MA Experiment 20001906 PARAMETER Experiment Name: At_Drought_Reproduction_P Parameter: Age (day) Value: 35
  misc_feature: MA Experiment 20001906 PARAMETER Experiment Name: At_Drought_Reproduction_P Parameter: Organism Value: A. thaliana
  misc_feature: MA Experiment 20001906 PARAMETER Experiment Name: At_Drought_Reproduction_P Parameter: Plant Line Value: WS
  misc_feature: MA Experiment 20001906 PARAMETER Experiment Name: At_Drought_Reproduction_P Parameter: Timepoint (day) Value: 5
  misc_feature: MA Experiment 20001906 PARAMETER Experiment Name: At_Drought_Reproduction_P Parameter: Tissue Value: Siliques
  misc_feature: MA Experiment 20001906 PARAMETER Experiment Name: At_Drought_Reproduction_P Parameter: Treatment Value: Drought vs. No Drought
  misc_feature: MA Experiment ID: 20001908 Result: Up-regulated in Transcription
  misc_feature: MA Experiment 20001908 PARAMETER Experiment Name: At_Drought_Reproduction_P Parameter: Age (day) Value: 40
  misc_feature: MA Experiment 20001908 PARAMETER Experiment Name: At_Drought_Reproduction_P Parameter: Organism Value: A. thaliana
  misc_feature: MA Experiment 20001908 PARAMETER Experiment Name: At_Drought_Reproduction_P Parameter: Plant Line Value: WS
  misc_feature: MA Experiment 20001908 PARAMETER Experiment Name: At_Drought_Reproduction_P Parameter: Timepoint (day) Value: 10
  misc_feature: MA Experiment 20001908 PARAMETER Experiment Name: At_Drought_Reproduction_P Parameter: Tissue Value: Siliques
  misc_feature: MA Experiment 20001908 PARAMETER Experiment Name: At_Drought_Reproduction_P Parameter: Treatment Value: Drought vs. No Drought
gtaaccatggcggagaaagtatcggaggacgttatgcttctacacggtgacctcgatttgaaaattgttaaggctaggaggttacctaacatggatatgttctcagaacatttgcgccgtctcttcaccgcctgtaacgcctgtgctagacccaccgataccgatgatgtcgatcccagagataaaggcgaattcggtgataaaaacatccgtagccaccgtaaggttatcaccagcgatccttacgtcaccgtcgtcgttcctcaagcgactctagctcgaacacgtgttttgaaaaactcacaagagcctctttgggacgagaaattcaacatttctatagcgcatccgtttgcttatctcgagttccaggtcaaagacgacgatgttttcggtgctcaaatcattggcacggctaagatcccggttcgagacatcgcatcgggagaacgcatttctggttggtttcctgtactcggtgcttcgggaaaaccgcctaaggcagaaactgctattttcatcgatatgaaatttactccgtttgaccagatccatagctaccgatgtggaatcgccggagatccggagcgtaggggtgttagacggacttatttccctgtgaggaaaggaagtcaggtgaggctttaccaggacgctcatgttatggacggaacgttgccggcgattgggttagataacgggaaagtttatgagcatgggaagtgttgggaagatatatgttatgctatatctgaggctcaccatatgatttacattgttggttggtctatcttccataagattaagcttgttagggaaacaaaagttccaagagataaggatatgacgcttggggaattgctcaaatacaaatcccaggaaggtgttcgagttttgctacttgtatgggatgataagacttctcatgataagtttgggataaaaacgcctggagttatggggacacatgatgaggagactaggaagttcttcaagcattcttctgtgatatgcgttttgtcaccccggtatgccagcagtaagcttgggttgttcaaacaacaggttgttggaactctcttcacgcaccatcaaaagtgtgttcttgtagacactcaggctgttggtaataatcgcaaggtcaccgcttttattggaggtctagatctttgtgatggccgttatgacacacctgagcataggatactccacgatcttgacactgtatttaaggatgatttccacaatcctacatttccagctggtaccaaggccccaagacaaccttggcacgatttgcactgtaggatagatgggcctgcggcatatgatgttctcataaactttgagcagcgatggagaaaggcaacacgatggaaggagtttagcttacgtttaaaggggaaaactcactggcaagatgatgctttgatccggatagggcgtatatcatggattctgagtccagtgtttaaatttctgaaggatggtacttcgataattccagaggacgatccatgtgtttgggtttctaaagaagatgatccagagaactggcatgttcagatattccgttctatcgactcaggatccgtgaaaggatttccaaaatatgaagatgaggctgaggcccagcatctggaatgtgccaagcgtcttgttgtagataaaagcatccagactgcatacatccagacaatcagatctgctcagcatttcatatatatcgagaatcagtatttcctgggttcttcttatgcttggccttcttatagagacgcaggagctgacaatcttattcctatggagttggcactaaagattgttagcaaaatcagagctaaggaaagatttgccgtatatgttgtcataccattgtggcctgaaggcgacccaaagtctggccctgtgcaagaaattctatattggcagagccaaactatgcagatgatgtatgatgttatagcaaaagaactgaaagcggtgcaatcagatgctcatcctctcgattaccttaacttttactgccttggtaaacgagagcagcttccagatgatatgccagccaccaatggcagtgtggtatcagattcttataatttccagcgtttcatgatttacgtgcacgcaaaagggatgatagtagatgatgagtatgtactcatgggatctgctaatatcaaccaaagatctatggcaggcaccaaagatactgaaatcgccatgggcgcataccaacctaatcatacatgggctcacaagggaagacacccacgtggccaggtgtatggatacagaatgtcactatgggcagagcatttaggcaaaactggagatgagtttgtggagccatcagatctggaatgtctgaagaaggtgaacacaatctctgaagaaaactggaaaagattcatagacccgaaattctcagagctacaaggtcacttaataaagtatcctctacaagtagacgttgatggtaaagtaagccctcttcctgattacgagaccttcccagatgttggtggtaagatcattggagctcattccatggctcttcctgacactttaaccacgtaatgtgaatgttcaatgtaaatttcagcatttgttttggggtttcttttgatcctgaataatattagctgaaagtgttgtttgagttgttgtacatttaactgtgttgtttcttttttatacattcttttgtgattgtcgtcaaatatttgttggggtgcaaaatgtagagatcgtgagtgagtgaagaggc

SEQ ID NO: 85553 - protein, 859 aa, Arabidopsis thaliana
  peptide (1)..(859): Ceres Seq. ID no. 12681036
  misc_feature (18)..(140): Pfam Name: C2 domain Pfam Description: C2 domain
  misc_feature (12)..(859): Homolog of NCBI NO: 34900970 NR Description: putative phospholipase D [Oryza sativa (japonica
  misc_feature (8)..(859): Homolog of NCBI NO: 8699602 NR Description: phospholipase D [Oryza sativa]
  misc_feature (77)..(858): Homolog of NCBI NO: 20198318 NR Description: phospholipase D [Arabidopsis thaliana]
  misc_feature (77)..(858): Homolog of NCBI NO: 30688872 NR Description: phospholipase D (PLDbeta) [Arabidopsis thaliana]
  misc_feature (1)..(42): Homolog of NCBI NO: 20198318 NR Description: phospholipase D [Arabidopsis thaliana]
  misc_feature (1)..(42): Homolog of NCBI NO: 30688872 NR Description: phospholipase D (PLDbeta) [Arabidopsis thaliana]
  misc_feature (77)..(858): Homolog of NCBI NO: 20138945 NR Description: Phospholipase D beta 1 (AtPLDbeta1) (PLD beta 1)
  misc_feature (1)..(42): Homolog of NCBI NO: 20138945 NR Description: Phospholipase D beta 1 (AtPLDbeta1) (PLD beta 1)
  misc_feature (77)..(509): Homolog of NCBI NO: 13111663 NR Description: phospholipase PLDb2 [Lycopersicon esculentum]
  misc_feature (504)..(858): Homolog of NCBI NO: 13111663 NR Description: phospholipase PLDb2 [Lycopersicon esculentum]
VTMAEKVSEDVMLLHGDLDLKIVKARRLPNMDMFSEHLRRLFTACNACARPTDTDDVDPRDKGEFGDKNIRSHRKVITSDPYVTVVVPQATLARTRVLKNSQEPLWDEKFNISIAHPFAYLEFQVKDDDVFGAQIIGTAKIPVRDIASGERISGWFPVLGASGKPPKAETAIFIDMKFTPFDQIHSYRCGIAGDPERRGVRRTYFPVRKGSQVRLYQDAHVMDGTLPAIGLDNGKVYEHGKCWEDICYAISEAHHMIYIVGWSIFHKIKLVRETKVPRDKDMTLGELLKYKSQEGVRVLLLVWDDKTSHDKFGIKTPGVMGTHDEETRKFFKHSSVICVLSPRYASSKLGLFKQQVVGTLFTHHQKCVLVDTQAVGNNRKVTAFIGGLDLCDGRYDTPEHRILHDLDTVFKDDFHNPTFPAGTKAPRQPWHDLHCRIDGPAAYDVLINFEQRWRKATRWKEFSLRLKGKTHWQDDALIRIGRISWILSPVFKFLKDGTSIIPEDDPCVWVSKEDDPENWHVQIFRSIDSGSVKGFPKYEDEAEAQHLECAKRLVVDKSIQTAYIQTIRSAQHFIYIENQYFLGSSYAWPSYRDAGADNLIPMELALKIVSKIRAKERFAVYVVIPLWPEGDPKSGPVQEILYWQSQTMQMMYDVIAKELKAVQSDAHPLDYLNFYCLGKREQLPDDMPATNGSVVSDSYNFQRFMIYVHAKGMIVDDEYVLMGSANINQRSMAGTKDTEIAMGAYQPNHTWAHKGRHPRGQVYGYRMSLWAEHLGKTGDEFVEPSDLECLKKVNTISEENWKRFIDPKFSELQGHLIKYPLQVDVDGKVSPLPDYETFPDVGGKIIGAHSMALPDTLTT

SEQ ID NO: 85554 - protein, 857 aa, Arabidopsis thaliana; identical to SEQ ID NO: 41444
  peptide (1)..(857): Ceres Seq. ID no. 12681037
  misc_feature (16)..(138): Pfam Name: C2 domain Pfam Description: C2 domain
  misc_feature (10)..(857): Homolog of NCBI NO: 34900970 NR Description: putative phospholipase D [Oryza sativa (japonica
  misc_feature (6)..(857): Homolog of NCBI NO: 8699602 NR Description: phospholipase D [Oryza sativa]
  misc_feature (75)..(856): Homolog of NCBI NO: 20198318 NR Description: phospholipase D [Arabidopsis thaliana]
  misc_feature (75)..(856): Homolog of NCBI NO: 30688872 NR Description: phospholipase D (PLDbeta) [Arabidopsis thaliana]
  misc_feature (1)..(40): Homolog of NCBI NO: 20198318 NR Description: phospholipase D [Arabidopsis thaliana]
  misc_feature (1)..(40): Homolog of NCBI NO: 30688872 NR Description: phospholipase D (PLDbeta) [Arabidopsis thaliana]
  misc_feature (75)..(856): Homolog of NCBI NO: 20138945 NR Description: Phospholipase D beta 1 (AtPLDbeta1) (PLD beta 1)
  misc_feature (1)..(40): Homolog of NCBI NO: 20138945 NR Description: Phospholipase D beta 1 (AtPLDbeta1) (PLD beta 1)
  misc_feature (75)..(507): Homolog of NCBI NO: 13111663 NR Description: phospholipase PLDb2 [Lycopersicon esculentum]
  misc_feature (502)..(856): Homolog of NCBI NO: 13111663 NR Description: phospholipase PLDb2 [Lycopersicon esculentum]

SEQ ID NO: 85555 - protein, 848 aa, Arabidopsis thaliana; identical to SEQ ID NO: 41445
  peptide (1)..(848): Ceres Seq. ID no. 12681038
  misc_feature (7)..(129): Pfam Name: C2 domain Pfam Description: C2 domain
  misc_feature (1)..(848): Homolog of NCBI NO: 34900970 NR Description: putative phospholipase D [Oryza sativa (japonica
  misc_feature (1)..(848): Homolog of NCBI NO: 8699602 NR Description: phospholipase D [Oryza sativa]
  misc_feature (66)..(847): Homolog of NCBI NO: 20198318 NR Description: phospholipase D [Arabidopsis thaliana]
  misc_feature (66)..(847): Homolog of NCBI NO: 30688872 NR Description: phospholipase D (PLDbeta) [Arabidopsis thaliana]
  misc_feature (1)..(31): Homolog of NCBI NO: 20198318 NR Description: phospholipase D [Arabidopsis thaliana]
  misc_feature (1)..(31): Homolog of NCBI NO: 30688872 NR Description: phospholipase D (PLDbeta) [Arabidopsis thaliana]
  misc_feature (66)..(847): Homolog of NCBI NO: 20138945 NR Description: Phospholipase D beta 1 (AtPLDbeta1) (PLD beta 1)
  misc_feature (1)..(31): Homolog of NCBI NO: 20138945 NR Description: Phospholipase D beta 1 (AtPLDbeta1) (PLD beta 1)
  misc_feature (66)..(498): Homolog of NCBI NO: 13111663 NR Description: phospholipase PLDb2 [Lycopersicon esculentum]
  misc_feature (493)..(847): Homolog of NCBI NO: 13111663 NR Description: phospholipase PLDb2 [Lycopersicon esculentum]

SEQ ID NO: 85556 - DNA, 651 bp, Arabidopsis thaliana
  misc_feature (1)..(651): Ceres Seq. ID no. 12681039
  misc_feature: MA Experiment ID: 108433 Result: Up-regulated in Transcription
  misc_feature: MA Experiment 108433 PARAMETER Experiment Name: At_rhl_Mutant2_cDNA_P Parameter: Age (day) Value: 7
  misc_feature: MA Experiment 108433 PARAMETER Experiment Name: At_rhl_Mutant2_cDNA_P Parameter: Organism Value: A. thaliana
  misc_feature: MA Experiment 108433 PARAMETER Experiment Name: At_rhl_Mutant2_cDNA_P Parameter: Plant Line Value: rhl Mutant vs. wt landsburg
  misc_feature: MA Experiment 108433 PARAMETER Experiment Name: At_rhl_Mutant2_cDNA_P Parameter: Tissue Value: Roots
  misc_feature: MA Experiment ID: 20000087 Result: Up-regulated in Transcription
  misc_feature: MA Experiment 20000087 PARAMETER Experiment Name: At_100uM_ABA_Mutants_cDNA_P Parameter: Plant Line Value: WS
  misc_feature: MA Experiment 20000087 PARAMETER Experiment Name: At_100uM_ABA_Mutants_cDNA_P Parameter: Timepoint (hr) Value: 6
  misc_feature: MA Experiment 20000087 PARAMETER Experiment Name: At_100uM_ABA_Mutants_cDNA_P Parameter: Tissue Value: Aerial
  misc_feature: MA Experiment 20000087 PARAMETER Experiment Name: At_100uM_ABA_Mutants_cDNA_P Parameter: Treatment Value: 100uM ABA vs. No Treatment
  misc_feature: MA Experiment ID: 20000111 Result: Up-regulated in Transcription
  misc_feature: MA Experiment 20000111 PARAMETER Experiment Name: At_42deg_Heat_cDNA_P Parameter: Temperature (deg C) Value: 42 vs. 22
  misc_feature: MA Experiment 20000111 PARAMETER Experiment Name: At_42deg_Heat_cDNA_P Parameter: Timepoint (hr) Value: 6
  misc_feature: MA Experiment 20000111 PARAMETER Experiment Name: At_42deg_Heat_cDNA_P Parameter: Tissue Value: Aerial
  misc_feature: MA Experiment ID: 20000112 Result: Up-regulated in Transcription
  misc_feature: MA Experiment 20000112 PARAMETER Experiment Name: At_42deg_Heat_cDNA_P Parameter: Temperature (deg C) Value: 42 vs. 22
  misc_feature: MA Experiment 20000112 PARAMETER Experiment Name: At_42deg_Heat_cDNA_P Parameter: Timepoint (hr) Value: 2
  misc_feature: MA Experiment 20000112 PARAMETER Experiment Name: At_42deg_Heat_cDNA_P Parameter: Tissue Value: Aerial
  misc_feature: MA Experiment ID: 20000173 Result: Up-regulated in Transcription
  misc_feature: MA Experiment 20000173 PARAMETER Experiment Name: At_42deg_Heat_P Parameter: Age (day) Value: 14
  misc_feature: MA Experiment 20000173 PARAMETER Experiment Name: At_42deg_Heat_P Parameter: Organism Value: A. thaliana
  misc_feature: MA Experiment 20000173 PARAMETER Experiment Name: At_42deg_Heat_P Parameter: Plant Line Value: WS
  misc_feature: MA Experiment 20000173 PARAMETER Experiment Name: At_42deg_Heat_P Parameter: Temperature (deg C) Value: 42 vs. 22
  misc_feature: MA Experiment 20000173 PARAMETER Experiment Name: At_42deg_Heat_P Parameter: Timepoint (hr) Value: 6
  misc_feature: MA Experiment 20000173 PARAMETER Experiment Name: At_42deg_Heat_P Parameter: Tissue Value: Aerial
atcacgatcgcaacaatggcggctgctgcgaaggagatcctacggcgaccagtggcggcaacaataaggctaaccgttccggcgggaggagcgaggccagccccaccggtaggtccggcgctaggtcagtacaggcttaacctgatggctttctgcaaagacttcaacgctaggactcaaaagtacaaaccagacactccgatggccgtgacgataacggcgttcaaggacaactctttcgaattcaccgtcaagtctccgacggtgtcgtggtacatcaagaaagcagctggagtcgataaaggaagcacacgcccgggtcatttgtcggtgacgacgctatcggtgagacacgtgtacgagatcgcgaaggtgaagcagacggatccgttttgtcagtatatgccgttggaatcgatttgcaaatccatcattggtactgctaattctatgggtatcaagatcgttcaggatttggagtgattttagggtttctgatgaaagagtggaatcaatttgcttctggtaaacgtctttgctttgagtagtaaagtataaaccatgaatgaatttcacagattgttttgtgttttggtgttacttccattgtgttgtttgtttcaatggataattgagctccaaaagctttcc

SEQ ID NO: 85557 - protein, 160 aa, Arabidopsis thaliana; identical to SEQ ID NO: 38269
  peptide (1)..(160): Ceres Seq. ID no. 12681040
  misc_feature (85)..(155): Pfam Name: Ribosomal protein L11, RNA binding domain Pfam Description: Ribosomal protein L11, RNA binding domain
  misc_feature (6)..(160): Homolog of NCBI NO: 15237029 NR Description: ribosomal protein L11 homolog; protein id: supported by cDNA: 95636. [Arabidopsis thaliana]
  misc_feature (6)..(159): Homolog of NCBI NO: 37535204 NR Description: putative ribosomal protein L11 [Oryza sativa
  misc_feature (8)..(159): Homolog of NCBI NO: 15823668 NR Description: mitochondrial ribosomal protein L11 [Triticum
  misc_feature (22)..(156): Homolog of NCBI NO: 19115007 NR Description: probable 50S ribosomal protein L11
  misc_feature (14)..(155): Homolog of NCBI NO: 15606945 NR Description: ribosomal protein L11 [Aquifex aeolicus]
  misc_feature (3)..(159): Homolog of NCBI NO: 7705618 NR Description: mitochondrial ribosomal protein L11 isoform a sapiens] >gi|22001931|sp|Q9Y3B7|RM11_HUMAN 60S ribosomal protein
  misc_feature (14)..(157): Homolog of NCBI NO: 22966134 NR Description: hypothetical protein [Rhodospirillum rubrum]
  misc_feature (13)..(159): Homolog of NCBI NO: 33520004 NR Description: 50S ribosomal subunit protein L11 [Candidatus floridanus] >gi|33504350|emb|CAD83243.1| 50S ribosomal subunit
  misc_feature (14)..(155): Homolog of NCBI NO: 33594733 NR Description: 50S ribosomal protein L11 [Bordetella >gi|33599003|ref|NP_886563.1| 50S ribosomal protein L11 bronchiseptica] >gi|33564809|emb|CAE39751.1| 50S ribosomal
  misc_feature (3)..(158): Homolog of NCBI NO: 25306275 NR Description: mitochondrial ribosomal protein L11 isoform c

SEQ ID NO: 85558 - protein, 155 aa, Arabidopsis thaliana; identical to SEQ ID NO: 38270
  peptide (1)..(155): Ceres Seq. ID no. 12681041
  misc_feature (80)..(150): Pfam Name: Ribosomal protein L11, RNA binding domain Pfam Description: Ribosomal protein L11, RNA binding domain
  misc_feature (1)..(155): Homolog of NCBI NO: 15237029 NR Description: ribosomal protein L11 homolog; protein id: supported by cDNA: 95636. [Arabidopsis thaliana]
  misc_feature (1)..(154): Homolog of NCBI NO: 37535204 NR Description: putative ribosomal protein L11 [Oryza sativa
  misc_feature (3)..(154): Homolog of NCBI NO: 15823668 NR Description: mitochondrial ribosomal protein L11 [Triticum
  misc_feature (17)..(151): Homolog of NCBI NO: 19115007 NR Description: probable 50S ribosomal protein L11
  misc_feature (9)..(150): Homolog of NCBI NO: 15606945 NR Description: ribosomal protein L11 [Aquifex aeolicus]
  misc_feature (1)..(154): Homolog of NCBI NO: 7705618 NR Description: mitochondrial ribosomal protein L11 isoform a sapiens] >gi|22001931|sp|Q9Y3B7|RM11_HUMAN 60S ribosomal protein
  misc_feature (9)..(152): Homolog of NCBI NO: 22966134 NR Description: hypothetical protein [Rhodospirillum rubrum]
  misc_feature (8)..(154): Homolog of NCBI NO: 33520004 NR Description: 50S ribosomal subunit protein L11 [Candidatus floridanus] >gi|33504350|emb|CAD83243.1| 50S ribosomal subunit
  misc_feature (9)..(150): Homolog of NCBI NO: 33594733 NR Description: 50S ribosomal protein L11 [Bordetella >gi|33599003|ref|NP_886563.1| 50S ribosomal protein L11 bronchiseptica] >gi|33564809|emb|CAE39751.1| 50S ribosomal
  misc_feature (1)..(153): Homolog of NCBI NO: 25306275 NR Description: mitochondrial ribosomal protein L11 isoform c

SEQ ID NO: 85559 - protein, 112 aa, Arabidopsis thaliana; identical to SEQ ID NO: 38271
  peptide (1)..(112): Ceres Seq. ID no. 12681042
  misc_feature (37)..(107): Pfam Name: Ribosomal protein L11, RNA binding domain Pfam Description: Ribosomal protein L11, RNA binding domain
  misc_feature (1)..(112): Homolog of NCBI NO: 15237029 NR Description: ribosomal protein L11 homolog; protein id: supported by cDNA: 95636. [Arabidopsis thaliana]
  misc_feature (1)..(111): Homolog of NCBI NO: 37535204 NR Description: putative ribosomal protein L11 [Oryza sativa
  misc_feature (1)..(111): Homolog of NCBI NO: 15823668 NR Description: mitochondrial ribosomal protein L11 [Triticum
  misc_feature (1)..(108): Homolog of NCBI NO: 19115007 NR Description: probable 50S ribosomal protein L11
  misc_feature (1)..(107): Homolog of NCBI NO: 15606945 NR Description: ribosomal protein L11 [Aquifex aeolicus]
  misc_feature (1)..(111): Homolog of NCBI NO: 7705618 NR Description: mitochondrial ribosomal protein L11 isoform a sapiens] >gi|22001931|sp|Q9Y3B7|RM11_HUMAN 60S ribosomal protein
  misc_feature (1)..(109): Homolog of NCBI NO: 22966134 NR Description: hypothetical protein [Rhodospirillum rubrum]
  misc_feature (1)..(111): Homolog of NCBI NO: 33520004 NR Description: 50S ribosomal subunit protein L11 [Candidatus floridanus] >gi|33504350|emb|CAD83243.1| 50S ribosomal subunit
  misc_feature (1)..(107): Homolog of NCBI NO: 33594733 NR Description: 50S ribosomal protein L11 [Bordetella >gi|33599003|ref|NP_886563.1| 50S ribosomal protein L11 bronchiseptica] >gi|33564809|emb|CAE39751.1| 50S ribosomal
  misc_feature (1)..(110): Homolog of NCBI NO: 25306275 NR Description: mitochondrial ribosomal protein L11 isoform c

SEQ ID NO: 85560 - DNA, 2247 bp, Arabidopsis thaliana
  misc_feature (1)..(2247): Ceres Seq. ID no. 12681095
  misc_feature: MA Experiment ID: 20000264 Result: Up-regulated in Transcription
  misc_feature: MA Experiment 20000264 PARAMETER Experiment Name: At_Open_Flower_P Parameter: Age (day) Value: 21
  misc_feature: MA Experiment 20000264 PARAMETER Experiment Name: At_Open_Flower_P Parameter: Plant Line Value: WS
  misc_feature: MA Experiment 20000264 PARAMETER Experiment Name: At_Open_Flower_P Parameter: Tissue Value: Open Flower vs. Whole Plant
  misc_feature: MA Experiment ID: 20000286 Result: Up-regulated in Transcription
  misc_feature: MA Experiment 20000286 PARAMETER Experiment Name: At_Open_Flower_P Parameter: Age (day) Value: 21
  misc_feature: MA Experiment 20000286 PARAMETER Experiment Name: At_Open_Flower_P Parameter: Plant Line Value: WS
  misc_feature: MA Experiment 20000286 PARAMETER Experiment Name: At_Open_Flower_P Parameter: Tissue Value: Half Open vs. Whole Plant
  misc_feature: MA Experiment ID: 20001556 Result: Up-regulated in Transcription
  misc_feature: MA Experiment 20001556 PARAMETER Experiment Name: At_Drought_Soil_Dry_P Parameter: Age (day) Value: 26
  misc_feature: MA Experiment 20001556 PARAMETER Experiment Name: At_Drought_Soil_Dry_P Parameter: Organism Value: A. thaliana
  misc_feature: MA Experiment 20001556 PARAMETER Experiment Name: At_Drought_Soil_Dry_P Parameter: Plant Line Value: WS
  misc_feature: MA Experiment 20001556 PARAMETER Experiment Name: At_Drought_Soil_Dry_P Parameter: Post Timepoint (hr) Value: None
  misc_feature: MA Experiment 20001556 PARAMETER Experiment Name: At_Drought_Soil_Dry_P Parameter: Post-Treatment Value: None
  misc_feature: MA Experiment 20001556 PARAMETER Experiment Name: At_Drought_Soil_Dry_P Parameter: Timepoint (day) Value: 12
  misc_feature: MA Experiment 20001556 PARAMETER Experiment Name: At_Drought_Soil_Dry_P Parameter: Treatment Value: Drought vs. No Drought
  misc_feature: MA Experiment ID: 20001905 Result: Up-regulated in Transcription
  misc_feature: MA Experiment 20001905 PARAMETER Experiment Name: At_Drought_Reproduction_P Parameter: Age (day) Value: 40
  misc_feature: MA Experiment 20001905 PARAMETER Experiment Name: At_Drought_Reproduction_P Parameter: Organism Value: A. thaliana
  misc_feature: MA Experiment 20001905 PARAMETER Experiment Name: At_Drought_Reproduction_P Parameter: Plant Line Value: WS
  misc_feature: MA Experiment 20001905 PARAMETER Experiment Name: At_Drought_Reproduction_P Parameter: Timepoint (day) Value: 10
  misc_feature: MA Experiment 20001905 PARAMETER Experiment Name: At_Drought_Reproduction_P Parameter: Tissue Value: Rosettes
  misc_feature: MA Experiment 20001905 PARAMETER Experiment Name: At_Drought_Reproduction_P Parameter: Treatment Value: Drought vs. No Drought
  misc_feature: MA Experiment ID: 20001910 Result: Up-regulated in Transcription
  misc_feature: MA Experiment 20001910 PARAMETER Experiment Name: At_Drought_Reproduction_P Parameter: Age (day) Value: 37
  misc_feature: MA Experiment 20001910 PARAMETER Experiment Name: At_Drought_Reproduction_P Parameter: Organism Value: A. thaliana
  misc_feature: MA Experiment 20001910 PARAMETER Experiment Name: At_Drought_Reproduction_P Parameter: Plant Line Value: WS
  misc_feature: MA Experiment 20001910 PARAMETER Experiment Name: At_Drought_Reproduction_P Parameter: Timepoint (day) Value: 7
  misc_feature: MA Experiment 20001910 PARAMETER Experiment Name: At_Drought_Reproduction_P Parameter: Tissue Value: Flowers
  misc_feature: MA Experiment 20001910 PARAMETER Experiment Name: At_Drought_Reproduction_P Parameter: Treatment Value: Drought vs. No Drought
acttattttcgttctcgcaatcatattgttctcacaattgaccaaggaaagagaaatgcgagagattctctgaatttagagagaagcaaaagagtttttttttttttcgagaaccaaaaatggagaatcaagaggaagatgaggtggtgctggcgaaggtgacgtcggaggttgaggataattttgaggatgaagggttggtttcaaattcaacattggagaaagttgctgcagcgaagaagtatattgaaaaccattacaatagacgcatgagacacattcaacaacgtaaagaaaggcgttgggtgctagaacaaaagattgcatctttagatgtatcagaaaaagaacaactcgagttgctggaggatttgcagaggaaagagacagagtatactagattaatgaggaacaggctttgcgttgacgattttgatcttctgagtattatcgggagaggagcttttggtgaggtaagactctgccgtgagaaaaagacaggcaacatttatgctatgaagaagcttaagaagtctgaaatgcttagtagggggcaagttgaacatgttagagctgagaggaacttgctagccgaagttgctagtgactgtattgtgaagctttattattcgttccaagatccagaatatttgtaccttatcatggagtatctgtctggtggtgatgtgatgactttgcttatgagggaagagactttgacggaaactgtggctcggttttacattgcccaaagtgttttggctattgagtccatacataagcataattatgttcacagggatataaaaccagacaatcttctgttggacaagtatggtcatatgaagctgtcggattttggtctttgtaagcctctcgattgtagaaatatttcggctatgaacgtaaatgaacctttgaatgatgagaatataaatgaatcaatcgatggtgatgagaactgctcgataggacgtcgtggaaggcgttggaagagcccactggaacagctgcagcattggcagataaacagaagaaaactggcatattctacggtaggtaccccagattatattgcaccagaggtgttgctgaagaagggatacggtgtagagtgtgactggtggtctttgggggccattatgtatgagatgctcgttggttatccaccattttactccgatgaccctgtaacaacatgtagaaaggtctacttgtaactaaatttacagtagtttccactttgctcttatatcattttgaatattcttgttgatggtaaaatgagattttaagacggtggaagctttctgtgttgggtctgtttttcttaggatctttcacatcttcttttatatctctaaattgacatttgatggaatttagattgtgagctggagaactcatttagtattccccgagggtgcaaggttgacacctgaggcaagagatctcatttgtaggttgctttgtgattctgagcacaggcttggttctcatggagccggagccgagcaaatcaaagctcatacttggttcaaagatgtggaatgggaaaaactctatgagatggatgcagcttttaagccagtggtcaatggagaacttgatacccagaattttatgaaattcgatgaggtggagtgtccaaaaccagcaagaacaggatctggaccgtcatggaaggtgagcataacccctcaaaatatcaattttgtgggctatacgtacagaaactttgacgctgttcgtggttctcgccattctttagatatcaaaggaagcgtttcacctccacgctcatcaactgactctacccgaagtgactctgcaattgattacacaaaactctcaactggtggcgatggctcacaacaataattatcttgcttctaatacttgagacaccaaagctgattcttcaatccagacatcgctttattctacaaagaaaatcctctgtaactatttttttttgatccatgaaacttttttgtttgtttgtcaatgtacagtcataattgcagttgcagagagaagagaagacgttgagaaatctctctgtctcctttttctgcagctgtgttttttgttttgtacgtttttgttgcatctgcccagaattggcgttcatgtatttttctacggcctttttcctagtggcagtttccaaccgtttgttcccgccattggtggttacttagttattgttattagcaacatctaaataaacctatttttatattc

SEQ ID NO: 85561 - protein, 366 aa, Arabidopsis thaliana
  peptide (1)..(366): Ceres Seq. ID no. 12681096
  misc_feature (105)..(364): Pfam Name: Protein kinase domain Pfam Description: Protein kinase domain
  misc_feature (1)..(364): Homolog of NCBI NO: 18399030 NR Description: putative protein kinase; protein id: At2g19400.1 thaliana] >gi|20197015|gb|AAC16470.2| putative protein kinase
  misc_feature (1)..(364): Homolog of NCBI NO: 7446410 NR Description: protein kinase F27F23.20 (EC 2.7.1.-) -
  misc_feature (1)..(366): Homolog of NCBI NO: 13877631 NR Description: putative protein kinase [Arabidopsis thaliana]
  misc_feature (33)..(364): Homolog of NCBI NO: 541824 NR Description: protein kinase (EC 2.7.1.-) - spinach
  misc_feature (17)..(364): Homolog of NCBI NO: 27311789 NR Description: putative protein kinase [Arabidopsis thaliana]
  misc_feature (33)..(364): Homolog of NCBI NO: 34906336 NR Description: unnamed protein product [Oryza sativa (japonica group)] >gi|9558490|dbj|BAB03409.1| unnamed protein product
  misc_feature (17)..(364): Homolog of NCBI NO: 15234064 NR Description: putative protein kinase; protein id: At4g33080.1
  misc_feature (1)..(364): Homolog of NCBI NO: 31088226 NR Description: protein kinase [Raphanus sativus]
  misc_feature (19)..(364): Homolog of NCBI NO: 31088228 NR Description: protein kinase [Raphanus sativus]
  misc_feature (24)..(364): Homolog of NCBI NO: 7339534 NR Description: protein kinase MK6 [Mesembryanthemum crystallinum]
MENQEEDEVVLAKVTSEVEDNFEDEGLVSNSTLEKVAAAKKYIENHYNRRMRHIQQRKERRWVLEQKIASLDVSEKEQLELLEDLQRKETEYTRLMRNRLCVDDFDLLSIIGRGAFGEVRLCREKKTGNIYAMKKLKKSEMLSRGQVEHVRAERNLLAEVASDCIVKLYYSFQDPEYLYLIMEYLSGGDVMTLLMREETLTETVARFYIAQSVLAIESIHKHNYVHRDIKPDNLLLDKYGHMKLSDFGLCKPLDCRNISAMNVNEPLNDENINESIDGDENCSIGRRGRRWKSPLEQLQHWQINRRKLAYSTVGTPDYIAPEVLLKKGYGVECDWWSLGAIMYEMLVGYPPFYSDDPVTTCRKVYL

SEQ ID NO: 85562 - protein, 316 aa, Arabidopsis thaliana
  peptide (1)..(316): Ceres Seq. ID no. 12681097
  misc_feature (55)..(314): Pfam Name: Protein kinase domain Pfam Description: Protein kinase domain
  misc_feature (1)..(314): Homolog of NCBI NO: 18399030 NR Description: putative protein kinase; protein id: At2g19400.1 thaliana] >gi|20197015|gb|AAC16470.2| putative protein kinase
  misc_feature (1)..(314): Homolog of NCBI NO: 7446410 NR Description: protein kinase F27F23.20 (EC 2.7.1.-) -
  misc_feature (1)..(316): Homolog of NCBI NO: 13877631 NR Description: putative protein kinase [Arabidopsis thaliana]
  misc_feature (1)..(314): Homolog of NCBI NO: 541824 NR Description: protein kinase (EC 2.7.1.-) - spinach
  misc_feature (1)..(314): Homolog of NCBI NO: 27311789 NR Description: putative protein kinase [Arabidopsis thaliana]
  misc_feature (1)..(314): Homolog of NCBI NO: 34906336 NR Description: unnamed protein product [Oryza sativa (japonica group)] >gi|9558490|dbj|BAB03409.1| unnamed protein product
  misc_feature (1)..(314): Homolog of NCBI NO: 15234064 NR Description: putative protein kinase; protein id: At4g33080.1
  misc_feature (1)..(314): Homolog of NCBI NO: 31088226 NR Description: protein kinase [Raphanus sativus]
  misc_feature (1)..(314): Homolog of NCBI NO: 31088228 NR Description: protein kinase [Raphanus sativus]
  misc_feature (1)..(314): Homolog of NCBI NO: 7339534 NR Description: protein kinase MK6 [Mesembryanthemum crystallinum]
MRHIQQRKERRWVLEQKIASLDVSEKEQLELLEDLQRKETEYTRLMRNRLCVDDFDLLSIIGRGAFGEVRLCREKKTGNIYAMKKLKKSEMLSRGQVEHVRAERNLLAEVASDCIVKLYYSFQDPEYLYLIMEYLSGGDVMTLLMREETLTETVARFYIAQSVLAIESIHKHNYVHRDIKPDNLLLDKYGHMKLSDFGLCKPLDCRNISAMNVNEPLNDENINESIDGDENCSIGRRGRRWKSPLEQLQHWQINRRKLAYSTVGTPDYIAPEVLLKKGYGVECDWWSLGAIMYEMLVGYPPFYSDDPVTTCRKVYL

SEQ ID NO: 85563 - protein, 271 aa, Arabidopsis thaliana
  peptide (1)..(271): Ceres Seq. ID no. 12681098
  misc_feature (10)..(269): Pfam Name: Protein kinase domain Pfam Description: Protein kinase domain
  misc_feature (1)..(269): Homolog of NCBI NO: 18399030 NR Description: putative protein kinase; protein id: At2g19400.1 thaliana] >gi|20197015|gb|AAC16470.2| putative protein kinase
  misc_feature (1)..(269): Homolog of NCBI NO: 7446410 NR Description: protein kinase F27F23.20 (EC 2.7.1.-) -
  misc_feature (1)..(271): Homolog of NCBI NO: 13877631 NR Description: putative protein kinase [Arabidopsis thaliana]
  misc_feature (1)..(269): Homolog of NCBI NO: 541824 NR Description: protein kinase (EC 2.7.1.-) - spinach
  misc_feature (1)..(269): Homolog of NCBI NO: 27311789 NR Description: putative protein kinase [Arabidopsis thaliana]
  misc_feature (1)..(269): Homolog of NCBI NO: 34906336 NR Description: unnamed protein product [Oryza sativa (japonica group)] >gi|9558490|dbj|BAB03409.1| unnamed protein product
  misc_feature (1)..(269): Homolog of NCBI NO: 15234064 NR Description: putative protein kinase; protein id: At4g33080.1
  misc_feature (1)..(269): Homolog of NCBI NO: 31088226 NR Description: protein kinase [Raphanus sativus]
  misc_feature (1)..(269): Homolog of NCBI NO: 31088228 NR Description: protein kinase [Raphanus sativus]
  misc_feature (1)..(269): Homolog of NCBI NO: 7339534 NR Description: protein kinase MK6 [Mesembryanthemum crystallinum]
MRNRLCVDDFDLLSIIGRGAFGEVRLCREKKTGNIYAMKKLKKSEMLSRGQVEHVRAERNLLAEVASDCIVKLYYSFQDPEYLYLIMEYLSGGDVMTLLMREETLTETVARFYIAQSVLAIESIHKHNYVHRDIKPDNLLLDKYGHMKLSDFGLCKPLDCRNISAMNVNEPLNDENINESIDGDENCSIGRRGRRWKSPLEQLQHWQINRRKLAYSTVGTPDYIAPEVLLKKGYGVECDWWSLGAIMYEMLVGYPPFYSDDPVTTCRKVYL

SEQ ID NO: 85564 - DNA, 1425 bp, Arabidopsis thaliana
  misc_feature (1)..(1425): Ceres Seq. ID no. 12681102
  misc_feature: MA Experiment ID: 108434 Result: Up-regulated in Transcription
  misc_feature: MA Experiment 108434 PARAMETER Experiment Name: At_Root_Tips_cDNA_P Parameter: Tissue Value: Root Tips
  misc_feature: MA Experiment ID: 108461 Result: Down-regulated in Transcription
  misc_feature: MA Experiment 108461 PARAMETER Experiment Name: At_Germinating_Seeds_cDNA_P Parameter: Age (day) Value: 1 vs. 0
  misc_feature: MA Experiment 108461 PARAMETER Experiment Name: At_Germinating_Seeds_cDNA_P Parameter: Tissue Value: Germinating Seeds
  misc_feature: MA Experiment ID: 108462 Result: Down-regulated in Transcription
  misc_feature: MA Experiment 108462 PARAMETER Experiment Name: At_Germinating_Seeds_cDNA_P Parameter: Age (day) Value: 2 vs. 0
  misc_feature: MA Experiment 108462 PARAMETER Experiment Name: At_Germinating_Seeds_cDNA_P Parameter: Tissue Value: Germinating Seeds
  misc_feature: MA Experiment ID: 108463 Result: Down-regulated in Transcription
  misc_feature: MA Experiment 108463 PARAMETER Experiment Name: At_Germinating_Seeds_cDNA_P Parameter: Age (day) Value: 3 vs. 0
  misc_feature: MA Experiment 108463 PARAMETER Experiment Name: At_Germinating_Seeds_cDNA_P Parameter: Tissue Value: Germinating Seeds
  misc_feature: MA Experiment ID: 108464 Result: Down-regulated in Transcription
  misc_feature: MA Experiment 108464 PARAMETER Experiment Name: At_Germinating_Seeds_cDNA_P Parameter: Age (day) Value: 4 vs. 0
  misc_feature: MA Experiment 108464 PARAMETER Experiment Name: At_Germinating_Seeds_cDNA_P Parameter: Tissue Value: Germinating Seeds
  misc_feature: MA Experiment ID: 108573 Result: Down-regulated in Transcription
  misc_feature: MA Experiment 108573 PARAMETER Experiment Name: At_Drought_cDNA_P Parameter: Timepoint (hr) Value: 6
  misc_feature: MA Experiment 108573 PARAMETER Experiment Name: At_Drought_cDNA_P Parameter: Tissue Value: Aerial
  misc_feature: MA Experiment 108573 PARAMETER Experiment Name: At_Drought_cDNA_P Parameter: Treatment Value: Drought vs. No Drought
  misc_feature: MA Experiment ID: 20000224 Result: Up-regulated in Transcription
aaaaatctagggttttaaggtttcttatccttcctcttcctccgccagattcttttcttgcgaagatgagcaacgacaaggacagcatgaacatgtccgatctctccaccgctcttaacgaggaggatcgtgccgggcttgttaatgctcttaagaacaagttgcagaatttggctggacaacactctgatgtccttgaaaacttgactccaccagtcaggaagcgtgtcgagtttctaagagagattcagaaccaatatgatgagatggaagcaaaattctttgaggagagagcagctcttgaagctaagtatcaaaagttatatcagcctttatataccaagcgatatgagattgtgaatggtgtggtcgaagttgaaggtgcagctgaagaagtaaaatccgaacaaggagaagataaatcagctgaagagaaaggagtaccagatttctggcttattgcattgaagaacaatgaaattactgcggaagagataactgagcgagatgaaggggctctcaagtatctcaaagatatcaagtggagtagggttgaagaaccaaaagggttcaagcttgagtttttctttgatcagaatccttacttcaagaacactgtcttgaccaagacatatcacatgattgatgaagatgagcctatccttgagaaggccctcgggacggagattgagtggtatcctggaaagtgtttgacacagaagattctaaaaaagaagccaaagaaaggatccaaaaacacaaagccgatcactaagactgaggactgtgagagtttcttcaactttttcagtccacctcaagttcctgacgatgatgaggatcttgatgatgacatggctgatgaactccaaggacaaatggagcatgattatgatatcggttcaacaatcaaagagaaaatcatctcgcatgctgtgtcatggttcactggtgaagctgttgaggcagatgaccttgatattgaggacgacgatgatgagattgatgaagatgatgatgaagaggacgaggaagatgatgaggatgacgaggaggaggatgatgaggatgatgacgaggaggaagaagcagatcaaggaaagaagagcaaaaagaagaaggctggaagaagtcaacttgcggaaggtcaagcaggtgagaggccaccggaatgtaagcagcagtgaagaagtgaagaatcttggcttagttatgatgaagaagaagagtgaagagtgtctttgagccgaggttgtgtttctttaatttgcagagtcatggtccggtttattatatatcagttttgggtgattggtttgctatttaaaaaaaaaaaatgggttctttggtttggtttgtgtctcttgatttttccttttgtaatgatcttatgaatttgtttcgagttaatgtcgttctctggtc

SEQ ID NO: 85565 - protein, 394 aa, Arabidopsis thaliana
  peptide (1)..(394): Ceres Seq. ID no. 12681103
  misc_feature (73)..(321): Pfam Name: Nucleosome assembly protein (NAP) Pfam Description: Nucleosome assembly protein (NAP)
  misc_feature (22)..(394): Homolog of NCBI NO: 15224782 NR Description: putative nucleosome assembly protein; protein id:
  misc_feature (22)..(394): Homolog of NCBI NO: 18423918 NR Description: nucleosome assembly protein; protein id: supported by cDNA: gi_13877572, supported by cDNA: gi_17978720 thaliana] >gi|13877573|gb|AAK43864.1|AF370487_1 nucleosome
  misc_feature (22)..(394): Homolog of NCBI NO: 8777435 NR Description: nucleosome assembly protein [Arabidopsis thaliana]
  misc_feature (21)..(394): Homolog of NCBI NO: 549975 NR Description: nucleosome assembly protein I-like protein;
  misc_feature (22)..(394): Homolog of NCBI NO: 15236115 NR Description: nucleosome assembly protein I-like protein; id: At4g26110.1, supported by cDNA: gi_15450807, supported by
  misc_feature (22)..(394): Homolog of NCBI NO: 29569109 NR Description: nucleosome/chromatin assembly factor group A [Zea
  misc_feature (22)..(394): Homolog of NCBI NO: 7488816 NR Description: nucleosome assembly protein 1 - garden pea
  misc_feature (22)..(394): Homolog of NCBI NO: 2129840 NR Description: nucleosome assembly protein 1 - soybean
  misc_feature (22)..(394): Homolog of NCBI NO: 21898560 NR Description: nucleosome/chromatin assembly factor group A [Zea
  misc_feature (38)..(344): Homolog of NCBI NO: 34910504 NR Description: putative nucleosome assembly protein 1 [Oryza
KSRVLRFLILPLPPPDSFLAKMSNDKDSMNMSDLSTALNEEDRAGLVNALKNKLQNLAGQHSDVLENLTPPVRKRVEFLREIQNQYDEMEAKFFEERAALEAKYQKLYQPLYTKRYEIVNGVVEVEGAAEEVKSEQGEDKSAEEKGVPDFWLIALKNNEITAEEITERDEGALKYLKDIKWSRVEEPKGFKLEFFFDQNPYFKNTVLTKTYHMIDEDEPILEKALGTEIEWYPGKCLTQKILKKKPKKGSKNTKPITKTEDCESFFNFFSPPQVPDDDEDLDDDMADELQGQMEHDYDIGSTIKEKIISHAVSWFTGEAVEADDLDIEDDDDEIDEDDDEEDEEDDEDDEEEDDEDDDEEEEADQGKKSKKKKAGRSQLAEGQAGERPPECKQQ

SEQ ID NO: 85566 - protein, 373 aa, Arabidopsis thaliana
  peptide (1)..(373): Ceres Seq. ID no. 12681104
  misc_feature (52)..(300): Pfam Name: Nucleosome assembly protein (NAP) Pfam Description: Nucleosome assembly protein (NAP)
  misc_feature (1)..(373): Homolog of NCBI NO: 15224782 NR Description: putative nucleosome assembly protein; protein id:
  misc_feature (1)..(373): Homolog of NCBI NO: 18423918 NR Description: nucleosome assembly protein; protein id: supported by cDNA: gi_13877572, supported by cDNA: gi_17978720 thaliana] >gi|13877573|gb|AAK43864.1|AF370487_1 nucleosome
  misc_feature (1)..(373): Homolog of NCBI NO: 8777435 NR Description: nucleosome assembly protein [Arabidopsis thaliana]
  misc_feature (1)..(373): Homolog of NCBI NO: 549975 NR Description: nucleosome assembly protein I-like protein;
  misc_feature (1)..(373): Homolog of NCBI NO: 15236115 NR Description: nucleosome assembly protein I-like protein; id: At4g26110.1, supported by cDNA: gi_15450807, supported by
  misc_feature (1)..(373): Homolog of NCBI NO: 29569109 NR Description: nucleosome/chromatin assembly factor group A [Zea
  misc_feature (1)..(373): Homolog of NCBI NO: 7488816 NR Description: nucleosome assembly protein 1 - garden pea
  misc_feature (1)..(373): Homolog of NCBI NO: 2129840 NR Description: nucleosome assembly protein 1 - soybean
  misc_feature (1)..(373): Homolog of NCBI NO: 21898560 NR Description: nucleosome/chromatin assembly factor group A [Zea
  misc_feature (17)..(323): Homolog of NCBI NO: 34910504 NR Description: putative nucleosome assembly protein 1 [Oryza
MSNDKDSMNMSDLSTALNEEDRAGLVNALKNKLQNLAGQHSDVLENLTPPVRKRVEFLREIQNQYDEMEAKFFEERAALEAKYQKLYQPLYTKRYEIVNGVVEVEGAAEEVKSEQGEDKSAEEKGVPDFWLIALKNNEITAEEITERDEGALKYLKDIKWSRVEEPKGFKLEFFFDQNPYFKNTVLTKTYHMIDEDEPILEKALGTEIEWYPGKCLTQKILKKKPKKGSKNTKPITKTEDCESFFNFFSPPQVPDDDEDLDDDMADELQGQMEHDYDIGSTIKEKIISHAVSWFTGEAVEADDLDIEDDDDEIDEDDDEEDEEDDEDDEEEDDEDDDEEEEADQGKKSKKKKAGRSQLAEGQAGERPPECKQQ

SEQ ID NO: 85567 - protein, 366 aa, Arabidopsis thaliana
  peptide (1)..(366): Ceres Seq. ID no. 12681105
  misc_feature (45)..(293): Pfam Name: Nucleosome assembly protein (NAP) Pfam Description: Nucleosome assembly protein (NAP)
  misc_feature (1)..(366): Homolog of NCBI NO: 15224782 NR Description: putative nucleosome assembly protein; protein id:
  misc_feature (1)..(366): Homolog of NCBI NO: 18423918 NR Description: nucleosome assembly protein; protein id: supported by cDNA: gi_13877572, supported by cDNA: gi_17978720 thaliana] >gi|13877573|gb|AAK43864.1|AF370487_1 nucleosome
  misc_feature (1)..(366): Homolog of NCBI NO: 8777435 NR Description: nucleosome assembly protein [Arabidopsis thaliana]
  misc_feature (1)..(366): Homolog of NCBI NO: 549975 NR Description: nucleosome assembly protein I-like protein;
  misc_feature (1)..(366): Homolog of NCBI NO: 15236115 NR Description: nucleosome assembly protein I-like protein; id: At4g26110.1, supported by cDNA: gi_15450807, supported by
  misc_feature (1)..(366): Homolog of NCBI NO: 29569109 NR Description: nucleosome/chromatin assembly factor group A [Zea
  misc_feature (1)..(366): Homolog of NCBI NO: 7488816 NR Description: nucleosome assembly protein 1 - garden pea
  misc_feature (1)..(366): Homolog of NCBI NO: 2129840 NR Description: nucleosome assembly protein 1 - soybean
  misc_feature (1)..(366): Homolog of NCBI NO: 21898560 NR Description: nucleosome/chromatin assembly factor group A [Zea
  misc_feature (10)..(316): Homolog of NCBI NO: 34910504 NR Description: putative nucleosome assembly protein 1 [Oryza
MNMSDLSTALNEEDRAGLVNALKNKLQNLAGQHSDVLENLTPPVRKRVEFLREIQNQYDEMEAKFFEERAALEAKYQKLYQPLYTKRYEIVNGVVEVEGAAEEVKSEQGEDKSAEEKGVPDFWLIALKNNEITAEEITERDEGALKYLKDIKWSRVEEPKGFKLEFFFDQNPYFKNTVLTKTYHMIDEDEPILEKALGTEIEWYPGKCLTQKILKKKPKKGSKNTKPITKTEDCESFFNFFSPPQVPDDDEDLDDDMADELQGQMEHDYDIGSTIKEKIISHAVSWFTGEAVEADDLDIEDDDDEIDEDDDEEDEEDDEDDEEEDDEDDDEEEEADQGKKSKKKKAGRSQLAEGQAGERPPECKQQ

SEQ ID NO: 85568 - DNA, 1031 bp, Arabidopsis thaliana
  misc_feature (1)..(1031): Ceres Seq. ID no. 12681106
  misc_feature: MA Experiment ID: 20000265 Result: Up-regulated in Transcription
  misc_feature: MA Experiment 20000265 PARAMETER Experiment Name: At_Open_Flower_P Parameter: Age (day) Value: 21
  misc_feature: MA Experiment 20000265 PARAMETER Experiment Name: At_Open_Flower_P Parameter: Plant Line Value: WS
  misc_feature: MA Experiment 20000265 PARAMETER Experiment Name: At_Open_Flower_P Parameter: Tissue Value: Closed Flower vs. Whole Plant
  misc_feature: MA Experiment ID: 20000286 Result: Up-regulated in Transcription
  misc_feature: MA Experiment 20000286 PARAMETER Experiment Name: At_Open_Flower_P Parameter: Age (day) Value: 21
  misc_feature: MA Experiment 20000286 PARAMETER Experiment Name: At_Open_Flower_P Parameter: Plant Line Value: WS
  misc_feature: MA Experiment 20000286 PARAMETER Experiment Name: At_Open_Flower_P Parameter: Tissue Value: Half Open vs. Whole Plant
  misc_feature: MA Experiment ID: 20000794 Result: Up-regulated in Transcription
  misc_feature: MA Experiment 20000794 PARAMETER Experiment Name: At_Petals_P Parameter: Age (day) Value: 23-25 days
  misc_feature: MA Experiment 20000794 PARAMETER Experiment Name: At_Petals_P Parameter: Plant Line Value: WS
  misc_feature: MA Experiment 20000794 PARAMETER Experiment Name: At_Petals_P Parameter: Tissue Value: Petals vs. Whole plant
  misc_feature: Pfam Name: FAD_binding_4 Pfam Description: FAD binding domain
agggaaaggtgaaatgttgacatgctcgcgacagctaaacccagaattgttctatggagtgttaggaggtttgggtcaatttggaattataacgagagccagaattgttttggaccatgcacctaaacgggccaaatggtttcggatgctctacagtgatttcacaacttttacaaaggaccaagaacgtttgatatcaatggcaaacgatattggagtcgactatttagaaggtcaaatatttctatcaaacggtgtcgttgacacctcttttttcccaccttcagatcaatctaaagtcgctgatctagtcaagcaacacggtatcatctatgttcttgaagtagccaagtattatgatgatcccaatctccccatcatcagcaaggttattgacacattaacgaaaacattaagttacttgcccgggttcatatcaatgcacgacgtggcctacttcgatttcttgaaccgtgtacatgtcgaagaaaataaactcagatctttgggattatgggaacttcctcatccttggcttaacctctacgttcctaaatctcggattctcgattttcataacggtgttgtcaaagacattcttcttaagcaaaaatcagcttcgggactcgctcttctctatccaacaaaccggaataaatgggacaatcgtatgtcggcgatgataccagagatcgatgaagatgttatatatattatcggactactacaatccgctaccccaaaggatcttccagaagtggagagcgttaacgagaagataattaggttttgcaaggattcaggtattaagattaagcaatatctaatgcattatactagtaaagaagattggattgagcattttggatcaaaatgggatgatttttcgaagaggaaagatctatttgatcccaagaaactgttatctccagggcaagacatcttttgattaacttaatgtgatatgtcatttgtgaggtctaatatctaaaactataatatagttactatataataatagcattttggtg

SEQ ID NO: 85569 - protein, 315 aa, Arabidopsis thaliana
  peptide (1)..(315): Ceres Seq. ID no. 12681107
  misc_feature: Pfam Name: FAD_binding_4 Pfam Description: FAD binding domain
  misc_feature (1)..(315): Homolog of NCBI NO: 11120508 NR Description: cytokinin oxidase [Arabidopsis thaliana]
  misc_feature (1)..(315): Homolog of NCBI NO: 18399056 NR Description: putative cytokinin oxidase; protein id: supported by cDNA: gi_11120507 [Arabidopsis thaliana] Cytokinin oxidase 2 precursor (CKO 2) >gi|20197481|gb|AAD10149.2|
  misc_feature (1)..(315): Homolog of NCBI NO: 25345685 NR Description: probable cytokinin oxidase [imported] -
  misc_feature (1)..(315): Homolog of NCBI NO: 11120512 NR Description: cytokinin oxidase [Arabidopsis thaliana]
  misc_feature (1)..(315): Homolog of NCBI NO: 15233677 NR Description: cytokinin oxidase - like protein; protein id: supported by cDNA: gi_11120511, supported by cDNA: gi_15450760 thaliana] >gi|20137961|sp|Q9FUJ2|CKX4_ARATH Cytokinin oxidase
  misc_feature (1)..(315): Homolog of NCBI NO: 15241997 NR Description: cytokinin oxidase; protein id: At5g56970.1, by cDNA: gi_11120509 [Arabidopsis thaliana] Cytokinin oxidase 3 precursor (CKO 3) >gi|8777437|dbj|BAA97027.1|
  misc_feature (1)..(219): Homolog of NCBI NO: 30688430 NR Description: cytokinin oxidase family [Arabidopsis thaliana]
  misc_feature (1)..(315): Homolog of NCBI NO: 11558277 NR Description: cytokinin oxidase [Dendrobium cv. 'Sonia']
  misc_feature (1)..(315): Homolog of NCBI NO: 11120516 NR Description: cytokinin oxidase [Arabidopsis thaliana]
  misc_feature (1)..(315): Homolog of NCBI NO: 22330649 NR Description: cytokinin oxidase, putative; protein id:
GKGEMLTCSRQLNPELFYGVLGGLGQFGIITRARIVLDHAPKRAKWFRMLYSDFTTFTKDQERLISMANDIGVDYLEGQIFLSNGVVDTSFFPPSDQSKVADLVKQHGIIYVLEVAKYYDDPNLPIISKVIDTLTKTLSYLPGFISMHDVAYFDFLNRVHVEENKLRSLGLWELPHPWLNLYVPKSRILDFHNGVVKDILLKQKSASGLALLYPTNRNKWDNRMSAMIPEIDEDVIYIIGLLQSATPKDLPEVESVNEKIIRFCKDSGIKIKQYLMHYTSKEDWIEHFGSKWDDFSKRKDLFDPKKLLSPGQDIF

SEQ ID NO: 85570 - protein, 311 aa, Arabidopsis thaliana
  peptide (1)..(311): Ceres Seq. ID no. 12681108
  misc_feature: Pfam Name: FAD_binding_4 Pfam Description: FAD binding domain
  misc_feature (1)..(311): Homolog of NCBI NO: 11120508 NR Description: cytokinin oxidase [Arabidopsis thaliana]
  misc_feature (1)..(311): Homolog of NCBI NO: 18399056 NR Description: putative cytokinin oxidase; protein id: supported by cDNA: gi_11120507 [Arabidopsis thaliana] Cytokinin oxidase 2 precursor (CKO 2) >gi|20197481|gb|AAD10149.2|
  misc_feature (1)..(311): Homolog of NCBI NO: 25345685 NR Description: probable cytokinin oxidase [imported] -
  misc_feature (1)..(311): Homolog of NCBI NO: 11120512 NR Description: cytokinin oxidase [Arabidopsis thaliana]
  misc_feature (1)..(311): Homolog of NCBI NO: 15233677 NR Description: cytokinin oxidase - like protein; protein id: supported by cDNA: gi_11120511, supported by cDNA: gi_15450760 thaliana] >gi|20137961|sp|Q9FUJ2|CKX4_ARATH Cytokinin oxidase
  misc_feature (1)..(311): Homolog of NCBI NO: 15241997 NR Description: cytokinin oxidase; protein id: At5g56970.1, by cDNA: gi_11120509 [Arabidopsis thaliana] Cytokinin oxidase 3 precursor (CKO 3) >gi|8777437|dbj|BAA97027.1|
  misc_feature (1)..(215): Homolog of NCBI NO: 30688430 NR Description: cytokinin oxidase family [Arabidopsis thaliana]
  misc_feature (1)..(311): Homolog of NCBI NO: 11558277 NR Description: cytokinin oxidase [Dendrobium cv. 'Sonia']
  misc_feature (1)..(311): Homolog of NCBI NO: 11120516 NR Description: cytokinin oxidase [Arabidopsis thaliana]
  misc_feature (1)..(311): Homolog of NCBI NO: 22330649 NR Description: cytokinin oxidase, putative; protein id:
MLTCSRQLNPELFYGVLGGLGQFGIITRARIVLDHAPKRAKWFRMLYSDFTTFTKDQERLISMANDIGVDYLEGQIFLSNGVVDTSFFPPSDQSKVADLVKQHGIIYVLEVAKYYDDPNLPIISKVIDTLTKTLSYLPGFISMHDVAYFDFLNRVHVEENKLRSLGLWELPHPWLNLYVPKSRILDFHNGVVKDILLKQKSASGLALLYPTNRNKWDNRMSAMIPEIDEDVIYIIGLLQSATPKDLPEVESVNEKIIRFCKDSGIKIKQYLMHYTSKEDWIEHFGSKWDDFSKRKDLFDPKKLLSPGQDIF

SEQ ID NO: 85571 - protein, 267 aa, Arabidopsis thaliana
  peptide (1)..(267): Ceres Seq. ID no. 12681109
  misc_feature: Pfam Name: FAD_binding_4 Pfam Description: FAD binding domain
  misc_feature (1)..(267): Homolog of NCBI NO: 11120508 NR Description: cytokinin oxidase [Arabidopsis thaliana]
  misc_feature (1)..(267): Homolog of NCBI NO: 18399056 NR Description: putative cytokinin oxidase; protein id: supported by cDNA: gi_11120507 [Arabidopsis thaliana] Cytokinin oxidase 2 precursor (CKO 2) >gi|20197481|gb|AAD10149.2|
  misc_feature (1)..(267): Homolog of NCBI NO: 25345685 NR Description: probable cytokinin oxidase [imported] -
  misc_feature (1)..(267): Homolog of NCBI NO: 11120512 NR Description: cytokinin oxidase [Arabidopsis thaliana]
  misc_feature (1)..(267): Homolog of NCBI NO: 15233677 NR Description: cytokinin oxidase - like protein; protein id: supported by cDNA: gi_11120511, supported by cDNA: gi_15450760 thaliana] >gi|20137961|sp|Q9FUJ2|CKX4_ARATH Cytokinin oxidase
  misc_feature (1)..(267): Homolog of NCBI NO: 15241997 NR Description: cytokinin oxidase; protein id: At5g56970.1, by cDNA: gi_11120509 [Arabidopsis thaliana] Cytokinin oxidase 3 precursor (CKO 3) >gi|8777437|dbj|BAA97027.1|
  misc_feature (1)..(171): Homolog of NCBI NO: 30688430 NR Description: cytokinin oxidase family [Arabidopsis thaliana]
  misc_feature (1)..(267): Homolog of NCBI NO: 11558277 NR Description: cytokinin oxidase [Dendrobium cv. 'Sonia']
  misc_feature (1)..(267): Homolog of NCBI NO: 11120516 NR Description: cytokinin oxidase [Arabidopsis thaliana]
  misc_feature (1)..(267): Homolog of NCBI NO: 22330649 NR Description: cytokinin oxidase, putative; protein id:
MLYSDFTTFTKDQERLISMANDIGVDYLEGQIFLSNGVVDTSFFPPSDQSKVADLVKQHGIIYVLEVAKYYDDPNLPIISKVIDTLTKTLSYLPGFISMHDVAYFDFLNRVHVEENKLRSLGLWELPHPWLNLYVPKSRILDFHNGVVKDILLKQKSASGLALLYPTNRNKWDNRMSAMIPEIDEDVIYIIGLLQSATPKDLPEVESVNEKIIRFCKDSGIKIKQYLMHYTSKEDWIEHFGSKWDDFSKRKDLFDPKKLLSPGQDIF

SEQ ID NO: 85572 - DNA, 4778 bp, Arabidopsis thaliana
  misc_feature (1)..(4778): Ceres Seq. ID no. 12681110
  misc_feature: MA Experiment ID: 20000235 Result: Up-regulated in Transcription
  misc_feature: MA Experiment 20000235 PARAMETER Experiment Name: At_Siliques_P Parameter: Age (day) Value: 21
  misc_feature: MA Experiment 20000235 PARAMETER Experiment Name: At_Siliques_P Parameter: Organism Value: A. thaliana
  misc_feature: MA Experiment 20000235 PARAMETER Experiment Name: At_Siliques_P Parameter: Plant Line Value: WS
  misc_feature: MA Experiment 20000235 PARAMETER Experiment Name: At_Siliques_P Parameter: Tissue Value: 5-10mm Siliques vs. Whole Plant
  misc_feature: MA Experiment ID: 20000286 Result: Up-regulated in Transcription
  misc_feature: MA Experiment 20000286 PARAMETER Experiment Name: At_Open_Flower_P Parameter: Age (day) Value: 21
  misc_feature: MA Experiment 20000286 PARAMETER Experiment Name: At_Open_Flower_P Parameter: Plant Line Value: WS
  misc_feature: MA Experiment 20000286 PARAMETER Experiment Name: At_Open_Flower_P Parameter: Tissue Value: Half Open vs. Whole Plant
  misc_feature: MA Experiment ID: 20001451 Result: Down-regulated in Transcription
  misc_feature: MA Experiment 20001451 PARAMETER Experiment Name: At_Far-red-induction_P Parameter: Age (day) Value: 7
  misc_feature: MA Experiment 20001451 PARAMETER Experiment Name: At_Far-red-induction_P Parameter: Light Value: Far-red vs. White
  misc_feature: MA Experiment 20001451 PARAMETER Experiment Name: At_Far-red-induction_P Parameter: Organism Value: A. thaliana
  misc_feature: MA Experiment 20001451 PARAMETER Experiment Name: At_Far-red-induction_P Parameter: Plant Line Value: Columbia
  misc_feature: MA Experiment 20001451 PARAMETER Experiment Name: At_Far-red-induction_P Parameter: Timepoint (hr) Value: 24
  misc_feature: MA Experiment 20001451 PARAMETER Experiment Name: At_Far-red-induction_P Parameter: Tissue Value: Whole Plant
acacacagaacacaacacactctctctctctctctctctctacgattctcgctcactgttcatcgaatccgtcattggatcgattcgaatttggtgtgtgttttctttccaatacctctgattagagatttcagcagatctgaacggaggagcgtcagatcggaatcgtccgtcggtggtttggtaaaaaaaaaaatggaggaagctttagaaatggcgagagccaaggatacaaaagagcgcatggctgctgttgaaaggctgcatcaacttctcgaagcttctaggaagagtttgagtcctgcggaagtgacgtcacttgttgattcttgtttggatctccttaaggatagtaattttagagtctctcaaggtgctcttcaagctcttgcttctgctgctgtcctcgctggtgagcatttgaagcttcatttgaatgctcttgttcctgctgttgtcgagcggcttggtgatagtaagcaacctgttagagatgctgcgaggcgtctgttgacgactctcatggaggtttcatctccgacgattatagtggagagagctggttcgtatgcttggatgcataagagttggagagttagggaagagtttgcgcgtactgttacatcggcgattggtcttttcgcatctacggaacttcctcttcagcgtgttatacttgctccgatacttcagatgttaaatgaccctaatcaagcagttagggaagctgctattttgtgcattgaggagatgtatatgcaaggtgggtctcaatttcgagaagagcttcaacgtcaccatcttccatcgtatatggtgaaggacattaatgctagactagaacgtattgagccacaactgcgttctacagatggccgtagtgcccaccatgttgttaatgaggtgaaggcatcaagtgtcaatcccaaaaagagcagtcccagggcaaaggctcctacgagggagaactctttatttgggggagatgccgacatcactgaaaaacccattgagccaatcaaagtgtactcagagaaggagttaatacgagaatttgagaaaattgctgcaacactcgtcccagagaaagactggtcaatgcgtatttcagctatgcggagggttgaaggacttgttgcaggaggtgcgactgattactcctgctttcgaggtctcctgaagcaacttgttggtcctttaagtactcaattagctgaccggagatctaccattgttaagcaggcctgtcatctcttgtgtctcttatcaaaagagctactgggagattttgaggcatgcgctgagacgtttattccagtgcttttcaagctggttgtgattactgtgcttgtaattgcagaatctgctgataactgcataaaaacgatgctgcgtaactgcaaagctgcccgtgtacttcctcgcatagctgaatcagcaaaacatgaccgtaatgcaattctgcgagcaagatgttgtgaatatgcattgttaacacttgaacattggcctgatgctccagaaattcaacgatcagttgatttatatgaagatctgattagatgctgtgttgcagatgctatgagtgaggtgcgggcaactgctagaatgtgctacagaatgtttgcaaaaacttggccggatcgttctcgccggttgttttcgtcctttgaccctgtcattcaaaggctaataaatgaagaagatggtggaattcataggagacacgcctcaccatctgtccgtgagagacattcccagccttcattttctcagacgtctgctccttctaacctacctggctatggaacatcagctatagtcgctatggatagaagttcaaatttatcatctggaggatctctttcttctgggttactcctttcgcaatcaaaggatgtcaataaaggttctgaacgtagtctggaaagtgtgttacaatcaagcaagcagaaggtcagtgcaattgaaagtatgctccgaggactgcatatatctgatagacaaaatcctgcagcccttcgttcaagtagtttggatctaggagttgaccctccatcgtctcgtgatcctcctttccatgctgttgctccagcatccaatagtcacacaagtagcgcagctgctgaatcaacacatagtatcaacaaaggcagtaatcgcaatggtggccttggtttgtcagatatcatcacccaaattcaagcttcaaaggactcaggaagatcatcttaccgtggcaatctgttgtccgagtctcatcctactttttcatccttgaccgctaaacggggctcagagagaaatgagagaagttctcttgaggaaagcaatgatgccagagaggtgaggcggtttatggctggtcattttgaccgacagcagatggatactgcttatagagatttgactttcagggaatcaaacgctagccatgttcccaatttccagaggccacttttgaggaagaatgtagggggaagaatgtctgcaggccggaggaggagttttgatgatagccaactgcaaattggtgacatatcaaattttgttgatggtccagcttccctgaacgaggcccttaacgacggactgaactcaagttctgattggtgtgccagagttgcagcttttaattttctccaaactctgctgcagcaaggcccaaaaggtgctcaagaagtaattcaaagttttgagaaagtaatgaaactatttctccggcatttggatgatcctcaccacaaggtcgcacaagcagcactgtcgacacttgcagatcttataccatcttgccgaaagccttttgagagctacatggaaagagtcctaccccatgtgttttcacggctaattgaccctaaagaagtagttagacaaccttgctcctcaaccttggaaattgtcagcaaaacctacagtgtggattcccttttacctgcattgcttcgttcactggatgaacagagatcaccaaaggctaaattagctgtgattgaatttgccatcaactccttcaacaggtacgctggtaaccctgaaatttcgggtaatagtggcatcttaaagttgtggctggcaaagttgacgccattaacccgcgacaaaaataccaagttgaaagaagcttccattacttgcatcatatctgtttacaatcattatgattctgcgggactgctaaattacattcttagtttgtcggttgaggagcaaaactctctgagaagagccctcaaacaatatactccccgcatcgaggtggacctgttaaactatatgcagagtaaaaaggaaaaacagagaattaagtcttatgacccatctgatgccattgggacatcatctgaggaaggatatgctggtgcctccaagaagaatatattccttggccggtattctgggggttctattgacagtgatagtggcaggaagtggagttcttcccaggagccaacaatgatcactggtggtgttggtcaaaatgtttccagtggaacccaggaaaagctgtatcagaacgttagaactgggatcagttcagctagtgatctgttgaaccccaaggattctgattacacatttgcttcagctggtcagaattcgatatcaagaactagccccaatggaagctcagaaaacatcgaaatcttggatgacttatctccaccacatttggagaaaaatggtctaaatctgacaagcgttgattccttggaaggaagacatgaaaatgaggtctcccgcgaattagatttaggtcactacatgctcacatctattaaggtcaacacaacaccggaatctggacctagcattcctcagattctacatatgatcaacgggagtgatggaagcccttcttctagcaagaaatctggactccagcaattaattgaagcctctgtagctaacgaggaatcagtttggaccaagtacttcaatcaaattttgacggttgttcttgaagtgctcgatgacgaagatttttcaatcaaagagcttgctctttcattgatttctgaaatgctaaagagccagaaagatgccatggaagactctgttgaaatagtgatcgaaaagctgcttcatgtctcaaaggacaccgttccaaaagtttccactgaagctgagcaatgtttgaccacagtcttgtcccaatacgatcctttcagatgcttaagcgttattgtcccattattggtgacggaagatgagaaaactcttgtcgcttgcataaattgtttaacgaagcttgtgggtaggctctcgcaagaggaattaatggatcaattgtcgtcttttttgcctgcggtttttgaagcatttgggagccaaagcgcggatgtccgcaagacagtggtgttctgtctagtagacatatatataatgcttgggaaagcatttttgccgtatttggaaggtctaaacagcacgcaggttcgtctagtgaccatctatgcaaaccggatctcgcaggctagaaacggtgcccctatcgacgcagacacctgacgagccgcttgtacttatggttcagtgggtttatcttgtgtcttggggtcatattcattattgtttattttgtatatgggtgtgttttccgcgtttcaattttttgggtgtaattttgcaaattggtttttccatttgttgttgcagtgtgtggtctattttgagttgttttgggggaatgtatttattgctttcctctcgtaggacaaaaaaaaaaaatgtattttgacctcgcaactgatgattaaatacctttattagtg

SEQ ID NO: 85573 - protein, 1504 aa, Arabidopsis thaliana
  peptide (1)..(1504): Ceres Seq. ID no. 12681111
  misc_feature (1154)..(1504): Homolog of NCBI NO: 25411970 NR Description: hypothetical protein At2g20190 [imported] - thaliana >gi|4580455|gb|AAD24379.1| unknown protein [Arabidopsis
  misc_feature (66)..(229): Homolog of NCBI NO: 25411971 NR Description: hypothetical protein At2g20200 [imported] - thaliana >gi|4512714|gb|AAD21767.1| hypothetical protein
  misc_feature (304)..(726): Homolog of NCBI NO: 31563537 NR Description: CLIP-associating protein 1; Drosophila 'multiple
  misc_feature (62)..(375): Homolog of NCBI NO: 31563537 NR Description: CLIP-associating protein 1; Drosophila 'multiple
  misc_feature (1291)..(1503): Homolog of NCBI NO: 31563537 NR Description: CLIP-associating protein 1; Drosophila 'multiple
  misc_feature (287)..(1496): Homolog of NCBI NO: 24667856 NR Description: chromosome bows CG32435-PA
  misc_feature (71)..(286): Homolog of NCBI NO: 24667856 NR Description: chromosome bows CG32435-PA
  misc_feature (287)..(1496): Homolog of NCBI NO: 7527326 NR Description: microtubule associated-protein orbit [Drosophila
  misc_feature (71)..(286): Homolog of NCBI NO: 7527326 NR Description: microtubule associated-protein orbit [Drosophila
  misc_feature (304)..(726): Homolog of NCBI NO: 7513102 NR Description: KIAA0622 protein - human (fragment)
THRTQHTLSLSLSLRFSLTVHRIRHWIDSNLVCVFFPIPLIRDFSRSERRSVRSESSVGGLVKKKMEEALEMARAKDTKERMAAVERLHQLLEASRKSLSPAEVTSLVDSCLDLLKDSNFRVSQGALQALASAAVLAGEHLKLHLNALVPAVVERLGDSKQPVRDAARRLLTTLMEVSSPTIIVERAGSYAWMHKSWRVREEFARTVTSAIGLFASTELPLQRVILAPILQMLNDPNQAVREAAILCIEEMYMQGGSQFREELQRHHLPSYMVKDINARLERIEPQLRSTDGRSAHHVVNEVKASSVNPKKSSPRAKAPTRENSLFGGDADITEKPIEPIKVYSEKELIREFEKIAATLVPEKDWSMRISAMRRVEGLVAGGATDYSCFRGLLKQLVGPLSTQLADRRSTIVKQACHLLCLLSKELLGDFEACAETFIPVLFKLVVITVLVIAESADNCIKTMLRNCKAARVLPRIAESAKHDRNAILRARCCEYALLTLEHWPDAPEIQRSVDLYEDLIRCCVADAMSEVRATARMCYRMFAKTWPDRSRRLFSSFDPVIQRLINEEDGGIHRRHASPSVRERHSQPSFSQTSAPSNLPGYGTSAIVAMDRSSNLSSGGSLSSGLLLSQSKDVNKGSERSLESVLQSSKQKVSAIESMLRGLHISDRQNPAALRSSSLDLGVDPPSSRDPPFHAVAPASNSHTSSAAAESTHSINKGSNRNGGLGLSDIITQIQASKDSGRSSYRGNLLSESHPTFSSLTAKRGSERNERSSLEESNDAREVRRFMAGHFDRQQMDTAYRDLTFRESNASHVPNFQRPLLRKNVGGRMSAGRRRSFDDSQLQIGDISNFVDGPASLNEALNDGLNSSSDWCARVAAFNFLQTLLQQGPKGAQEVIQSFEKVMKLFLRHLDDPHHKVAQAALSTLADLIPSCRKPFESYMERVLPHVFSRLIDPKEVVRQPCSSTLEIVSKTYSVDSLLPALLRSLDEQRSPKAKLAVIEFAINSFNRYAGNPEISGNSGILKLWLAKLTPLTRDKNTKLKEASITCIISVYNHYDSAGLLNYILSLSVEEQNSLRRALKQYTPRIEVDLLNYMQSKKEKQRIKSYDPSDAIGTSSEEGYAGASKKNIFLGRYSGGSIDSDSGRKWSSSQEPTMITGGVGQNVSSGTQEKLYQNVRTGISSASDLLNPKDSDYTFASAGQNSISRTSPNGSSENIEILDDLSPPHLEKNGLNLTSVDSLEGRHENEVSRELDLGHYMLTSIKVNTTPESGPSIPQILHMINGSDGSPSSSKKSGLQQLIEASVANEESVWTKYFNQILTVVLEVLDDEDFSIKELALSLISEMLKSQKDAMEDSVEIVIEKLLHVSKDTVPKVSTEAEQCLTTVLSQYDPFRCLSVIVPLLVTEDEKTLVACINCLTKLVGRLSQEELMDQLSSFLPAVFEAFGSQSADVRKTVVFCLVDIYIMLGKAFLPYLEGLNSTQVRLVTIYANRISQARNGAPIDADT

SEQ ID NO: 85574 - protein, 1439 aa, Arabidopsis thaliana
  peptide (1)..(1439): Ceres Seq. ID no. 12681112
  misc_feature (1089)..(1439): Homolog of NCBI NO: 25411970 NR Description: hypothetical protein At2g20190 [imported] - thaliana >gi|4580455|gb|AAD24379.1| unknown protein [Arabidopsis
  misc_feature (1)..(164): Homolog of NCBI NO: 25411971 NR Description: hypothetical protein At2g20200 [imported] - thaliana >gi|4512714|gb|AAD21767.1| hypothetical protein
  misc_feature (239)..(661): Homolog of NCBI NO: 31563537 NR Description: CLIP-associating protein 1; Drosophila 'multiple
  misc_feature (1)..(310): Homolog of NCBI NO: 31563537 NR Description: CLIP-associating protein 1; Drosophila 'multiple
  misc_feature (1226)..(1438): Homolog of NCBI NO: 31563537 NR Description: CLIP-associating protein 1; Drosophila 'multiple
  misc_feature (222)..(1431): Homolog of NCBI NO: 24667856 NR Description: chromosome bows CG32435-PA
  misc_feature (6)..(221): Homolog of NCBI NO: 24667856 NR Description: chromosome bows CG32435-PA
  misc_feature (222)..(1431): Homolog of NCBI NO: 7527326 NR Description: microtubule associated-protein orbit [Drosophila
  misc_feature (6)..(221): Homolog of NCBI NO: 7527326 NR Description: microtubule associated-protein orbit [Drosophila
  misc_feature (239)..(661): Homolog of NCBI NO: 7513102 NR Description: KIAA0622 protein - human (fragment)
MEEALEMARAKDTKERMAAVERLHQLLEASRKSLSPAEVTSLVDSCLDLLKDSNFRVSQGALQALASAAVLAGEHLKLHLNALVPAVVERLGDSKQPVRDAARRLLTTLMEVSSPTIIVERAGSYAWMHKSWRVREEFARTVTSAIGLFASTELPLQRVILAPILQMLNDPNQAVREAAILCIEEMYMQGGSQFREELQRHHLPSYMVKDINARLERIEPQLRSTDGRSAHHVVNEVKASSVNPKKSSPRAKAPTRENSLFGGDADITEKPIEPIKVYSEKELIREFEKIAATLVPEKDWSMRISAMRRVEGLVAGGATDYSCFRGLLKQLVGPLSTQLADRRSTIVKQACHLLCLLSKELLGDFEACAETFIPVLFKLVVITVLVIAESADNCIKTMLRNCKAARVLPRIAESAKHDRNAILRARCCEYALLTLEHWPDAPEIQRSVDLYEDLIRCCVADAMSEVRATARMCYRMFAKTWPDRSRRLFSSFDPVIQRLINEEDGGIHRRHASPSVRERHSQPSFSQTSAPSNLPGYGTSAIVAMDRSSNLSSGGSLSSGLLLSQSKDVNKGSERSLESVLQSSKQKVSAIESMLRGLHISDRQNPAALRSSSLDLGVDPPSSRDPPFHAVAPASNSHTSSAAAESTHSINKGSNRNGGLGLSDIITQIQASKDSGRSSYRGNLLSESHPTFSSLTAKRGSERNERSSLEESNDAREVRRFMAGHFDRQQMDTAYRDLTFRESNASHVPNFQRPLLRKNVGGRMSAGRRRSFDDSQLQIGDISNFVDGPASLNEALNDGLNSSSDWCARVAAFNFLQTLLQQGPKGAQEVIQSFEKVMKLFLRHLDDPHHKVAQAALSTLADLIPSCRKPFESYMERVLPHVFSRLIDPKEVVRQPCSSTLEIVSKTYSVDSLLPALLRSLDEQRSPKAKLAVIEFAINSFNRYAGNPEISGNSGILKLWLAKLTPLTRDKNTKLKEASITCIISVYNHYDSAGLLNYILSLSVEEQNSLRRALKQYTPRIEVDLLNYMQSKKEKQRIKSYDPSDAIGTSSEEGYAGASKKNIFLGRYSGGSIDSDSGRKWSSSQEPTMITGGVGQNVSSGTQEKLYQNVRTGISSASDLLNPKDSDYTFASAGQNSISRTSPNGSSENIEILDDLSPPHLEKNGLNLTSVDSLEGRHENEVSRELDLGHYMLTSIKVNTTPESGPSIPQILHMINGSDGSPSSSKKSGLQQLIEASVANEESVWTKYFNQILTVVLEVLDDEDFSIKELALSLISEMLKSQKDAMEDSVEIVIEKLLHVSKDTVPKVSTEAEQCLTTVLSQYDPFRCLSVIVPLLVTEDEKTLVACINCLTKLVGRLSQEELMDQLSSFLPAVFEAFGSQSADVRKTVVFCLVDIYIMLGKAFLPYLEGLNSTQVRLVTIYANRISQARNGAPIDADT

SEQ ID NO: 85575 - protein, 1433 aa, Arabidopsis thaliana
  peptide (1)..(1433): Ceres Seq. ID no. 12681113
  misc_feature (1083)..(1433): Homolog of NCBI NO: 25411970 NR Description: hypothetical protein At2g20190 [imported] - thaliana >gi|4580455|gb|AAD24379.1| unknown protein [Arabidopsis
  misc_feature (1)..(158): Homolog of NCBI NO: 25411971 NR Description: hypothetical protein At2g20200 [imported] - thaliana >gi|4512714|gb|AAD21767.1| hypothetical protein
  misc_feature (233)..(655): Homolog of NCBI NO: 31563537 NR Description: CLIP-associating protein 1; Drosophila 'multiple
  misc_feature (1)..(304): Homolog of NCBI NO: 31563537 NR Description: CLIP-associating protein 1; Drosophila 'multiple
  misc_feature (1220)..(1432): Homolog of NCBI NO: 31563537 NR Description: CLIP-associating protein 1; Drosophila 'multiple
  misc_feature (216)..(1425): Homolog of NCBI NO: 24667856 NR Description: chromosome bows CG32435-PA
  misc_feature (1)..(215): Homolog of NCBI NO: 24667856 NR Description: chromosome bows CG32435-PA
  misc_feature (216)..(1425): Homolog of NCBI NO: 7527326 NR Description: microtubule associated-protein orbit [Drosophila
  misc_feature (1)..(215): Homolog of NCBI NO: 7527326 NR Description: microtubule associated-protein orbit [Drosophila
  misc_feature (233)..(655): Homolog of NCBI NO: 7513102 NR Description: KIAA0622 protein - human (fragment)
MARAKDTKERMAAVERLHQLLEASRKSLSPAEVTSLVDSCLDLLKDSNFRVSQGALQALASAAVLAGEHLKLHLNALVPAVVERLGDSKQPVRDAARRLLTTLMEVSSPTIIVERAGSYAWMHKSWRVREEFARTVTSAIGLFASTELPLQRVILAPILQMLNDPNQAVREAAILCIEEMYMQGGSQFREELQRHHLPSYMVKDINARLERIEPQLRSTDGRSAHHVVNEVKASSVNPKKSSPRAKAPTRENSLFGGDADITEKPIEPIKVYSEKELIREFEKIAATLVPEKDWSMRISAMRRVEGLVAGGATDYSCFRGLLKQLVGPLSTQLADRRSTIVKQACHLLCLLSKELLGDFEACAETFIPVLFKLVVITVLVIAESADNCIKTMLRNCKAARVLPRIAESAKHDRNAILRARCCEYALLTLEHWPDAPEIQRSVDLYEDLIRCCVADAMSEVRATARMCYRMFAKTWPDRSRRLFSSFDPVIQRLINEEDGGIHRRHASPSVRERHSQPSFSQTSAPSNLPGYGTSAIVAMDRSSNLSSGGSLSSGLLLSQSKDVNKGSERSLESVLQSSKQKVSAIESMLRGLHISDRQNPAALRSSSLDLGVDPPSSRDPPFHAVAPASNSHTSSAAAESTHSINKGSNRNGGLGLSDIITQIQASKDSGRSSYRGNLLSESHPTFSSLTAKRGSERNERSSLEESNDAREVRRFMAGHFDRQQMDTAYRDLTFRESNASHVPNFQRPLLRKNVGGRMSAGRRRSFDDSQLQIGDISNFVDGPASLNEALNDGLNSSSDWCARVAAFNFLQTLLQQGPKGAQEVIQSFEKVMKLFLRHLDDPHHKVAQAALSTLADLIPSCRKPFESYMERVLPHVFSRLIDPKEVVRQPCSSTLEIVSKTYSVDSLLPALLRSLDEQRSPKAKLAVIEFAINSFNRYAGNPEISGNSGILKLWLAKLTPLTRDKNTKLKEASITCIISVYNHYDSAGLLNYILSLSVEEQNSLRRALKQYTPRIEVDLLNYMQSKKEKQRIKSYDPSDAIGTSSEEGYAGASKKNIFLGRYSGGSIDSDSGRKWSSSQEPTMITGGVGQNVSSGTQEKLYQNVRTGISSASDLLNPKDSDYTFASAGQNSISRTSPNGSSENIEILDDLSPPHLEKNGLNLTSVDSLEGRHENEVSRELDLGHYMLTSIKVNTTPESGPSIPQILHMINGSDGSPSSSKKSGLQQLIEASVANEESVWTKYFNQILTVVLEVLDDEDFSIKELALSLISEMLKSQKDAMEDSVEIVIEKLLHVSKDTVPKVSTEAEQCLTTVLSQYDPFRCLSVIVPLLVTEDEKTLVACINCLTKLVGRLSQEELMDQLSSFLPAVFEAFGSQSADVRKTVVFCLVDIYIMLGKAFLPYLEGLNSTQVRLVTIYANRISQARNGAPIDADT

SEQ ID NO: 85576 - DNA, 1313 bp, Arabidopsis thaliana
  misc_feature (1)..(1313): Ceres Seq. ID no. 12681133
  misc_feature: MA Experiment ID: 108464 Result: Up-regulated in Transcription
  misc_feature: MA Experiment 108464 PARAMETER Experiment Name: At_Germinating_Seeds_cDNA_P Parameter: Age (day) Value: 4 vs. 0
  misc_feature: MA Experiment 108464 PARAMETER Experiment Name: At_Germinating_Seeds_cDNA_P Parameter: Tissue Value: Germinating Seeds
  misc_feature: MA Experiment ID: 108473 Result: Up-regulated in Transcription
  misc_feature: MA Experiment 108473 PARAMETER Experiment Name: At_Drought_Flowers_cDNA_P Parameter: Timepoint (hr) Value: 7 d
  misc_feature: MA Experiment 108473 PARAMETER Experiment Name: At_Drought_Flowers_cDNA_P Parameter: Tissue Value: Flower
  misc_feature: MA Experiment 108473 PARAMETER Experiment Name: At_Drought_Flowers_cDNA_P Parameter: Treatment Value: Drought vs. No Drought
  misc_feature: MA Experiment ID: 108488 Result: Down-regulated in Transcription
  misc_feature: MA Experiment ID: 108501 Result: Up-regulated in Transcription
  misc_feature: MA Experiment 108501 PARAMETER Experiment Name: At_ap2_floral_buds_cDNA_P Parameter: Plant Line Value: ap2 (Ler.)
  misc_feature: MA Experiment 108501 PARAMETER Experiment Name: At_ap2_floral_buds_cDNA_P Parameter: Tissue Value: Closed Flower
  misc_feature: MA Experiment ID: 108576 Result: Up-regulated in Transcription
  misc_feature: MA Experiment 108576 PARAMETER Experiment Name: At_42deg_Heat_cDNA_P Parameter: Temperature (deg C) Value: 42 vs. 22
  misc_feature: MA Experiment 108576 PARAMETER Experiment Name: At_42deg_Heat_cDNA_P Parameter: Timepoint (hr) Value: 1
  misc_feature: MA Experiment 108576 PARAMETER Experiment Name: At_42deg_Heat_cDNA_P Parameter: Tissue Value: Aerial
  misc_feature: MA Experiment ID: 108577 Result: Up-regulated in Transcription
  misc_feature: MA Experiment 108577 PARAMETER Experiment Name: At_42deg_Heat_cDNA_P Parameter: Temperature (deg C) Value: 42 vs. 22
  misc_feature: MA Experiment 108577 PARAMETER Experiment Name: At_42deg_Heat_cDNA_P Parameter: Timepoint (hr) Value: 6
  misc_feature: MA Experiment 108577 PARAMETER Experiment Name: At_42deg_Heat_cDNA_P Parameter: Tissue Value: Aerial
  misc_feature: MA Experiment ID: 108585 Result: Up-regulated in Transcription
  misc_feature: MA Experiment 108585 PARAMETER Experiment Name: At_5mM_NaNP_cDNA_P Parameter: Timepoint (hr) Value: 6
  misc_feature: MA Experiment 108585 PARAMETER Experiment Name: At_5mM_NaNP_cDNA_P Parameter: Tissue Value: Aerial
  misc_feature: MA Experiment 108585 PARAMETER Experiment Name: At_5mM_NaNP_cDNA_P Parameter: Treatment Value: null
  misc_feature: MA Experiment ID: 108595 Result: Up-regulated in Transcription
  misc_feature: MA Experiment 108595 PARAMETER Experiment Name: At_Ler-pi_Ovule_cDNA_P Parameter: Plant Line Value: null
  misc_feature: MA Experiment ID: 108607 Result: Up-regulated in Transcription
  misc_feature: MA Experiment 108607 PARAMETER Experiment Name: At_100uM_ABA_cDNA_P Parameter: Timepoint (hr) Value: 4
  misc_feature: MA Experiment 108607 PARAMETER Experiment Name: At_100uM_ABA_cDNA_P Parameter: Tissue Value: Aerial
  misc_feature: MA Experiment 108607 PARAMETER Experiment Name: At_100uM_ABA_cDNA_P Parameter: Treatment Value: 100uM ABA vs. No Treatment
  misc_feature: MA Experiment ID: 108609 Result: Up-regulated in Transcription
  misc_feature: MA Experiment 108609 PARAMETER Experiment Name: At_100uM_ABA_cDNA_P Parameter: Timepoint (hr) Value: 24
  misc_feature: MA Experiment 108609 PARAMETER Experiment Name: At_100uM_ABA_cDNA_P Parameter: Tissue Value: Aerial
  misc_feature: MA Experiment 108609 PARAMETER Experiment Name: At_100uM_ABA_cDNA_P Parameter: Treatment Value: 100uM ABA vs. No Treatment
  misc_feature: MA Experiment ID: 20000070 Result: Up-regulated in Transcription
  misc_feature: MA Experiment 20000070 PARAMETER Experiment Name: At_100uM_ABA_Mutants_cDNA_P Parameter: Plant Line Value: CS24
  misc_feature: MA Experiment 20000070 PARAMETER Experiment Name: At_100uM_ABA_Mutants_cDNA_P Parameter: Timepoint (hr) Value: 6
  misc_feature: MA Experiment 20000070 PARAMETER Experiment Name: At_100uM_ABA_Mutants_cDNA_P Parameter: Tissue Value: Aerial
  misc_feature: MA Experiment 20000070 PARAMETER Experiment Name: At_100uM_ABA_Mutants_cDNA_P Parameter: Treatment Value: 100uM ABA vs. No Treatment
  misc_feature: MA Experiment ID: 20000089 Result: Up-regulated in Transcription
  misc_feature: MA Experiment ID: 20000093 Result: Up-regulated in Transcription
  misc_feature: MA Experiment 20000093 PARAMETER Experiment Name: At_42deg_Heat_cDNA_P Parameter: Temperature (deg C) Value: 42 vs. 22
  misc_feature: MA Experiment 20000093 PARAMETER Experiment Name: At_42deg_Heat_cDNA_P Parameter: Timepoint (hr) Value: 0.5
  misc_feature: MA Experiment 20000093 PARAMETER Experiment Name: At_42deg_Heat_cDNA_P Parameter: Tissue Value: Aerial
  misc_feature: MA Experiment ID: 20000112 Result: Up-regulated in Transcription
  misc_feature: MA Experiment 20000112 PARAMETER Experiment Name: At_42deg_Heat_cDNA_P Parameter: Temperature (deg C) Value: 42 vs. 22
  misc_feature: MA Experiment 20000112 PARAMETER Experiment Name: At_42deg_Heat_cDNA_P Parameter: Timepoint (hr) Value: 2
  misc_feature: MA Experiment 20000112 PARAMETER Experiment Name: At_42deg_Heat_cDNA_P Parameter: Tissue Value: Aerial
  misc_feature: MA Experiment ID: 20000113 Result: Up-regulated in Transcription
  misc_feature: MA Experiment 20000113 PARAMETER Experiment Name: At_42deg_Heat_cDNA_P Parameter: Temperature (deg C) Value: 42 vs. 22
  misc_feature: MA Experiment 20000113 PARAMETER Experiment Name: At_42deg_Heat_cDNA_P Parameter: Timepoint (hr) Value: 8
  misc_feature: MA Experiment 20000113 PARAMETER Experiment Name: At_42deg_Heat_cDNA_P Parameter: Tissue Value: Aerial
  misc_feature: MA Experiment ID: 20000117 Result: Up-regulated in Transcription
  misc_feature: MA Experiment 20000117 PARAMETER Experiment Name: At_100uM_ABA_Mutants_cDNA_P Parameter: Plant Line Value: Columbia
  misc_feature: MA Experiment 20000117 PARAMETER Experiment Name: At_100uM_ABA_Mutants_cDNA_P Parameter: Timepoint (hr) Value: 6
  misc_feature: MA Experiment 20000117 PARAMETER Experiment Name: At_100uM_ABA_Mutants_cDNA_P Parameter: Tissue Value: Aerial
  misc_feature: MA Experiment 20000117 PARAMETER Experiment Name: At_100uM_ABA_Mutants_cDNA_P Parameter: Treatment Value: 100uM ABA vs. No Treatment
  misc_feature: MA Experiment ID: 20000144 Result: Up-regulated in Transcription
  misc_feature: MA Experiment 20000144 PARAMETER Experiment Name: At_42deg_Heat_cDNA_P Parameter: Temperature (deg C) Value: 42 vs. 22
  misc_feature: MA Experiment 20000144 PARAMETER Experiment Name: At_42deg_Heat_cDNA_P Parameter: Timepoint (hr) Value: 1
  misc_feature: MA Experiment 20000144 PARAMETER Experiment Name: At_42deg_Heat_cDNA_P Parameter: Tissue Value: Aerial
  misc_feature: MA Experiment ID: 20000171 Result: Up-regulated in Transcription
  misc_feature: MA Experiment 20000171 PARAMETER Experiment Name: At_42deg_Heat_P Parameter: Age (day) Value: 14
  misc_feature: MA Experiment 20000171 PARAMETER Experiment Name: At_42deg_Heat_P Parameter: Organism Value: A. thaliana
  misc_feature: MA Experiment 20000171 PARAMETER Experiment Name: At_42deg_Heat_P Parameter: Plant Line Value: WS
  misc_feature: MA Experiment 20000171 PARAMETER Experiment Name: At_42deg_Heat_P Parameter: Temperature (deg C) Value: 42 vs. 22
  misc_feature: MA Experiment 20000171 PARAMETER Experiment Name: At_42deg_Heat_P Parameter: Timepoint (hr) Value: 1
  misc_feature: MA Experiment 20000171 PARAMETER Experiment Name: At_42deg_Heat_P Parameter: Tissue Value: Aerial
  misc_feature: MA Experiment ID: 20000173 Result: Up-regulated in Transcription
  misc_feature: MA Experiment 20000173 PARAMETER Experiment Name: At_42deg_Heat_P Parameter: Age (day) Value: 14
  misc_feature: MA Experiment 20000173 PARAMETER Experiment Name: At_42deg_Heat_P Parameter: Organism Value: A. thaliana
  misc_feature: MA Experiment 20000173 PARAMETER Experiment Name: At_42deg_Heat_P Parameter: Plant Line Value: WS
  misc_feature: MA Experiment 20000173 PARAMETER Experiment Name: At_42deg_Heat_P Parameter: Temperature (deg C) Value: 42 vs. 22
  misc_feature: MA Experiment 20000173 PARAMETER Experiment Name: At_42deg_Heat_P Parameter: Timepoint (hr) Value: 6
  misc_feature: MA Experiment 20000173 PARAMETER Experiment Name: At_42deg_Heat_P Parameter: Tissue Value: Aerial
  misc_feature: MA Experiment ID: 20000182 Result: Up-regulated in Transcription
  misc_feature: MA Experiment 20000182 PARAMETER Experiment Name: At_2mM_SA_P Parameter: Age (day) Value: 14
  misc_feature: MA Experiment 20000182 PARAMETER Experiment Name: At_2mM_SA_P Parameter: Organism Value: A. thaliana
  misc_feature: MA Experiment 20000182 PARAMETER Experiment Name: At_2mM_SA_P Parameter: Plant Line Value: WS
  misc_feature: MA Experiment 20000182 PARAMETER Experiment Name: At_2mM_SA_P Parameter: Timepoint (hr) Value: 6
  misc_feature: MA Experiment 20000182 PARAMETER Experiment Name: At_2mM_SA_P Parameter: Tissue Value: Aerial
  misc_feature: MA Experiment 20000182 PARAMETER Experiment Name: At_2mM_SA_P Parameter: Treatment Value: 2mM SA vs. No Treatment
  misc_feature: MA Experiment ID: 20000184 Result: Down-regulated in Transcription
  misc_feature: MA Experiment 20000184 PARAMETER Experiment Name: At_Shoots__P Parameter: Age (day) Value: 7
  misc_feature: MA Experiment 20000184 PARAMETER Experiment Name: At_Shoots__P Parameter: Tissue Value: Shoots vs. Whole Plant
  misc_feature: MA Experiment ID: 20000234 Result: Down-regulated in Transcription
  misc_feature: MA Experiment 20000234 PARAMETER Experiment Name: At_Siliques_P Parameter: Age (day) Value: 21
  misc_feature: MA Experiment 20000234 PARAMETER Experiment Name: At_Siliques_P Parameter: Organism Value: A. thaliana
  misc_feature: MA Experiment 20000234 PARAMETER Experiment Name: At_Siliques_P Parameter: Plant Line Value: WS
  misc_feature: MA Experiment 20000234 PARAMETER Experiment Name: At_Siliques_P Parameter: Tissue Value: Less Than 5mm Siliques vs. Whole Plant
  misc_feature: MA Experiment ID: 20000264 Result: Down-regulated in Transcription
  misc_feature: MA Experiment 20000264 PARAMETER Experiment Name: At_Open_Flower_P Parameter: Age (day) Value: 21
  misc_feature: MA Experiment 20000264 PARAMETER Experiment Name: At_Open_Flower_P Parameter: Plant Line Value: WS
  misc_feature: MA Experiment 20000264 PARAMETER Experiment Name: At_Open_Flower_P Parameter: Tissue Value: Open Flower vs. Whole Plant
  misc_feature: MA Experiment ID: 20000265 Result: Down-regulated in Transcription
  misc_feature: MA Experiment 20000265 PARAMETER Experiment Name: At_Open_Flower_P Parameter: Age (day) Value: 21
  misc_feature: MA Experiment 20000265 PARAMETER Experiment Name: At_Open_Flower_P Parameter: Plant Line Value: WS
  misc_feature: MA Experiment 20000265 PARAMETER Experiment Name: At_Open_Flower_P Parameter: Tissue Value: Closed Flower vs. Whole Plant
  misc_feature: MA Experiment ID: 20000267 Result: Up-regulated in Transcription
  misc_feature: MA Experiment 20000267 PARAMETER Experiment Name: At_Drought_P Parameter: Age (day) Value: 7
  misc_feature: MA Experiment 20000267 PARAMETER Experiment Name: At_Drought_P Parameter: Organism Value: A. thaliana
  misc_feature: MA Experiment 20000267 PARAMETER Experiment Name: At_Drought_P Parameter: Plant Line Value: WS
  misc_feature: MA Experiment 20000267 PARAMETER Experiment Name: At_Drought_P Parameter: Timepoint (hr) Value: 6
  misc_feature: MA Experiment 20000267 PARAMETER Experiment Name: At_Drought_P Parameter: Tissue Value: Whole Plant
  misc_feature: MA Experiment 20000267 PARAMETER Experiment Name: At_Drought_P Parameter: Treatment Value: Drought vs. No Drought
  misc_feature: MA Experiment ID: 20000436 Result: Up-regulated in Transcription
  misc_feature: MA Experiment 20000436 PARAMETER Experiment Name: At_Drought_P Parameter: Age (day) Value: 7
  misc_feature: MA Experiment 20000436 PARAMETER Experiment Name: At_Drought_P Parameter: Organism Value: A. thaliana
  misc_feature: MA Experiment 20000436 PARAMETER Experiment Name: At_Drought_P Parameter: Plant Line Value: WS
  misc_feature: MA Experiment 20000436 PARAMETER Experiment Name: At_Drought_P Parameter: Timepoint (hr) Value: 12
  misc_feature: MA Experiment 20000436 PARAMETER Experiment Name: At_Drought_P Parameter: Tissue Value: Whole Plant
  misc_feature: MA Experiment 20000436 PARAMETER Experiment Name: At_Drought_P Parameter: Treatment Value: Drought vs. No Drought
  misc_feature: MA Experiment ID: 20000437 Result: Up-regulated in Transcription
  misc_feature: MA Experiment 20000437 PARAMETER Experiment Name: At_Drought_P Parameter: Age (day) Value: 8
  misc_feature: MA Experiment 20000437 PARAMETER Experiment Name: At_Drought_P Parameter: Organism Value: A. thaliana
  misc_feature: MA Experiment 20000437 PARAMETER Experiment Name: At_Drought_P Parameter: Plant Line Value: WS
  misc_feature: MA Experiment 20000437 PARAMETER Experiment Name: At_Drought_P Parameter: Timepoint (hr) Value: 24
  misc_feature: MA Experiment 20000437 PARAMETER Experiment Name: At_Drought_P Parameter: Tissue Value: Whole Plant
  misc_feature: MA Experiment 20000437 PARAMETER Experiment Name: At_Drought_P Parameter: Treatment Value: Drought vs. No Drought
  misc_feature: MA Experiment ID: 20000438 Result: Down-regulated in Transcription
  misc_feature: MA Experiment 20000438 PARAMETER Experiment Name: At_Shoots__P Parameter: Age (day) Value: 14
  misc_feature: MA Experiment 20000438 PARAMETER Experiment Name: At_Shoots__P Parameter: Tissue Value: Shoots vs. Whole Plant
  misc_feature: MA Experiment ID: 20000443 Result: Up-regulated in Transcription
  misc_feature: MA Experiment 20000443 PARAMETER Experiment Name: At_1uM_BR-BRZ__P Parameter: Tissue Value: Shoot Apices
  misc_feature: MA Experiment 20000443 PARAMETER Experiment Name: At_1uM_BR-BRZ__P Parameter: Treatment Value: 1uM BRZ vs. No Treatment
  misc_feature: MA Experiment ID: 20000453 Result: Up-regulated in Transcription
  misc_feature: MA Experiment 20000453 PARAMETER Experiment Name: At_100uM_ABA_P Parameter: Age (day) Value: 15
  misc_feature: MA Experiment 20000453 PARAMETER Experiment Name: At_100uM_ABA_P Parameter: Organism Value: A. thaliana
  misc_feature: MA Experiment 20000453 PARAMETER Experiment Name: At_100uM_ABA_P Parameter: Plant Line Value: WS
  misc_feature: MA Experiment 20000453 PARAMETER Experiment Name: At_100uM_ABA_P Parameter: Timepoint (hr) Value: 24
  misc_feature: MA Experiment 20000453 PARAMETER Experiment Name: At_100uM_ABA_P Parameter: Tissue Value: Aerial
  misc_feature: MA Experiment 20000453 PARAMETER Experiment Name: At_100uM_ABA_P Parameter: Treatment Value: 100uM ABA vs. No Treatment
  misc_feature: MA Experiment ID: 20000709 Result: Up-regulated in Transcription
  misc_feature: MA Experiment 20000709 PARAMETER Experiment Name: At_15mM_NH4NO3_L-to-H_P Parameter: Age (hr) Value: 14
  misc_feature: MA Experiment 20000709 PARAMETER Experiment Name: At_15mM_NH4NO3_L-to-H_P Parameter: Organism Value: A. thaliana
  misc_feature: MA Experiment 20000709 PARAMETER Experiment Name: At_15mM_NH4NO3_L-to-H_P Parameter: Plant Line Value: WS
  misc_feature: MA Experiment 20000709 PARAMETER Experiment Name: At_15mM_NH4NO3_L-to-H_P Parameter: Timepoint (hr) Value: 4
  misc_feature: MA Experiment 20000709 PARAMETER Experiment Name: At_15mM_NH4NO3_L-to-H_P Parameter: Tissue Value: Aerial
  misc_feature: MA Experiment 20000709 PARAMETER Experiment Name: At_15mM_NH4NO3_L-to-H_P Parameter: Treatment Value: 15mM NH4NO3 vs. 30mM Mannitol
  misc_feature: MA Experiment ID: 20001248 Result: Down-regulated in Transcription
  misc_feature: MA Experiment 20001248 PARAMETER Experiment Name: At_Far-red-induction_P Parameter: Age (day) Value: 7
  misc_feature: MA Experiment 20001248 PARAMETER Experiment Name: At_Far-red-induction_P Parameter: Light Value: Far-red vs. White
  misc_feature: MA Experiment 20001248 PARAMETER Experiment Name: At_Far-red-induction_P Parameter: Organism Value: A. thaliana
  misc_feature: MA Experiment 20001248 PARAMETER Experiment Name: At_Far-red-induction_P Parameter: Plant Line Value: Columbia
  misc_feature: MA Experiment 20001248 PARAMETER Experiment Name: At_Far-red-induction_P Parameter: Timepoint (hr) Value: 4
  misc_feature: MA Experiment 20001248 PARAMETER Experiment Name: At_Far-red-induction_P Parameter: Tissue Value: Whole Plant
  misc_feature: MA Experiment ID: 20001450 Result: Down-regulated in Transcription
  misc_feature: MA Experiment 20001450 PARAMETER Experiment Name: At_Far-red-induction_P Parameter: Age (day) Value: 7
  misc_feature: MA Experiment 20001450 PARAMETER Experiment Name: At_Far-red-induction_P Parameter: Light Value: Far-red vs. White
  misc_feature: MA Experiment 20001450 PARAMETER Experiment Name: At_Far-red-induction_P Parameter: Organism Value: A. thaliana
  misc_feature: MA Experiment 20001450 PARAMETER Experiment Name: At_Far-red-induction_P Parameter: Plant Line Value: Columbia
  misc_feature: MA Experiment 20001450 PARAMETER Experiment Name: At_Far-red-induction_P Parameter: Timepoint (hr) Value: 8
  misc_feature: MA Experiment 20001450 PARAMETER Experiment Name: At_Far-red-induction_P Parameter: Tissue Value: Whole Plant
  misc_feature: MA Experiment ID: 20001554 Result: Up-regulated in Transcription
  misc_feature: MA Experiment 20001554 PARAMETER Experiment Name: At_Drought_Soil_Dry_P Parameter: Age (day) Value: 21
  misc_feature: MA Experiment 20001554 PARAMETER Experiment Name: At_Drought_Soil_Dry_P Parameter: Organism Value: A. thaliana
  misc_feature: MA Experiment 20001554 PARAMETER Experiment Name: At_Drought_Soil_Dry_P Parameter: Plant Line Value: WS
  misc_feature: MA Experiment 20001554 PARAMETER Experiment Name: At_Drought_Soil_Dry_P Parameter: Post Timepoint (hr) Value: None
  misc_feature: MA Experiment 20001554 PARAMETER Experiment Name: At_Drought_Soil_Dry_P Parameter: Post-Treatment Value: None
  misc_feature: MA Experiment 20001554 PARAMETER Experiment Name: At_Drought_Soil_Dry_P Parameter: Timepoint (day) Value: 7
  misc_feature: MA Experiment 20001554 PARAMETER Experiment Name: At_Drought_Soil_Dry_P Parameter: Treatment Value: Drought vs. No Drought
  misc_feature: MA Experiment ID: 20001555 Result: Up-regulated in Transcription
  misc_feature: MA Experiment 20001555 PARAMETER Experiment Name: At_Drought_Soil_Dry_P Parameter: Age (day) Value: 24
  misc_feature: MA Experiment 20001555 PARAMETER Experiment Name: At_Drought_Soil_Dry_P Parameter: Organism Value: A. thaliana
  misc_feature: MA Experiment 20001555 PARAMETER Experiment Name: At_Drought_Soil_Dry_P Parameter: Plant Line Value: WS
  misc_feature: MA Experiment 20001555 PARAMETER Experiment Name: At_Drought_Soil_Dry_P Parameter: Post Timepoint (hr) Value: None
  misc_feature: MA Experiment 20001555 PARAMETER Experiment Name: At_Drought_Soil_Dry_P Parameter: Post-Treatment Value: None
  misc_feature: MA Experiment 20001555 PARAMETER Experiment Name: At_Drought_Soil_Dry_P Parameter: Timepoint (day) Value: 10
  misc_feature: MA Experiment 20001555 PARAMETER Experiment Name: At_Drought_Soil_Dry_P Parameter: Treatment Value: Drought vs. No Drought
  misc_feature: MA Experiment ID: 20001768 Result: Up-regulated in Transcription
  misc_feature: MA Experiment 20001768 PARAMETER Experiment Name: At_Far-red-enriched-adult_P Parameter: Age (day) Value: 28
  misc_feature: MA Experiment 20001768 PARAMETER Experiment Name: At_Far-red-enriched-adult_P Parameter: Light Value: Far-red enriched vs. White
  misc_feature: MA Experiment 20001768 PARAMETER Experiment Name: At_Far-red-enriched-adult_P Parameter: Organism Value: A. thaliana
  misc_feature: MA Experiment 20001768 PARAMETER Experiment Name: At_Far-red-enriched-adult_P Parameter: Plant Line Value: Columbia
  misc_feature: MA Experiment 20001768 PARAMETER Experiment Name: At_Far-red-enriched-adult_P Parameter: Timepoint (hr) Value: 1
  misc_feature: MA Experiment 20001768 PARAMETER Experiment Name: At_Far-red-enriched-adult_P Parameter: Tissue Value: Aerial
  misc_feature: MA Experiment ID: 20001772 Result: Down-regulated in Transcription
  misc_feature: MA Experiment 20001772 PARAMETER Experiment Name: At_Far-red-enriched-adult_P Parameter: Age (day) Value: 29
  misc_feature: MA Experiment 20001772 PARAMETER Experiment Name: At_Far-red-enriched-adult_P Parameter: Light Value: Far-red enriched vs. White
  misc_feature: MA Experiment 20001772 PARAMETER Experiment Name: At_Far-red-enriched-adult_P Parameter: Organism Value: A. thaliana
  misc_feature: MA Experiment 20001772 PARAMETER Experiment Name: At_Far-red-enriched-adult_P Parameter: Plant Line Value: Columbia
  misc_feature: MA Experiment 20001772 PARAMETER Experiment Name: At_Far-red-enriched-adult_P Parameter: Timepoint (hr) Value: 24
  misc_feature: MA Experiment 20001772 PARAMETER Experiment Name: At_Far-red-enriched-adult_P Parameter: Tissue Value: Aerial
  misc_feature: MA Experiment ID: 20001906 Result: Up-regulated in Transcription
  misc_feature: MA Experiment 20001906 PARAMETER Experiment Name: At_Drought_Reproduction_P Parameter: Age (day) Value: 35
  misc_feature: MA Experiment 20001906 PARAMETER Experiment Name: At_Drought_Reproduction_P Parameter: Organism Value: A. thaliana
  misc_feature: MA Experiment 20001906 PARAMETER Experiment Name: At_Drought_Reproduction_P Parameter: Plant Line Value: WS
  misc_feature: MA Experiment 20001906 PARAMETER Experiment Name: At_Drought_Reproduction_P Parameter: Timepoint (day) Value: 5
  misc_feature: MA Experiment 20001906 PARAMETER Experiment Name: At_Drought_Reproduction_P Parameter: Tissue Value: Siliques
  misc_feature: MA Experiment 20001906 PARAMETER Experiment Name: At_Drought_Reproduction_P Parameter: Treatment Value: Drought vs. No Drought
  misc_feature: MA Experiment ID: 20001908 Result: Up-regulated in Transcription
  misc_feature: MA Experiment 20001908 PARAMETER Experiment Name: At_Drought_Reproduction_P Parameter: Age (day) Value: 40
  misc_feature: MA Experiment 20001908 PARAMETER Experiment Name: At_Drought_Reproduction_P Parameter: Organism Value: A. thaliana
  misc_feature: MA Experiment 20001908 PARAMETER Experiment Name: At_Drought_Reproduction_P Parameter: Plant Line Value: WS
  misc_feature: MA Experiment 20001908 PARAMETER Experiment Name: At_Drought_Reproduction_P Parameter: Timepoint (day) Value: 10
  misc_feature: MA Experiment 20001908 PARAMETER Experiment Name: At_Drought_Reproduction_P Parameter: Tissue Value: Siliques
  misc_feature: MA Experiment 20001908 PARAMETER Experiment Name: At_Drought_Reproduction_P Parameter: Treatment Value: Drought vs. No Drought
  misc_feature: MA Experiment ID: 20001910 Result: Up-regulated in Transcription
  misc_feature: MA Experiment 20001910 PARAMETER Experiment Name: At_Drought_Reproduction_P Parameter: Age (day) Value: 37
  misc_feature: MA Experiment 20001910 PARAMETER Experiment Name: At_Drought_Reproduction_P Parameter: Organism Value: A. thaliana
  misc_feature: MA Experiment 20001910 PARAMETER Experiment Name: At_Drought_Reproduction_P Parameter: Plant Line Value: WS
  misc_feature: MA Experiment 20001910 PARAMETER Experiment Name: At_Drought_Reproduction_P Parameter: Timepoint (day) Value: 7
  misc_feature: MA Experiment 20001910 PARAMETER Experiment Name: At_Drought_Reproduction_P Parameter: Tissue Value: Flowers
  misc_feature: MA Experiment 20001910 PARAMETER Experiment Name: At_Drought_Reproduction_P Parameter: Treatment Value: Drought vs. No Drought
  misc_feature: MA Experiment ID: 20001911 Result: Up-regulated in Transcription
  misc_feature: MA Experiment 20001911 PARAMETER Experiment Name: At_Drought_Reproduction_P Parameter: Age (day) Value: 40
  misc_feature: MA Experiment 20001911 PARAMETER Experiment Name: At_Drought_Reproduction_P Parameter: Organism Value: A. thaliana
  misc_feature: MA Experiment 20001911 PARAMETER Experiment Name: At_Drought_Reproduction_P Parameter: Plant Line Value: WS
  misc_feature: MA Experiment 20001911 PARAMETER Experiment Name: At_Drought_Reproduction_P Parameter: Timepoint (day) Value: 10
  misc_feature: MA Experiment 20001911 PARAMETER Experiment Name: At_Drought_Reproduction_P Parameter: Tissue Value: Flowers
  misc_feature: MA Experiment 20001911 PARAMETER Experiment Name: At_Drought_Reproduction_P Parameter: Treatment Value: Drought vs. No Drought
aaaagactatcaaaagaagaaacagagcaaatttcattctctcagaacaaatatatacatattaatcagaatcaggaaaagtgaagaagcgaaagagagaagaagatcggatgggagtggattactacaaagtcctccaagtcgatcgcagcgcaagcgacgatgatctcaagaaagcttatcgtaaacttgccatgaaatggcatcccgacaaaaatcccaacaacaaaaaggatgccgaagctatgttcaaacaaatatccgaagcttacgaggtactaagtgatcctcagaagaaagctgtgtatgatcaatatggtgaggaaggtttgaaagggaacgtgccacctccggatgcaggtggagctacttacttctctaccggggatggtccaacgtccttcaggttcaacccgagaaatgcggatgatatatttgctgagttctttggcttctctagcccatttggcggcggaagaggtggtacaagattctctagcagcatgtttggtgataatatgtttgcttctttcggcgaaggaggaggcggtggtggtggctcgatgcatcacggtggagctaggaaggctgctcctatcgaaaacaagttgccttgtagccttgaagatctttacaaaggaaccaccaaaaagatgaggatttctagggagattgctgatgtcagtggcaagacgatgcaggtggaagagattttgaccattgatgtgaaaccaggatggaagaaaggcacaaagatcacgttcccagagaaaggcaatgagcaacccggtgtgattccagcggatttagtcttcataatcgacgagaagcctcacccggttttcactcgagagggtaacgacctcatagtcacacagaagatctcacttgttgaggccttgactggttacacagtgaacctgactactcttgatggtcggagactgacaattccagtcaccaacgtggtccatcccgagtacgaggaagtggtaccgaaggaagggatgccattgcaaaaagaccagactaagagaggtaacttgaggatcaaatttaacatcaagttccctacaaggttaacctcagagcagaagacaggagtgaagaaacttctcggatgaaatgagttatagtcagcacatttcagacaaaacaatgttgaacagaagaggaacaagaaaatcatgttgcagaccacagggattgtgattaaatactgttgtgacctttttgatcgatttgtaacatatgtacgattggatacctcctaataaatttgttactttctctataatcaaaacgcttctaaa

SEQ ID NO: 85577 - protein, 337 aa, Arabidopsis thaliana; identical to SEQ ID NO: 35916
  peptide (1)..(337): Ceres Seq. ID no. 12681134
  misc_feature (214)..(336): Pfam Name: DnaJ C terminal region Pfam Description: DnaJ C terminal region
  misc_feature (1)..(337): Homolog of NCBI NO: 15225377 NR Description: putative heat shock protein; protein id: supported by cDNA: 25528., supported by cDNA: gi_15982894 thaliana] >gi|25296018|pir||G84590 probable heat shock protein
  misc_feature (1)..(337): Homolog of NCBI NO: 15235310 NR Description: heat-shock protein; protein id: At4g28480.1, by cDNA: gi_14596114, supported by cDNA: gi_20148388 [Arabidopsis
  misc_feature (1)..(337): Homolog of NCBI NO: 6179940 NR Description: DnaJ-like protein [Nicotiana tabacum]
  misc_feature (1)..(337): Homolog of NCBI NO: 11863723 NR Description: DnaJ like protein [Lycopersicon esculentum]
  misc_feature (1)..(336): Homolog of NCBI NO: 15240968 NR Description: heat shock protein 40-like; protein id: supported by cDNA: 114622. [Arabidopsis thaliana]
  misc_feature (1)..(335): Homolog of NCBI NO: 15231987 NR Description: putative heat shock protein; protein id: supported by cDNA: 96785. [Arabidopsis thaliana]
  misc_feature (1)..(335): Homolog of NCBI NO: 21618097 NR Description: putative heat shock protein [Arabidopsis thaliana]
  misc_feature (1)..(337): Homolog of NCBI NO: 34904486 NR Description: putative heat shock protein 40 [Oryza sativa
  misc_feature (1)..(336): Homolog of NCBI NO: 15239455 NR Description: heat-shock protein - like; protein id:
  misc_feature (1)..(337): Homolog of NCBI NO: 15218515 NR Description: putative heat-shock protein; protein id: supported by cDNA: 37036., supported by cDNA: gi_13430679

SEQ ID NO: 85578 - protein, 309 aa, Arabidopsis thaliana; identical to SEQ ID NO: 35917
  peptide (1)..(309): Ceres Seq. ID no. 12681135
  misc_feature (186)..(308): Pfam Name: DnaJ C terminal region Pfam Description: DnaJ C terminal region
  misc_feature (1)..(309): Homolog of NCBI NO: 15225377 NR Description: putative heat shock protein; protein id: supported by cDNA: 25528., supported by cDNA: gi_15982894 thaliana] >gi|25296018|pir||G84590 probable heat shock protein
  misc_feature (1)..(309): Homolog of NCBI NO: 15235310 NR Description: heat-shock protein; protein id: At4g28480.1, by cDNA: gi_14596114, supported by cDNA: gi_20148388 [Arabidopsis
  misc_feature (1)..(309): Homolog of NCBI NO: 6179940 NR Description: DnaJ-like protein [Nicotiana tabacum]
  misc_feature (1)..(309): Homolog of NCBI NO: 11863723 NR Description: DnaJ like protein [Lycopersicon esculentum]
  misc_feature (1)..(308): Homolog of NCBI NO: 15240968 NR Description: heat shock protein 40-like; protein id: supported by cDNA: 114622. [Arabidopsis thaliana]
  misc_feature (1)..(307): Homolog of NCBI NO: 15231987 NR Description: putative heat shock protein; protein id: supported by cDNA: 96785. [Arabidopsis thaliana]
  misc_feature (1)..(307): Homolog of NCBI NO: 21618097 NR Description: putative heat shock protein [Arabidopsis thaliana]
  misc_feature (1)..(309): Homolog of NCBI NO: 34904486 NR Description: putative heat shock protein 40 [Oryza sativa
  misc_feature (1)..(308): Homolog of NCBI NO: 15239455 NR Description: heat-shock protein - like; protein id:
  misc_feature (1)..(309): Homolog of NCBI NO: 15218515 NR Description: putative heat-shock protein; protein id: supported by cDNA: 37036., supported by cDNA: gi_13430679

SEQ ID NO: 85579 - protein, 292 aa, Arabidopsis thaliana; identical to SEQ ID NO: 35918
  peptide (1)..(292): Ceres Seq. ID no. 12681136
  misc_feature (169)..(291): Pfam Name: DnaJ C terminal region Pfam Description: DnaJ C terminal region
  misc_feature (1)..(292): Homolog of NCBI NO: 15225377 NR Description: putative heat shock protein; protein id: supported by cDNA: 25528., supported by cDNA: gi_15982894 thaliana] >gi|25296018|pir||G84590 probable heat shock protein
  misc_feature (1)..(292): Homolog of NCBI NO: 15235310 NR Description: heat-shock protein; protein id: At4g28480.1, by cDNA: gi_14596114, supported by cDNA: gi_20148388 [Arabidopsis
  misc_feature (1)..(292): Homolog of NCBI NO: 6179940 NR Description: DnaJ-like protein [Nicotiana tabacum]
  misc_feature (1)..(292): Homolog of NCBI NO: 11863723 NR Description: DnaJ like protein [Lycopersicon esculentum]
  misc_feature (1)..(291): Homolog of NCBI NO: 15240968 NR Description: heat shock protein 40-like; protein id: supported by cDNA: 114622. [Arabidopsis thaliana]
  misc_feature (1)..(290): Homolog of NCBI NO: 15231987 NR Description: putative heat shock protein; protein id: supported by cDNA: 96785. [Arabidopsis thaliana]
  misc_feature (1)..(290): Homolog of NCBI NO: 21618097 NR Description: putative heat shock protein [Arabidopsis thaliana]
  misc_feature (1)..(292): Homolog of NCBI NO: 34904486 NR Description: putative heat shock protein 40 [Oryza sativa
  misc_feature (1)..(291): Homolog of NCBI NO: 15239455 NR Description: heat-shock protein - like; protein id:
  misc_feature (1)..(292): Homolog of NCBI NO: 15218515 NR Description: putative heat-shock protein; protein id: supported by cDNA: 37036., supported by cDNA: gi_13430679

SEQ ID NO: 85580 - DNA, 1198 bp, Arabidopsis thaliana
  misc_feature (1)..(1198): Ceres Seq. ID no. 12681145
  misc_feature: MA Experiment ID: 108434 Result: Up-regulated in Transcription
  misc_feature: MA Experiment 108434 PARAMETER Experiment Name: At_Root_Tips_cDNA_P Parameter: Tissue Value: Root Tips
  misc_feature: MA Experiment ID: 108461 Result: Down-regulated in Transcription
  misc_feature: MA Experiment 108461 PARAMETER Experiment Name: At_Germinating_Seeds_cDNA_P Parameter: Age (day) Value: 1 vs. 0
  misc_feature: MA Experiment 108461 PARAMETER Experiment Name: At_Germinating_Seeds_cDNA_P Parameter: Tissue Value: Germinating Seeds
  misc_feature: MA Experiment ID: 108462 Result: Down-regulated in Transcription
  misc_feature: MA Experiment 108462 PARAMETER Experiment Name: At_Germinating_Seeds_cDNA_P Parameter: Age (day) Value: 2 vs. 0
  misc_feature: MA Experiment 108462 PARAMETER Experiment Name: At_Germinating_Seeds_cDNA_P Parameter: Tissue Value: Germinating Seeds
  misc_feature: MA Experiment ID: 108463 Result: Down-regulated in Transcription
  misc_feature: MA Experiment 108463 PARAMETER Experiment Name: At_Germinating_Seeds_cDNA_P Parameter: Age (day) Value: 3 vs. 0
  misc_feature: MA Experiment 108463 PARAMETER Experiment Name: At_Germinating_Seeds_cDNA_P Parameter: Tissue Value: Germinating Seeds
  misc_feature: MA Experiment ID: 20000090 Result: Up-regulated in Transcription
  misc_feature: MA Experiment ID: 20000111 Result: Up-regulated in Transcription
  misc_feature: MA Experiment 20000111 PARAMETER Experiment Name: At_42deg_Heat_cDNA_P Parameter: Temperature (deg C) Value: 42 vs. 22
  misc_feature: MA Experiment 20000111 PARAMETER Experiment Name: At_42deg_Heat_cDNA_P Parameter: Timepoint (hr) Value: 6
  misc_feature: MA Experiment 20000111 PARAMETER Experiment Name: At_42deg_Heat_cDNA_P Parameter: Tissue Value: Aerial
  misc_feature: MA Experiment ID: 20000113 Result: Up-regulated in Transcription
  misc_feature: MA Experiment 20000113 PARAMETER Experiment Name: At_42deg_Heat_cDNA_P Parameter: Temperature (deg C) Value: 42 vs. 22
  misc_feature: MA Experiment 20000113 PARAMETER Experiment Name: At_42deg_Heat_cDNA_P Parameter: Timepoint (hr) Value: 8
  misc_feature: MA Experiment 20000113 PARAMETER Experiment Name: At_42deg_Heat_cDNA_P Parameter: Tissue Value: Aerial
  misc_feature: MA Experiment ID: 20000173 Result: Up-regulated in Transcription
  misc_feature: MA Experiment 20000173 PARAMETER Experiment Name: At_42deg_Heat_P Parameter: Age (day) Value: 14
  misc_feature: MA Experiment 20000173 PARAMETER Experiment Name: At_42deg_Heat_P Parameter: Organism Value: A. thaliana
  misc_feature: MA Experiment 20000173 PARAMETER Experiment Name: At_42deg_Heat_P Parameter: Plant Line Value: WS
  misc_feature: MA Experiment 20000173 PARAMETER Experiment Name: At_42deg_Heat_P Parameter: Temperature (deg C) Value: 42 vs. 22
  misc_feature: MA Experiment 20000173 PARAMETER Experiment Name: At_42deg_Heat_P Parameter: Timepoint (hr) Value: 6
  misc_feature: MA Experiment 20000173 PARAMETER Experiment Name: At_42deg_Heat_P Parameter: Tissue Value: Aerial
  misc_feature: MA Experiment ID: 20001757 Result: Up-regulated in Transcription
  misc_feature: MA Experiment 20001757 PARAMETER Experiment Name: At_50mM_NH4NO3_L-to-H_P Parameter: Timepoint (hr) Value: 6
  misc_feature: MA Experiment 20001757 PARAMETER Experiment Name: At_50mM_NH4NO3_L-to-H_P Parameter: Tissue Value: Leaf
  misc_feature: MA Experiment 20001757 PARAMETER Experiment Name: At_50mM_NH4NO3_L-to-H_P Parameter: Treatment Value: 50mM NH4NO3 vs 100mM Mannitol
aaaatcctgatttctgagctttaaaccctaacccctctcttctctcttctccacgccatttccagaattttcagctaatttgcagattatctttgtctctttttcgttgatccaagttttccttgggtgttcgtgaaaagatgaattttaagaatgtcaaagttcccaaaggtcctggtggtggtgttatagctgcggtggttattggggggctcagtctttacggtgctacgcacactctctacaatgtcgatggaggtcatcgagccattgtctttaaccggcttgttggtatcaaagacaaggtctaccctgagggtactcaccttatgattccatggttcgaaaggccaatcatctatgacgttcgtgcaaagccttatctagttgagagcacatctgggagccgtgatctccagatggttaagattgggcttcgggttctcacccgtcctatggctgaccaattaccagaggtataccggtcccttggtgagaattaccgcgagagagtcttgccttctatcatccacgagaccttgaaagctgtggttgctcagtacaacgcaagccaacttattactcagagagagtcggtgagtagagaaatcaggaaaatcctaactctaagagccgcaaacttccacattgcactggatgatgtgtccatcacaggcttgacattcggaaaggagttcacggcagccatagaaggaaagcaggtcgctgctcaagaggccgaacgggctaagttcattgtcgagaaagctgaacaggacaagagaagtgctgttatccgcgccgagggagaagccaagagtgctcagctcattggtcaagcaatcgcaaacaaccaagcgttcttaacactgaggaagatcgaagcagctagagagatcgcacagaccatctctaggtcggcgaacaaggtttacttgagctctaacgatctgttgcttaacctacaggctatggaccttgatgtgaagccgaagaagtagagaatgatatgattaaaccacaccagagctcttcttccataatcgtattttcaattcacggattcttagaccaaaagctatgagttctatcttgtgaatttcagacactatcgtgcgtttgtagtctttcttttgtgagatcaagaagaaaagaaaagatttatgtttttacaagttgtttacatttggtaataatg

SEQ ID NO: 85581 - protein, 286 aa, Arabidopsis thaliana; identical to SEQ ID NO: 27300
  peptide (1)..(286): Ceres Seq. ID no. 12681146
  misc_feature (1)..(286): Homolog of NCBI NO: 15225374 NR Description: putative prohibitin; protein id: At2g20530.1, by cDNA: 6176., supported by cDNA: gi_18252886 [Arabidopsis
  misc_feature (1)..(286): Homolog of NCBI NO: 12751303 NR Description: prohibitin 1-like protein [Brassica napus]
  misc_feature (5)..(285): Homolog of NCBI NO: 15235317 NR Description: prohibitin-like protein; protein id: At4g28510.1, by cDNA: 40688., supported by cDNA: gi_20260657, supported by
  misc_feature (5)..(285): Homolog of NCBI NO: 21593626 NR Description: prohibitin-like protein [Arabidopsis thaliana]
  misc_feature (1)..(286): Homolog of NCBI NO: 15219569 NR Description: putative prohibitin 2; protein id: At1g03860.1, by cDNA: 6208., supported by cDNA: gi_13878108, supported by
  misc_feature (1)..(286): Homolog of NCBI NO: 34394832 NR Description: putative prohibitin [Oryza sativa (japonica
  misc_feature (1)..(286): Homolog of NCBI NO: 7716456 NR Description: prohibitin [Zea mays]
  misc_feature (55)..(286): Homolog of NCBI NO: 34901014 NR Description: putative prohibitin [Oryza sativa (japonica
  misc_feature (1)..(56): Homolog of NCBI NO: 34901014 NR Description: putative prohibitin [Oryza sativa (japonica
  misc_feature (8)..(286): Homolog of NCBI NO: 7716462 NR Description: prohibitin [Zea mays]

SEQ ID NO: 85582 - protein, 223 aa, Arabidopsis thaliana; identical to SEQ ID NO: 27301
  peptide (1)..(223): Ceres Seq. ID no. 12681147
  misc_feature (1)..(223): Homolog of NCBI NO: 15225374 NR Description: putative prohibitin; protein id: At2g20530.1, by cDNA: 6176., supported by cDNA: gi_18252886 [Arabidopsis
  misc_feature (1)..(223): Homolog of NCBI NO: 12751303 NR Description: prohibitin 1-like protein [Brassica napus]
  misc_feature (1)..(222): Homolog of NCBI NO: 15235317 NR Description: prohibitin-like protein; protein id: At4g28510.1, by cDNA: 40688., supported by cDNA: gi_20260657, supported by
  misc_feature (1)..(222): Homolog of NCBI NO: 21593626 NR Description: prohibitin-like protein [Arabidopsis thaliana]
  misc_feature (1)..(223): Homolog of NCBI NO: 15219569 NR Description: putative prohibitin 2; protein id: At1g03860.1, by cDNA: 6208., supported by cDNA: gi_13878108, supported by
  misc_feature (1)..(223): Homolog of NCBI NO: 34394832 NR Description: putative prohibitin [Oryza sativa (japonica
  misc_feature (1)..(223): Homolog of NCBI NO: 7716456 NR Description: prohibitin [Zea mays]
  misc_feature (1)..(223): Homolog of NCBI NO: 34901014 NR Description: putative prohibitin [Oryza sativa (japonica
  misc_feature (1)..(223): Homolog of NCBI NO: 7716462 NR Description: prohibitin [Zea mays]
  misc_feature (1)..(213): Homolog of NCBI NO: 15241424 NR Description: prohibitin; protein id: At5g44140.1 [Arabidopsis

SEQ ID NO: 85583 - protein, 193 aa, Arabidopsis thaliana; identical to SEQ ID NO: 27302
  peptide (1)..(193): Ceres Seq. ID no. 12681148
  misc_feature (1)..(193): Homolog of NCBI NO: 15225374 NR Description: putative prohibitin; protein id: At2g20530.1, by cDNA: 6176., supported by cDNA: gi_18252886 [Arabidopsis
  misc_feature (1)..(193): Homolog of NCBI NO: 12751303 NR Description: prohibitin 1-like protein [Brassica napus]
  misc_feature (1)..(192): Homolog of NCBI NO: 15235317 NR Description: prohibitin-like protein; protein id: At4g28510.1, by cDNA: 40688., supported by cDNA: gi_20260657, supported by
  misc_feature (1)..(192): Homolog of NCBI NO: 21593626 NR Description: prohibitin-like protein [Arabidopsis thaliana]
  misc_feature (1)..(193): Homolog of NCBI NO: 15219569 NR Description: putative prohibitin 2; protein id: At1g03860.1, by cDNA: 6208., supported by cDNA: gi_13878108, supported by
  misc_feature (1)..(193): Homolog of NCBI NO: 34394832 NR Description: putative prohibitin [Oryza sativa (japonica
  misc_feature (1)..(193): Homolog of NCBI NO: 7716456 NR Description: prohibitin [Zea mays]
  misc_feature (1)..(193): Homolog of NCBI NO: 34901014 NR Description: putative prohibitin [Oryza sativa (japonica
  misc_feature (1)..(193): Homolog of NCBI NO: 7716462 NR Description: prohibitin [Zea mays]
  misc_feature (1)..(183): Homolog of NCBI NO: 15241424 NR Description: prohibitin; protein id: At5g44140.1 [Arabidopsis

SEQ ID NO: 85584 - DNA, 1159 bp, Arabidopsis thaliana
  misc_feature (1)..(1159): Ceres Seq. ID no. 12681176
  misc_feature: MA Experiment ID: 108461 Result: Up-regulated in Transcription
  misc_feature: MA Experiment 108461 PARAMETER Experiment Name: At_Germinating_Seeds_cDNA_P Parameter: Age (day) Value: 1 vs. 0
  misc_feature: MA Experiment 108461 PARAMETER Experiment Name: At_Germinating_Seeds_cDNA_P Parameter: Tissue Value: Germinating Seeds
  misc_feature: MA Experiment ID: 108595 Result: Down-regulated in Transcription
  misc_feature: MA Experiment 108595 PARAMETER Experiment Name: At_Ler-pi_Ovule_cDNA_P Parameter: Plant Line Value: null
  misc_feature: MA Experiment ID: 20000069 Result: Up-regulated in Transcription
  misc_feature: MA Experiment 20000069 PARAMETER Experiment Name: At_100uM_ABA_Mutants_cDNA_P Parameter: Plant Line Value: CS23
  misc_feature: MA Experiment 20000069 PARAMETER Experiment Name: At_100uM_ABA_Mutants_cDNA_P Parameter: Timepoint (hr) Value: 6
  misc_feature: MA Experiment 20000069 PARAMETER Experiment Name: At_100uM_ABA_Mutants_cDNA_P Parameter: Tissue Value: Aerial
  misc_feature: MA Experiment 20000069 PARAMETER Experiment Name: At_100uM_ABA_Mutants_cDNA_P Parameter: Treatment Value: 100uM ABA vs. No Treatment
  misc_feature: MA Experiment ID: 20000070 Result: Up-regulated in Transcription
  misc_feature: MA Experiment 20000070 PARAMETER Experiment Name: At_100uM_ABA_Mutants_cDNA_P Parameter: Plant Line Value: CS24
  misc_feature: MA Experiment 20000070 PARAMETER Experiment Name: At_100uM_ABA_Mutants_cDNA_P Parameter: Timepoint (hr) Value: 6
  misc_feature: MA Experiment 20000070 PARAMETER Experiment Name: At_100uM_ABA_Mutants_cDNA_P Parameter: Tissue Value: Aerial
  misc_feature: MA Experiment 20000070 PARAMETER Experiment Name: At_100uM_ABA_Mutants_cDNA_P Parameter: Treatment Value: 100uM ABA vs. No Treatment
  misc_feature: MA Experiment ID: 20000071 Result: Up-regulated in Transcription
  misc_feature: MA Experiment 20000071 PARAMETER Experiment Name: At_100uM_ABA_Mutants_cDNA_P Parameter: Plant Line Value: CS8104
  misc_feature: MA Experiment 20000071 PARAMETER Experiment Name: At_100uM_ABA_Mutants_cDNA_P Parameter: Timepoint (hr) Value: 6
  misc_feature: MA Experiment 20000071 PARAMETER Experiment Name: At_100uM_ABA_Mutants_cDNA_P Parameter: Tissue Value: Aerial
  misc_feature: MA Experiment 20000071 PARAMETER Experiment Name: At_100uM_ABA_Mutants_cDNA_P Parameter: Treatment Value: 100uM ABA vs. No Treatment
  misc_feature: MA Experiment ID: 20000089 Result: Up-regulated in Transcription
  misc_feature: MA Experiment ID: 20000117 Result: Up-regulated in Transcription
  misc_feature: MA Experiment 20000117 PARAMETER Experiment Name: At_100uM_ABA_Mutants_cDNA_P Parameter: Plant Line Value: Columbia
  misc_feature: MA Experiment 20000117 PARAMETER Experiment Name: At_100uM_ABA_Mutants_cDNA_P Parameter: Timepoint (hr) Value: 6
  misc_feature: MA Experiment 20000117 PARAMETER Experiment Name: At_100uM_ABA_Mutants_cDNA_P Parameter: Tissue Value: Aerial
  misc_feature: MA Experiment 20000117 PARAMETER Experiment Name: At_100uM_ABA_Mutants_cDNA_P Parameter: Treatment Value: 100uM ABA vs. No Treatment
  misc_feature: MA Experiment ID: 20000180 Result: Up-regulated in Transcription
  misc_feature: MA Experiment 20000180 PARAMETER Experiment Name: At_Germinating_Seeds_P Parameter: Age (hr) Value: 24 vs. 0
  misc_feature: MA Experiment 20000180 PARAMETER Experiment Name: At_Germinating_Seeds_P Parameter: Tissue Value: Germinating Seeds
  misc_feature: MA Experiment ID: 20000184 Result: Down-regulated in Transcription
  misc_feature: MA Experiment 20000184 PARAMETER Experiment Name: At_Shoots__P Parameter: Age (day) Value: 7
  misc_feature: MA Experiment 20000184 PARAMETER Experiment Name: At_Shoots__P Parameter: Tissue Value: Shoots vs. Whole Plant
  misc_feature: MA Experiment ID: 20000227 Result: Up-regulated in Transcription
  misc_feature: MA Experiment 20000227 PARAMETER Experiment Name: At_Root-Tips-vs-Tops_P Parameter: Tissue Value: Root Tips vs. Root Tops
  misc_feature: MA Experiment ID: 20001451 Result: Down-regulated in Transcription
  misc_feature: MA Experiment 20001451 PARAMETER Experiment Name: At_Far-red-induction_P Parameter: Age (day) Value: 7
  misc_feature: MA Experiment 20001451 PARAMETER Experiment Name: At_Far-red-induction_P Parameter: Light Value: Far-red vs. White
  misc_feature: MA Experiment 20001451 PARAMETER Experiment Name: At_Far-red-induction_P Parameter: Organism Value: A. thaliana
  misc_feature: MA Experiment 20001451 PARAMETER Experiment Name: At_Far-red-induction_P Parameter: Plant Line Value: Columbia
  misc_feature: MA Experiment 20001451 PARAMETER Experiment Name: At_Far-red-induction_P Parameter: Timepoint (hr) Value: 24
  misc_feature: MA Experiment 20001451 PARAMETER Experiment Name: At_Far-red-induction_P Parameter: Tissue Value: Whole Plant
  misc_feature: MA Experiment ID: 20001905 Result: Down-regulated in Transcription
  misc_feature: MA Experiment 20001905 PARAMETER Experiment Name: At_Drought_Reproduction_P Parameter: Age (day) Value: 40
  misc_feature: MA Experiment 20001905 PARAMETER Experiment Name: At_Drought_Reproduction_P Parameter: Organism Value: A. thaliana
  misc_feature: MA Experiment 20001905 PARAMETER Experiment Name: At_Drought_Reproduction_P Parameter: Plant Line Value: WS
  misc_feature: MA Experiment 20001905 PARAMETER Experiment Name: At_Drought_Reproduction_P Parameter: Timepoint (day) Value: 10
  misc_feature: MA Experiment 20001905 PARAMETER Experiment Name: At_Drought_Reproduction_P Parameter: Tissue Value: Rosettes
  misc_feature: MA Experiment 20001905 PARAMETER Experiment Name: At_Drought_Reproduction_P Parameter: Treatment Value: Drought vs. No Drought
  misc_feature: Pfam Name: Aldo_ket_red Pfam Description: Aldo/keto reductase family
gagcagatatttacccaatcagggattcaggaagagaagcagagaaagaaatggagataacactgaacagtggcttcaagatgccgatcgtcggcttaggagtatggagaatggagaaggaagggattcgagaccttatcctcaatgccatcaagatcggctatcgccatctcgactgtgctgctgattataggaatgagaccgaagttggtgatgctcttacagaagcattcaagactggtctggttaagagggaggatctcttcattacaaccaagctatggaattcagaccatggccatgtcattgaggcctgcaaagacagtctcaagaaacttcaacttgattacctcgatctcttcctcgttcattttcccgtagcaacgaaacacaccggagtagggacaaccgatagtgctttgggcgatgacggggtattggacatagacacgaccatctctctggaaactacatggcacgacatggaaaagcttgtttctatgggtttagtccgcagcattggaatcagtaactatgatgtctttctaacgagagattgcttggcttactccaagatcaaacctgctgtgaatcagatcgagacacatccttacttccaacgtgattctcttgtcaaattctgccagaaacatggtatctgtgtcactgctcatactcctctcggaggtgccacagccaatgccgagtggtttggcaccgtgtcatgcctggatgatccagttctcaaagatgtggccgagaagtacaaaaagacagtggcacaagttgtcctgaggtggggaatccagagaaaaacggtggtgataccaaagacatcaaagcctgcgagattggaagagaactttcaggttttcgacttcgaactatcgaaagaggacatggaagtgatcaaaagcatggagaggaaataccgcacgaaccaaccagccaagttttggaacattgatctctacgcttgatcacactctctctatctacatgaataaatgaagcttaagaagataaacaacgagaagaagccatagctttacctgaaacattctcaaatgtttgtgagcctatctttcatacataaactcatgttgttaaacagattatgatttcttaagtactacaatatcacacattgatggaaagt

SEQ ID NO: 85585 - protein, 325 aa, Arabidopsis thaliana
  peptide (1)..(325): Ceres Seq. ID no. 12681177
  misc_feature: Pfam Name: Aldo_ket_red Pfam Description: Aldo/keto reductase family
  misc_feature (17)..(325): Homolog of NCBI NO: 15226489 NR Description: mannose 6-phosphate reductase (NADPH-dependent), protein id: At2g21250.1, supported by cDNA: 33., supported by
  misc_feature (17)..(325): Homolog of NCBI NO: 21592829 NR Description: putative NADPH dependent mannose 6-phosphate
  misc_feature (17)..(325): Homolog of NCBI NO: 15226502 NR Description: mannose 6-phosphate reductase (NADPH-dependent), protein id: At2g21260.1, supported by cDNA: 21730. [Arabidopsis
  misc_feature (17)..(325): Homolog of NCBI NO: 21554266 NR Description: putative NADPH dependent mannose 6-phosphate
  misc_feature (17)..(325): Homolog of NCBI NO: 10334991 NR Description: NADPH-dependent mannose 6-phosphate reductase
  misc_feature (17)..(325): Homolog of NCBI NO: 1835701 NR Description: NADPH-dependent mannose 6-phosphate reductase
  misc_feature (19)..(325): Homolog of NCBI NO: 134153 NR Description: NADP-dependent D-sorbitol-6-phosphate
  misc_feature (61)..(325): Homolog of NCBI NO: 19310934 NR Description: NADP dependent sorbitol 6-phosphate dehydrogenase
  misc_feature (61)..(325): Homolog of NCBI NO: 19310926 NR Description: NADP dependent sorbitol 6-phosphate dehydrogenase
  misc_feature (61)..(323): Homolog of NCBI NO: 19310922 NR Description: NADP dependent sorbitol 6-phosphate dehydrogenase
ADIYPIRDSGREAEKEMEITLNSGFKMPIVGLGVWRMEKEGIRDLILNAIKIGYRHLDCAADYRNETEVGDALTEAFKTGLVKREDLFITTKLWNSDHGHVIEACKDSLKKLQLDYLDLFLVHFPVATKHTGVGTTDSALGDDGVLDIDTTISLETTWHDMEKLVSMGLVRSIGISNYDVFLTRDCLAYSKIKPAVNQIETHPYFQRDSLVKFCQKHGICVTAHTPLGGATANAEWFGTVSCLDDPVLKDVAEKYKKTVAQVVLRWGIQRKTVVIPKTSKPARLEENFQVFDFELSKEDMEVIKSMERKYRTNQPAKFWNIDLYA

SEQ ID NO: 85586 - protein, 309 aa, Arabidopsis thaliana; identical to SEQ ID NO: 25625
  peptide (1)..(309): Ceres Seq. ID no. 12681178
  misc_feature: Pfam Name: Aldo_ket_red Pfam Description: Aldo/keto reductase family
  misc_feature (1)..(309): Homolog of NCBI NO: 15226489 NR Description: mannose 6-phosphate reductase (NADPH-dependent), protein id: At2g21250.1, supported by cDNA: 33., supported by
  misc_feature (1)..(309): Homolog of NCBI NO: 21592829 NR Description: putative NADPH dependent mannose 6-phosphate
  misc_feature (1)..(309): Homolog of NCBI NO: 15226502 NR Description: mannose 6-phosphate reductase (NADPH-dependent), protein id: At2g21260.1, supported by cDNA: 21730. [Arabidopsis
  misc_feature (1)..(309): Homolog of NCBI NO: 21554266 NR Description: putative NADPH dependent mannose 6-phosphate
  misc_feature (1)..(309): Homolog of NCBI NO: 10334991 NR Description: NADPH-dependent mannose 6-phosphate reductase
  misc_feature (1)..(309): Homolog of NCBI NO: 1835701 NR Description: NADPH-dependent mannose 6-phosphate reductase
  misc_feature (3)..(309): Homolog of NCBI NO: 134153 NR Description: NADP-dependent D-sorbitol-6-phosphate
  misc_feature (45)..(309): Homolog of NCBI NO: 19310934 NR Description: NADP dependent sorbitol 6-phosphate dehydrogenase
  misc_feature (45)..(309): Homolog of NCBI NO: 19310926 NR Description: NADP dependent sorbitol 6-phosphate dehydrogenase
  misc_feature (45)..(307): Homolog of NCBI NO: 19310922 NR Description: NADP dependent sorbitol 6-phosphate dehydrogenase

SEQ ID NO: 85587 - protein, 299 aa, Arabidopsis thaliana; identical to SEQ ID NO: 25626
  peptide (1)..(299): Ceres Seq. ID no. 12681179
  misc_feature: Pfam Name: Aldo_ket_red Pfam Description: Aldo/keto reductase family
  misc_feature (1)..(299): Homolog of NCBI NO: 15226489 NR Description: mannose 6-phosphate reductase (NADPH-dependent), protein id: At2g21250.1, supported by cDNA: 33., supported by
  misc_feature (1)..(299): Homolog of NCBI NO: 21592829 NR Description: putative NADPH dependent mannose 6-phosphate
  misc_feature (1)..(299): Homolog of NCBI NO: 15226502 NR Description: mannose 6-phosphate reductase (NADPH-dependent), protein id: At2g21260.1, supported by cDNA: 21730. [Arabidopsis
  misc_feature (1)..(299): Homolog of NCBI NO: 21554266 NR Description: putative NADPH dependent mannose 6-phosphate
  misc_feature (1)..(299): Homolog of NCBI NO: 10334991 NR Description: NADPH-dependent mannose 6-phosphate reductase
  misc_feature (1)..(299): Homolog of NCBI NO: 1835701 NR Description: NADPH-dependent mannose 6-phosphate reductase
  misc_feature (1)..(299): Homolog of NCBI NO: 134153 NR Description: NADP-dependent D-sorbitol-6-phosphate
  misc_feature (35)..(299): Homolog of NCBI NO: 19310934 NR Description: NADP dependent sorbitol 6-phosphate dehydrogenase
  misc_feature (35)..(299): Homolog of NCBI NO: 19310926 NR Description: NADP dependent sorbitol 6-phosphate dehydrogenase
  misc_feature (35)..(297): Homolog of NCBI NO: 19310922 NR Description: NADP dependent sorbitol 6-phosphate dehydrogenase

SEQ ID NO: 85588 - DNA, 1244 bp, Arabidopsis thaliana
  misc_feature (1)..(1244): Ceres Seq. ID no. 12681180
  misc_feature: MA Experiment ID: 108435 Result: Down-regulated in Transcription
  misc_feature: MA Experiment 108435 PARAMETER Experiment Name: At_stm_Mutants_cDNA_P Parameter: Plant Line Value: wt Landsburg vs stm
  misc_feature: MA Experiment 108435 PARAMETER Experiment Name: At_stm_Mutants_cDNA_P Parameter: Tissue Value: Shoot Apical Meristem Region
  misc_feature: MA Experiment ID: 108461 Result: Up-regulated in Transcription
  misc_feature: MA Experiment 108461 PARAMETER Experiment Name: At_Germinating_Seeds_cDNA_P Parameter: Age (day) Value: 1 vs. 0
  misc_feature: MA Experiment 108461 PARAMETER Experiment Name: At_Germinating_Seeds_cDNA_P Parameter: Tissue Value: Germinating Seeds
  misc_feature: MA Experiment ID: 108462 Result: Up-regulated in Transcription
  misc_feature: MA Experiment 108462 PARAMETER Experiment Name: At_Germinating_Seeds_cDNA_P Parameter: Age (day) Value: 2 vs. 0
  misc_feature: MA Experiment 108462 PARAMETER Experiment Name: At_Germinating_Seeds_cDNA_P Parameter: Tissue Value: Germinating Seeds
  misc_feature: MA Experiment ID: 108488 Result: Up-regulated in Transcription
  misc_feature: MA Experiment ID: 108595 Result: Down-regulated in Transcription
  misc_feature: MA Experiment 108595 PARAMETER Experiment Name: At_Ler-pi_Ovule_cDNA_P Parameter: Plant Line Value: null
  misc_feature: MA Experiment ID: 20000069 Result: Down-regulated in Transcription
  misc_feature: MA Experiment 20000069 PARAMETER Experiment Name: At_100uM_ABA_Mutants_cDNA_P Parameter: Plant Line Value: CS23
  misc_feature: MA Experiment 20000069 PARAMETER Experiment Name: At_100uM_ABA_Mutants_cDNA_P Parameter: Timepoint (hr) Value: 6
  misc_feature: MA Experiment 20000069 PARAMETER Experiment Name: At_100uM_ABA_Mutants_cDNA_P Parameter: Tissue Value: Aerial
  misc_feature: MA Experiment 20000069 PARAMETER Experiment Name: At_100uM_ABA_Mutants_cDNA_P Parameter: Treatment Value: 100uM ABA vs. No Treatment
  misc_feature: MA Experiment ID: 20000086 Result: Down-regulated in Transcription
  misc_feature: MA Experiment 20000086 PARAMETER Experiment Name: At_100uM_ABA_Mutants_cDNA_P Parameter: Plant Line Value: CS22
  misc_feature: MA Experiment 20000086 PARAMETER Experiment Name: At_100uM_ABA_Mutants_cDNA_P Parameter: Timepoint (hr) Value: 6
  misc_feature: MA Experiment 20000086 PARAMETER Experiment Name: At_100uM_ABA_Mutants_cDNA_P Parameter: Tissue Value: Aerial
  misc_feature: MA Experiment 20000086 PARAMETER Experiment Name: At_100uM_ABA_Mutants_cDNA_P Parameter: Treatment Value: 100uM ABA vs. No Treatment
  misc_feature: MA Experiment ID: 20000087 Result: Down-regulated in Transcription
  misc_feature: MA Experiment 20000087 PARAMETER Experiment Name: At_100uM_ABA_Mutants_cDNA_P Parameter: Plant Line Value: WS
  misc_feature: MA Experiment 20000087 PARAMETER Experiment Name: At_100uM_ABA_Mutants_cDNA_P Parameter: Timepoint (hr) Value: 6
  misc_feature: MA Experiment 20000087 PARAMETER Experiment Name: At_100uM_ABA_Mutants_cDNA_P Parameter: Tissue Value: Aerial
  misc_feature: MA Experiment 20000087 PARAMETER Experiment Name: At_100uM_ABA_Mutants_cDNA_P Parameter: Treatment Value: 100uM ABA vs. No Treatment
  misc_feature: MA Experiment ID: 20000179 Result: Up-regulated in Transcription
  misc_feature: MA Experiment 20000179 PARAMETER Experiment Name: At_Germinating_Seeds_P Parameter: Age (hr) Value: 6 vs. 0
  misc_feature: MA Experiment 20000179 PARAMETER Experiment Name: At_Germinating_Seeds_P Parameter: Tissue Value: Germinating Seeds
  misc_feature: MA Experiment ID: 20000180 Result: Up-regulated in Transcription
  misc_feature: MA Experiment 20000180 PARAMETER Experiment Name: At_Germinating_Seeds_P Parameter: Age (hr) Value: 24 vs. 0
  misc_feature: MA Experiment 20000180 PARAMETER Experiment Name: At_Germinating_Seeds_P Parameter: Tissue Value: Germinating Seeds
  misc_feature: MA Experiment ID: 20000439 Result: Down-regulated in Transcription
  misc_feature: MA Experiment 20000439 PARAMETER Experiment Name: At_Roots__P Parameter: Age (day) Value: 14 vs. 21
  misc_feature: MA Experiment 20000439 PARAMETER Experiment Name: At_Roots__P Parameter: Organism Value: A. thaliana
  misc_feature: MA Experiment 20000439 PARAMETER Experiment Name: At_Roots__P Parameter: Tissue Value: Roots vs. Whole Plant
  misc_feature: MA Experiment ID: 20000495 Result: Down-regulated in Transcription
  misc_feature: MA Experiment 20000495 PARAMETER Experiment Name: At_Guard_Cells_P Parameter: Harvest Date Value: 8/2/2002
  misc_feature: MA Experiment 20000495 PARAMETER Experiment Name: At_Guard_Cells_P Parameter: Organism Value: A. thaliana
  misc_feature: MA Experiment 20000495 PARAMETER Experiment Name: At_Guard_Cells_P Parameter: Tissue Value: Guard Cells vs. Leaves
  misc_feature: MA Experiment ID: 20001248 Result: Down-regulated in Transcription
  misc_feature: MA Experiment 20001248 PARAMETER Experiment Name: At_Far-red-induction_P Parameter: Age (day) Value: 7
  misc_feature: MA Experiment 20001248 PARAMETER Experiment Name: At_Far-red-induction_P Parameter: Light Value: Far-red vs. White
  misc_feature: MA Experiment 20001248 PARAMETER Experiment Name: At_Far-red-induction_P Parameter: Organism Value: A. thaliana
  misc_feature: MA Experiment 20001248 PARAMETER Experiment Name: At_Far-red-induction_P Parameter: Plant Line Value: Columbia
  misc_feature: MA Experiment 20001248 PARAMETER Experiment Name: At_Far-red-induction_P Parameter: Timepoint (hr) Value: 4
  misc_feature: MA Experiment 20001248 PARAMETER Experiment Name: At_Far-red-induction_P Parameter: Tissue Value: Whole Plant
  misc_feature: MA Experiment ID: 20001450 Result: Down-regulated in Transcription
  misc_feature: MA Experiment 20001450 PARAMETER Experiment Name: At_Far-red-induction_P Parameter: Age (day) Value: 7
  misc_feature: MA Experiment 20001450 PARAMETER Experiment Name: At_Far-red-induction_P Parameter: Light Value: Far-red vs. White
  misc_feature: MA Experiment 20001450 PARAMETER Experiment Name: At_Far-red-induction_P Parameter: Organism Value: A. thaliana
  misc_feature: MA Experiment 20001450 PARAMETER Experiment Name: At_Far-red-induction_P Parameter: Plant Line Value: Columbia
  misc_feature: MA Experiment 20001450 PARAMETER Experiment Name: At_Far-red-induction_P Parameter: Timepoint (hr) Value: 8
  misc_feature: MA Experiment 20001450 PARAMETER Experiment Name: At_Far-red-induction_P Parameter: Tissue Value: Whole Plant
  misc_feature: MA Experiment ID: 20001451 Result: Down-regulated in Transcription
  misc_feature: MA Experiment 20001451 PARAMETER Experiment Name: At_Far-red-induction_P Parameter: Age (day) Value: 7
  misc_feature: MA Experiment 20001451 PARAMETER Experiment Name: At_Far-red-induction_P Parameter: Light Value: Far-red vs. White
  misc_feature: MA Experiment 20001451 PARAMETER Experiment Name: At_Far-red-induction_P Parameter: Organism Value: A. thaliana
  misc_feature: MA Experiment 20001451 PARAMETER Experiment Name: At_Far-red-induction_P Parameter: Plant Line Value: Columbia
  misc_feature: MA Experiment 20001451 PARAMETER Experiment Name: At_Far-red-induction_P Parameter: Timepoint (hr) Value: 24
  misc_feature: MA Experiment 20001451 PARAMETER Experiment Name: At_Far-red-induction_P Parameter: Tissue Value: Whole Plant
gatccaaccagagccatcatcatccttccaatggctattacttgagaactcttctgattaaacatagcaacaacaacaactcttcttctcctctctttctcacttcaatttagcgatggctgcaactgcaatctcttctctttccttcccagctttgggtcaatcggacaagatctccaatttcgcatcttctcgtcctctcgcctccgcaattcgcatctgcacaaagttttctcgcctttctttgaattcgcgttccacttcgaaatctcttattcactgcatgtccaatgttaccgccgatgtgcctcctgtatcagagacaaagtcgaaattcctaaaagcttacaagcgacccatcccgagtatctacaacacggttttgcaggagctcattgtccagcagcatttgatgaggtataagaagacttatcgttatgatcctgtttttgcccttggatttgtcactgtatatgatcagctcatggaaggatatccgagtgatcaagaccgagatgccatttttaaggcttacattgaagccttgaatgaggatcctaagcaataccgaattgatgctcagaagatggaggaatgggcacgaagtcagacttctgcttcactagttgacttttcctctaaagaaggagatattgaagcagttcttaaggacattgcaggaagagctggtagtaaggaggggtttagttacagcaggttcttcgctgttgggctctttcgtttgcttgagcttgcaagtgctactgatccaactgtcttggacaagctttgtgcatccctaaatatcaacaagaaaagcgtggatcgggacctggatgtgtatcgtaacctgctttcaaagcttgtccaagccaaggaattgcttaaggagtatgtcgagagggagaagaagaagcaaggagaaagagcccaatctcagaaggctaacgaaacaatctccaagtgtctgggagatactctatataacccatctttcttggttgaacggaaatcttagaaaatcatttgtgacttctttttttgttttcttagcaacaactatgcccaagaacatatatatctcatttctaagaacatttcagacgtgtatatgtttgctttttttcctttcaattacatgagtttacataatgttgattcatgtagtattttatacattgatgaggttactgttgtgctgttactagtatatgacaagtttctttaagatttaggcactgtct

SEQ ID NO: 85589 - protein, 300 aa, Arabidopsis thaliana; identical to SEQ ID NO: 50262
  peptide (1)..(300): Ceres Seq. ID no. 12681181
  misc_feature (1)..(300): Homolog of NCBI NO: 18399513 NR Description: expressed protein; protein id: At2g20890.1, by cDNA: 34875., supported by cDNA: gi_17065445, supported by
  misc_feature (1)..(300): Homolog of NCBI NO: 21592994 NR Description: unknown [Arabidopsis thaliana]
  misc_feature (5)..(290): Homolog of NCBI NO: 33469614 NR Description: light-regulated chloroplast-localized protein
  misc_feature (5)..(283): Homolog of NCBI NO: 29367385 NR Description: inositol phosphatase-like protein [Oryza sativa
  misc_feature (67)..(282): Homolog of NCBI NO: 23041708 NR Description: hypothetical protein [Trichodesmium erythraeum
  misc_feature (67)..(273): Homolog of NCBI NO: 17228142 NR Description: hypothetical protein [Nostoc sp. PCC 7120]
  misc_feature (63)..(277): Homolog of NCBI NO: 23124166 NR Description: hypothetical protein [Nostoc punctiforme]
  misc_feature (67)..(282): Homolog of NCBI NO: 22298677 NR Description: ORF_ID:tlr1134~hypothetical protein
  misc_feature (67)..(275): Homolog of NCBI NO: 37520969 NR Description: hypothetical protein glr1400 [Gloeobacter
  misc_feature (67)..(274): Homolog of NCBI NO: 16330615 NR Description: hypothetical protein [Synechocystis sp. PCC 6803]

SEQ ID NO: 85590 - protein, 244 aa, Arabidopsis thaliana; identical to SEQ ID NO: 50263
  peptide (1)..(244): Ceres Seq. ID no. 12681182
  misc_feature (1)..(244): Homolog of NCBI NO: 18399513 NR Description: expressed protein; protein id: At2g20890.1, by cDNA: 34875., supported by cDNA: gi_17065445, supported by
  misc_feature (1)..(244): Homolog of NCBI NO: 21592994 NR Description: unknown [Arabidopsis thaliana]
  misc_feature (1)..(234): Homolog of NCBI NO: 33469614 NR Description: light-regulated chloroplast-localized protein
  misc_feature (1)..(227): Homolog of NCBI NO: 29367385 NR Description: inositol phosphatase-like protein [Oryza sativa
  misc_feature (11)..(226): Homolog of NCBI NO: 23041708 NR Description: hypothetical protein [Trichodesmium erythraeum
  misc_feature (11)..(217): Homolog of NCBI NO: 17228142 NR Description: hypothetical protein [Nostoc sp. PCC 7120]
  misc_feature (7)..(221): Homolog of NCBI NO: 23124166 NR Description: hypothetical protein [Nostoc punctiforme]
  misc_feature (11)..(226): Homolog of NCBI NO: 22298677 NR Description: ORF_ID:tlr1134~hypothetical protein
  misc_feature (11)..(219): Homolog of NCBI NO: 37520969 NR Description: hypothetical protein glr1400 [Gloeobacter
  misc_feature (11)..(218): Homolog of NCBI NO: 16330615 NR Description: hypothetical protein [Synechocystis sp. PCC 6803]

SEQ ID NO: 85591 - protein, 201 aa, Arabidopsis thaliana; identical to SEQ ID NO: 50264
  peptide (1)..(201): Ceres Seq. ID no. 12681183
  misc_feature (1)..(201): Homolog of NCBI NO: 18399513 NR Description: expressed protein; protein id: At2g20890.1, by cDNA: 34875., supported by cDNA: gi_17065445, supported by
  misc_feature (1)..(201): Homolog of NCBI NO: 21592994 NR Description: unknown [Arabidopsis thaliana]
  misc_feature (1)..(191): Homolog of NCBI NO: 33469614 NR Description: light-regulated chloroplast-localized protein
  misc_feature (1)..(184): Homolog of NCBI NO: 29367385 NR Description: inositol phosphatase-like protein [Oryza sativa
  misc_feature (1)..(183): Homolog of NCBI NO: 23041708 NR Description: hypothetical protein [Trichodesmium erythraeum
  misc_feature (1)..(174): Homolog of NCBI NO: 17228142 NR Description: hypothetical protein [Nostoc sp. PCC 7120]
  misc_feature (1)..(178): Homolog of NCBI NO: 23124166 NR Description: hypothetical protein [Nostoc punctiforme]
  misc_feature (1)..(183): Homolog of NCBI NO: 22298677 NR Description: ORF_ID:tlr1134~hypothetical protein
  misc_feature (1)..(176): Homolog of NCBI NO: 37520969 NR Description: hypothetical protein glr1400 [Gloeobacter
  misc_feature (1)..(175): Homolog of NCBI NO: 16330615 NR Description: hypothetical protein [Synechocystis sp. PCC 6803]

SEQ ID NO: 85592 - DNA, 1094 bp, Arabidopsis thaliana
  misc_feature (1)..(1094): Ceres Seq. ID no. 12681184
  misc_feature: MA Experiment ID: 108461 Result: Up-regulated in Transcription
  misc_feature: MA Experiment 108461 PARAMETER Experiment Name: At_Germinating_Seeds_cDNA_P Parameter: Age (day) Value: 1 vs. 0
  misc_feature: MA Experiment 108461 PARAMETER Experiment Name: At_Germinating_Seeds_cDNA_P Parameter: Tissue Value: Germinating Seeds
  misc_feature: MA Experiment ID: 108462 Result: Up-regulated in Transcription
  misc_feature: MA Experiment 108462 PARAMETER Experiment Name: At_Germinating_Seeds_cDNA_P Parameter: Age (day) Value: 2 vs. 0
  misc_feature: MA Experiment 108462 PARAMETER Experiment Name: At_Germinating_Seeds_cDNA_P Parameter: Tissue Value: Germinating Seeds
  misc_feature: MA Experiment ID: 108463 Result: Up-regulated in Transcription
  misc_feature: MA Experiment 108463 PARAMETER Experiment Name: At_Germinating_Seeds_cDNA_P Parameter: Age (day) Value: 3 vs. 0
  misc_feature: MA Experiment 108463 PARAMETER Experiment Name: At_Germinating_Seeds_cDNA_P Parameter: Tissue Value: Germinating Seeds
  misc_feature: MA Experiment ID: 108464 Result: Up-regulated in Transcription
  misc_feature: MA Experiment 108464 PARAMETER Experiment Name: At_Germinating_Seeds_cDNA_P Parameter: Age (day) Value: 4 vs. 0
  misc_feature: MA Experiment 108464 PARAMETER Experiment Name: At_Germinating_Seeds_cDNA_P Parameter: Tissue Value: Germinating Seeds
  misc_feature: MA Experiment ID: 108585 Result: Down-regulated in Transcription
  misc_feature: MA Experiment 108585 PARAMETER Experiment Name: At_5mM_NaNP_cDNA_P Parameter: Timepoint (hr) Value: 6
  misc_feature: MA Experiment 108585 PARAMETER Experiment Name: At_5mM_NaNP_cDNA_P Parameter: Tissue Value: Aerial
  misc_feature: MA Experiment 108585 PARAMETER Experiment Name: At_5mM_NaNP_cDNA_P Parameter: Treatment Value: null
  misc_feature: MA Experiment ID: 108595 Result: Down-regulated in Transcription
  misc_feature: MA Experiment 108595 PARAMETER Experiment Name: At_Ler-pi_Ovule_cDNA_P Parameter: Plant Line Value: null
  misc_feature: MA Experiment ID: 20000069 Result: Down-regulated in Transcription
  misc_feature: MA Experiment 20000069 PARAMETER Experiment Name: At_100uM_ABA_Mutants_cDNA_P Parameter: Plant Line Value: CS23
  misc_feature: MA Experiment 20000069 PARAMETER Experiment Name: At_100uM_ABA_Mutants_cDNA_P Parameter: Timepoint (hr) Value: 6
  misc_feature: MA Experiment 20000069 PARAMETER Experiment Name: At_100uM_ABA_Mutants_cDNA_P Parameter: Tissue Value: Aerial
  misc_feature: MA Experiment 20000069 PARAMETER Experiment Name: At_100uM_ABA_Mutants_cDNA_P Parameter: Treatment Value: 100uM ABA vs. No Treatment
  misc_feature: MA Experiment ID: 20000070 Result: Down-regulated in Transcription
  misc_feature: MA Experiment 20000070 PARAMETER Experiment Name: At_100uM_ABA_Mutants_cDNA_P Parameter: Plant Line Value: CS24
  misc_feature: MA Experiment 20000070 PARAMETER Experiment Name: At_100uM_ABA_Mutants_cDNA_P Parameter: Timepoint (hr) Value: 6
  misc_feature: MA Experiment 20000070 PARAMETER Experiment Name: At_100uM_ABA_Mutants_cDNA_P Parameter: Tissue Value: Aerial
  misc_feature: MA Experiment 20000070 PARAMETER Experiment Name: At_100uM_ABA_Mutants_cDNA_P Parameter: Treatment Value: 100uM ABA vs. No Treatment
  misc_feature: MA Experiment ID: 20000071 Result: Down-regulated in Transcription
  misc_feature: MA Experiment 20000071 PARAMETER Experiment Name: At_100uM_ABA_Mutants_cDNA_P Parameter: Plant Line Value: CS8104
  misc_feature: MA Experiment 20000071 PARAMETER Experiment Name: At_100uM_ABA_Mutants_cDNA_P Parameter: Timepoint (hr) Value: 6
  misc_feature: MA Experiment 20000071 PARAMETER Experiment Name: At_100uM_ABA_Mutants_cDNA_P Parameter: Tissue Value: Aerial
  misc_feature: MA Experiment 20000071 PARAMETER Experiment Name: At_100uM_ABA_Mutants_cDNA_P Parameter: Treatment Value: 100uM ABA vs. No Treatment
  misc_feature: MA Experiment ID: 20000072 Result: Down-regulated in Transcription
  misc_feature: MA Experiment 20000072 PARAMETER Experiment Name: At_100uM_ABA_Mutants_cDNA_P Parameter: Plant Line Value: CS8105
  misc_feature: MA Experiment 20000072 PARAMETER Experiment Name: At_100uM_ABA_Mutants_cDNA_P Parameter: Timepoint (hr) Value: 6
  misc_feature: MA Experiment 20000072 PARAMETER Experiment Name: At_100uM_ABA_Mutants_cDNA_P Parameter: Tissue Value: Aerial
  misc_feature: MA Experiment 20000072 PARAMETER Experiment Name: At_100uM_ABA_Mutants_cDNA_P Parameter: Treatment Value: 100uM ABA vs. No Treatment
  misc_feature: MA Experiment ID: 20000086 Result: Down-regulated in Transcription
  misc_feature: MA Experiment 20000086 PARAMETER Experiment Name: At_100uM_ABA_Mutants_cDNA_P Parameter: Plant Line Value: CS22
  misc_feature: MA Experiment 20000086 PARAMETER Experiment Name: At_100uM_ABA_Mutants_cDNA_P Parameter: Timepoint (hr) Value: 6
  misc_feature: MA Experiment 20000086 PARAMETER Experiment Name: At_100uM_ABA_Mutants_cDNA_P Parameter: Tissue Value: Aerial
  misc_feature: MA Experiment 20000086 PARAMETER Experiment Name: At_100uM_ABA_Mutants_cDNA_P Parameter: Treatment Value: 100uM ABA vs. No Treatment
  misc_feature: MA Experiment ID: 20000087 Result: Down-regulated in Transcription
  misc_feature: MA Experiment 20000087 PARAMETER Experiment Name: At_100uM_ABA_Mutants_cDNA_P Parameter: Plant Line Value: WS
  misc_feature: MA Experiment 20000087 PARAMETER Experiment Name: At_100uM_ABA_Mutants_cDNA_P Parameter: Timepoint (hr) Value: 6
  misc_feature: MA Experiment 20000087 PARAMETER Experiment Name: At_100uM_ABA_Mutants_cDNA_P Parameter: Tissue Value: Aerial
  misc_feature: MA Experiment 20000087 PARAMETER Experiment Name: At_100uM_ABA_Mutants_cDNA_P Parameter: Treatment Value: 100uM ABA vs. No Treatment
  misc_feature: MA Experiment ID: 20000117 Result: Down-regulated in Transcription
  misc_feature: MA Experiment 20000117 PARAMETER Experiment Name: At_100uM_ABA_Mutants_cDNA_P Parameter: Plant Line Value: Columbia
  misc_feature: MA Experiment 20000117 PARAMETER Experiment Name: At_100uM_ABA_Mutants_cDNA_P Parameter: Timepoint (hr) Value: 6
  misc_feature: MA Experiment 20000117 PARAMETER Experiment Name: At_100uM_ABA_Mutants_cDNA_P Parameter: Tissue Value: Aerial
  misc_feature: MA Experiment 20000117 PARAMETER Experiment Name: At_100uM_ABA_Mutants_cDNA_P Parameter: Treatment Value: 100uM ABA vs. No Treatment
atggagcttctctgctcaccaacgtctctttcctcctccttcgctctctcttctgctcttttagtccctcgttcgttctccatgccagggacaaggagattcatggttctgtgtagttcccagaaggaaagtcagatgacagtgtcagtaactggagcaactggattcatagggagacgattggttcagagacttcgtgctgataaccacgctatccgggtcttaacacgctctaaatccaaagctgagcaaatatttcctgccaaggacttcccaggtattgtgattgcagaagaatcggagtggaagaactgtgtacaaggctctactgctgttgtgaacttggcaggactgcctattagtacaaggtggtctcccgagatcaagaaagagattaagggcagccggatccgtgtcacctccaaagttgttgacttaatcaataattcaccagcagaagctaggcctaccgttctagttagcgccacggctgttggttactatggtactagtgagacaggagtattcgacgaaaatagtccatcagggaaggactatcttgcagaggtttgcagagaatgggaaggaactgcattgaaagcaaataaggatgttagagtggcacttatccgcattggtgttgttcttggcaaagacggtggagctttggccatgatgataccctttttccaaatgtttgctggaggacctctgggttccggacaacaatggttctcttggattcacgtggatgacttggtgaacttaatttacgaggccctcactaatccatcttataaaggagttattaatgggactgcgccgaatccggttaggcttggggaaatgtgccagcagctaggcagtgttcttagccgaccatcgtggctaccagttcctgactttgcactcaaagctttgctcggagaaggtgccactgtagttctggagggacagaaggtattacctgtaagagccaaagagcttggttttgaattcaagtataaatacgtgaaggatgcactcagagccattatgcaataaggtgacacacataagcatctttgtaaaattggttttgatcacagaaaatc

SEQ ID NO: 85593 - protein, 347 aa, Arabidopsis thaliana; identical to SEQ ID NO: 40612
  peptide (1)..(347): Ceres Seq. ID no. 12681185
  misc_feature (48)..(291): Pfam Name: NAD dependent epimerase/dehydratase family Pfam Description: NAD dependent epimerase/dehydratase family
  misc_feature (1)..(347): Homolog of NCBI NO: 18399648 NR Description: expressed protein; protein id: At2g21280.1, by cDNA: gi_11908095, supported by cDNA: gi_12642905, supported cDNA: gi_13265530 [Arabidopsis thaliana]
  misc_feature (67)..(347): Homolog of NCBI NO: 25326146 NR Description: hypothetical protein At2g21280 [imported] -
  misc_feature (46)..(346): Homolog of NCBI NO: 23130096 NR Description: hypothetical protein [Nostoc punctiforme]
  misc_feature (46)..(347): Homolog of NCBI NO: 17229882 NR Description: cell division inhibitor [Nostoc sp. PCC 7120]
  misc_feature (46)..(346): Homolog of NCBI NO: 23043197 NR Description: hypothetical protein [Trichodesmium erythraeum
  misc_feature (46)..(346): Homolog of NCBI NO: 25019701 NR Description: unknown [Synechococcus sp. PCC 7942]
  misc_feature (42)..(346): Homolog of NCBI NO: 16330099 NR Description: cell division inhibitor [Synechocystis sp. PCC
  misc_feature (46)..(346): Homolog of NCBI NO: 7388457 NR Description: Hypothetical protein slr1223
  misc_feature (46)..(347): Homolog of NCBI NO: 22298008 NR Description: ORF_ID:tll0465~putative sugar nucleotide epimerase
  misc_feature (46)..(345): Homolog of NCBI NO: 33239592 NR Description: Predicted nucleoside-diphosphate sugar epimerase

SEQ ID NO: 85594 - protein, 320 aa, Arabidopsis thaliana; identical to SEQ ID NO: 40613
  peptide (1)..(320): Ceres Seq. ID no. 12681186
  misc_feature (21)..(264): Pfam Name: NAD dependent epimerase/dehydratase family Pfam Description: NAD dependent epimerase/dehydratase family
  misc_feature (1)..(320): Homolog of NCBI NO: 18399648 NR Description: expressed protein; protein id: At2g21280.1, by cDNA: gi_11908095, supported by cDNA: gi_12642905, supported cDNA: gi_13265530 [Arabidopsis thaliana]
  misc_feature (40)..(320): Homolog of NCBI NO: 25326146 NR Description: hypothetical protein At2g21280 [imported] -
  misc_feature (19)..(319): Homolog of NCBI NO: 23130096 NR Description: hypothetical protein [Nostoc punctiforme]
  misc_feature (19)..(320): Homolog of NCBI NO: 17229882 NR Description: cell division inhibitor [Nostoc sp. PCC 7120]
  misc_feature (19)..(319): Homolog of NCBI NO: 23043197 NR Description: hypothetical protein [Trichodesmium erythraeum
  misc_feature (19)..(319): Homolog of NCBI NO: 25019701 NR Description: unknown [Synechococcus sp. PCC 7942]
  misc_feature (15)..(319): Homolog of NCBI NO: 16330099 NR Description: cell division inhibitor [Synechocystis sp. PCC
  misc_feature (19)..(319): Homolog of NCBI NO: 7388457 NR Description: Hypothetical protein slr1223
  misc_feature (19)..(320): Homolog of NCBI NO: 22298008 NR Description: ORF_ID:tll0465~putative sugar nucleotide epimerase
  misc_feature (19)..(318): Homolog of NCBI NO: 33239592 NR Description: Predicted nucleoside-diphosphate sugar epimerase

SEQ ID NO: 85595 - protein, 313 aa, Arabidopsis thaliana
  peptide (1)..(313): Ceres Seq. ID no. 12681187
  misc_feature (14)..(257): Pfam Name: NAD dependent epimerase/dehydratase family Pfam Description: NAD dependent epimerase/dehydratase family
  misc_feature (1)..(313): Homolog of NCBI NO: 18399648 NR Description: expressed protein; protein id: At2g21280.1, by cDNA: gi_11908095, supported by cDNA: gi_12642905, supported cDNA: gi_13265530 [Arabidopsis thaliana]
  misc_feature (33)..(313): Homolog of NCBI NO: 25326146 NR Description: hypothetical protein At2g21280 [imported] -
  misc_feature (12)..(312): Homolog of NCBI NO: 23130096 NR Description: hypothetical protein [Nostoc punctiforme]
  misc_feature (12)..(313): Homolog of NCBI NO: 17229882 NR Description: cell division inhibitor [Nostoc sp. PCC 7120]
  misc_feature (12)..(312): Homolog of NCBI NO: 23043197 NR Description: hypothetical protein [Trichodesmium erythraeum
  misc_feature (12)..(312): Homolog of NCBI NO: 25019701 NR Description: unknown [Synechococcus sp. PCC 7942]
  misc_feature (8)..(312): Homolog of NCBI NO: 16330099 NR Description: cell division inhibitor [Synechocystis sp. PCC
  misc_feature (12)..(312): Homolog of NCBI NO: 7388457 NR Description: Hypothetical protein slr1223
  misc_feature (12)..(313): Homolog of NCBI NO: 22298008 NR Description: ORF_ID:tll0465~putative sugar nucleotide epimerase
  misc_feature (12)..(311): Homolog of NCBI NO: 33239592 NR Description: Predicted nucleoside-diphosphate sugar epimerase
MVLCSSQKESQMTVSVTGATGFIGRRLVQRLRADNHAIRVLTRSKSKAEQIFPAKDFPGIVIAEESEWKNCVQGSTAVVNLAGLPISTRWSPEIKKEIKGSRIRVTSKVVDLINNSPAEARPTVLVSATAVGYYGTSETGVFDENSPSGKDYLAEVCREWEGTALKANKDVRVALIRIGVVLGKDGGALAMMIPFFQMFAGGPLGSGQQWFSWIHVDDLVNLIYEALTNPSYKGVINGTAPNPVRLGEMCQQLGSVLSRPSWLPVPDFALKALLGEGATVVLEGQKVLPVRAKELGFEFKYKYVKDALRAIMQ

SEQ ID NO: 85596 - DNA, 1039 bp, Arabidopsis thaliana
  misc_feature (1)..(1039): Ceres Seq. ID no. 12681188
  misc_feature: MA Experiment ID: 108434 Result: Up-regulated in Transcription
  misc_feature: MA Experiment 108434 PARAMETER Experiment Name: At_Root_Tips_cDNA_P Parameter: Tissue Value: Root Tips
  misc_feature: MA Experiment ID: 108461 Result: Up-regulated in Transcription
  misc_feature: MA Experiment 108461 PARAMETER Experiment Name: At_Germinating_Seeds_cDNA_P Parameter: Age (day) Value: 1 vs. 0
  misc_feature: MA Experiment 108461 PARAMETER Experiment Name: At_Germinating_Seeds_cDNA_P Parameter: Tissue Value: Germinating Seeds
  misc_feature: MA Experiment ID: 20000180 Result: Up-regulated in Transcription
  misc_feature: MA Experiment 20000180 PARAMETER Experiment Name: At_Germinating_Seeds_P Parameter: Age (hr) Value: 24 vs. 0
  misc_feature: MA Experiment 20000180 PARAMETER Experiment Name: At_Germinating_Seeds_P Parameter: Tissue Value: Germinating Seeds
  misc_feature: MA Experiment ID: 20000185 Result: Up-regulated in Transcription
  misc_feature: MA Experiment 20000185 PARAMETER Experiment Name: At_Roots__P Parameter: Age (day) Value: 7 vs. 21
  misc_feature: MA Experiment 20000185 PARAMETER Experiment Name: At_Roots__P Parameter: Organism Value: A. thaliana
  misc_feature: MA Experiment 20000185 PARAMETER Experiment Name: At_Roots__P Parameter: Tissue Value: Roots vs. Whole Plant
  misc_feature: MA Experiment ID: 20000234 Result: Up-regulated in Transcription
  misc_feature: MA Experiment 20000234 PARAMETER Experiment Name: At_Siliques_P Parameter: Age (day) Value: 21
  misc_feature: MA Experiment 20000234 PARAMETER Experiment Name: At_Siliques_P Parameter: Organism Value: A. thaliana
  misc_feature: MA Experiment 20000234 PARAMETER Experiment Name: At_Siliques_P Parameter: Plant Line Value: WS
  misc_feature: MA Experiment 20000234 PARAMETER Experiment Name: At_Siliques_P Parameter: Tissue Value: Less Than 5mm Siliques vs. Whole Plant
  misc_feature: MA Experiment ID: 20000286 Result: Up-regulated in Transcription
  misc_feature: MA Experiment 20000286 PARAMETER Experiment Name: At_Open_Flower_P Parameter: Age (day) Value: 21
  misc_feature: MA Experiment 20000286 PARAMETER Experiment Name: At_Open_Flower_P Parameter: Plant Line Value: WS
  misc_feature: MA Experiment 20000286 PARAMETER Experiment Name: At_Open_Flower_P Parameter: Tissue Value: Half Open vs. Whole Plant
  misc_feature: MA Experiment ID: 20000439 Result: Up-regulated in Transcription
  misc_feature: MA Experiment 20000439 PARAMETER Experiment Name: At_Roots__P Parameter: Age (day) Value: 14 vs. 21
  misc_feature: MA Experiment 20000439 PARAMETER Experiment Name: At_Roots__P Parameter: Organism Value: A. thaliana
  misc_feature: MA Experiment 20000439 PARAMETER Experiment Name: At_Roots__P Parameter: Tissue Value: Roots vs. Whole Plant
  misc_feature: MA Experiment ID: 20000794 Result: Down-regulated in Transcription
  misc_feature: MA Experiment 20000794 PARAMETER Experiment Name: At_Petals_P Parameter: Age (day) Value: 23-25 days
  misc_feature: MA Experiment 20000794 PARAMETER Experiment Name: At_Petals_P Parameter: Plant Line Value: WS
  misc_feature: MA Experiment 20000794 PARAMETER Experiment Name: At_Petals_P Parameter: Tissue Value: Petals vs. Whole plant
  misc_feature: MA Experiment ID: 20001451 Result: Down-regulated in Transcription
  misc_feature: MA Experiment 20001451 PARAMETER Experiment Name: At_Far-red-induction_P Parameter: Age (day) Value: 7
  misc_feature: MA Experiment 20001451 PARAMETER Experiment Name: At_Far-red-induction_P Parameter: Light Value: Far-red vs. White
  misc_feature: MA Experiment 20001451 PARAMETER Experiment Name: At_Far-red-induction_P Parameter: Organism Value: A. thaliana
  misc_feature: MA Experiment 20001451 PARAMETER Experiment Name: At_Far-red-induction_P Parameter: Plant Line Value: Columbia
  misc_feature: MA Experiment 20001451 PARAMETER Experiment Name: At_Far-red-induction_P Parameter: Timepoint (hr) Value: 24
  misc_feature: MA Experiment 20001451 PARAMETER Experiment Name: At_Far-red-induction_P Parameter: Tissue Value: Whole Plant
attcattcgcaaattcgttgaccatatttgatagaatcaagcgatgatgaatcttagggttttgttcctcgctctccttctccttgcatctcctctgcttcaagttgctagatgtcaatcggatgccgaggatcattcaagtcttgttgacgatgttgtgggagaaaacactgatgatgcggttgaggaagatgaccatgatttggatatgaacttgtcctcatttccaggagttgagactgtttgtgttttccccaaaaacagtgccaaattggttccagctggagaagagactgagctccttgttggtcttaaaaatgaagggaaaactagagtaggtgtgatgggaattagggccagcgttcatcttccttatgatcataagttgttggttcagaatctaaccatgttgagacttaacaatgcatccatcccaacgtctcttcaagcaacattcccatacatctttgcagtcagccagtacttgcagcctggagcatttgatctggtgggttatatcatatacgatgtggaaggaaagccataccagagtgtcttctacaatggaaccatagaggtagttgaatctggaggtcttctcagcggcgaatctgttttccttttaacactcggaatcggtctcctcctcctcctcggtctatgggcatacagccaagttcagcgtctcaccaagaaaaccaaaaaggtttccaaggtggaagtaggaactaggtctaccgaggcatcactcgatgaatggctcgagggaactactttggccaagacatcgtctgggaaaacaaagaacaagaagaactaaagtagagctgttttgctccttccagttgttatagactcagcttcggcgttttgaaagagtttccaagtttaaagttcagtcttgaggaaatttagggttttaaacgacactttttttgttccagcattgtactctttagacaatctttacttcttgtcataaatattctcctcatgaaacaagttaacttataaatggtttagatctgtttttcgttgc

SEQ ID NO: 85597 - protein, 258 aa, Arabidopsis thaliana; identical to SEQ ID NO: 20928
  peptide (1)..(258): Ceres Seq. ID no. 12681189
  misc_feature (1)..(258): Homolog of NCBI NO: 18399609 NR Description: putative signal sequence receptor, alpha subunit alpha); protein id: At2g21160.1, supported by cDNA: 27787.,
  misc_feature (1)..(258): Homolog of NCBI NO: 21555380 NR Description: putative signal sequence receptor, alpha subunit
  misc_feature (2)..(258): Homolog of NCBI NO: 25335776 NR Description: hypothetical protein At2g21160 [imported] -
  misc_feature (6)..(258): Homolog of NCBI NO: 547391 NR Description: alpha-subunit; putative
  misc_feature (126)..(257): Homolog of NCBI NO: 15227250 NR Description: putative TRAP protein; protein id: At2g16595.1 thaliana] >gi|20197462|gb|AAM15085.1| putative TRAP protein thaliana] >gi|20198182|gb|AAM15448.1| putative TRAP protein
  misc_feature (10)..(258): Homolog of NCBI NO: 34875232 NR Description: similar to Ac2-238 [Rattus norvegicus]
  misc_feature (4)..(258): Homolog of NCBI NO: 34783867 NR Description: Unknown (protein for MGC:64448) [Xenopus laevis]
  misc_feature (1)..(258): Homolog of NCBI NO: 4507237 NR Description: signal sequence receptor, alpha; TRAP alpha [Homo
  misc_feature (1)..(258): Homolog of NCBI NO: 27694932 NR Description: Unknown (protein for IMAGE:4889700) [Xenopus
  misc_feature (10)..(258): Homolog of NCBI NO: 134930 NR Description: TRANSLOCON-ASSOCIATED PROTEIN, ALPHA SUBUNIT

SEQ ID NO: 85598 - protein, 257 aa, Arabidopsis thaliana; identical to SEQ ID NO: 20929
  peptide (1)..(257): Ceres Seq. ID no. 12681190
  misc_feature (1)..(257): Homolog of NCBI NO: 18399609 NR Description: putative signal sequence receptor, alpha subunit alpha); protein id: At2g21160.1, supported by cDNA: 27787.,
  misc_feature (1)..(257): Homolog of NCBI NO: 21555380 NR Description: putative signal sequence receptor, alpha subunit
  misc_feature (1)..(257): Homolog of NCBI NO: 25335776 NR Description: hypothetical protein At2g21160 [imported] -
  misc_feature (5)..(257): Homolog of NCBI NO: 547391 NR Description: alpha-subunit; putative
  misc_feature (125)..(256): Homolog of NCBI NO: 15227250 NR Description: putative TRAP protein; protein id: At2g16595.1 thaliana] >gi|20197462|gb|AAM15085.1| putative TRAP protein thaliana] >gi|20198182|gb|AAM15448.1| putative TRAP protein
  misc_feature (9)..(257): Homolog of NCBI NO: 34875232 NR Description: similar to Ac2-238 [Rattus norvegicus]
  misc_feature (3)..(257): Homolog of NCBI NO: 34783867 NR Description: Unknown (protein for MGC:64448) [Xenopus laevis]
  misc_feature (1)..(257): Homolog of NCBI NO: 4507237 NR Description: signal sequence receptor, alpha; TRAP alpha [Homo
  misc_feature (1)..(257): Homolog of NCBI NO: 27694932 NR Description: Unknown (protein for IMAGE:4889700) [Xenopus
  misc_feature (9)..(257): Homolog of NCBI NO: 134930 NR Description: TRANSLOCON-ASSOCIATED PROTEIN, ALPHA SUBUNIT

SEQ ID NO: 85599 - protein, 203 aa, Arabidopsis thaliana; identical to SEQ ID NO: 20930
  peptide (1)..(203): Ceres Seq. ID no. 12681191
  misc_feature (1)..(203): Homolog of NCBI NO: 18399609 NR Description: putative signal sequence receptor, alpha subunit alpha); protein id: At2g21160.1, supported by cDNA: 27787.,
  misc_feature (1)..(203): Homolog of NCBI NO: 21555380 NR Description: putative signal sequence receptor, alpha subunit
  misc_feature (1)..(203): Homolog of NCBI NO: 25335776 NR Description: hypothetical protein At2g21160 [imported] -
  misc_feature (1)..(203): Homolog of NCBI NO: 547391 NR Description: alpha-subunit; putative
  misc_feature (71)..(202): Homolog of NCBI NO: 15227250 NR Description: putative TRAP protein; protein id: At2g16595.1 thaliana] >gi|20197462|gb|AAM15085.1| putative TRAP protein thaliana] >gi|20198182|gb|AAM15448.1| putative TRAP protein
  misc_feature (1)..(203): Homolog of NCBI NO: 34875232 NR Description: similar to Ac2-238 [Rattus norvegicus]
  misc_feature (1)..(203): Homolog of NCBI NO: 34783867 NR Description: Unknown (protein for MGC:64448) [Xenopus laevis]
  misc_feature (1)..(203): Homolog of NCBI NO: 4507237 NR Description: signal sequence receptor, alpha; TRAP alpha [Homo
  misc_feature (1)..(203): Homolog of NCBI NO: 27694932 NR Description: Unknown (protein for IMAGE:4889700) [Xenopus
  misc_feature (1)..(203): Homolog of NCBI NO: 134930 NR Description: TRANSLOCON-ASSOCIATED PROTEIN, ALPHA SUBUNIT

SEQ ID NO: 85600 - DNA, 2769 bp, Arabidopsis thaliana
  misc_feature (1)..(2769): Ceres Seq. ID no. 12681246
  misc_feature: MA Experiment ID: 20000173 Result: Down-regulated in Transcription
  misc_feature: MA Experiment 20000173 PARAMETER Experiment Name: At_42deg_Heat_P Parameter: Age (day) Value: 14
  misc_feature: MA Experiment 20000173 PARAMETER Experiment Name: At_42deg_Heat_P Parameter: Organism Value: A. thaliana
  misc_feature: MA Experiment 20000173 PARAMETER Experiment Name: At_42deg_Heat_P Parameter: Plant Line Value: WS
  misc_feature: MA Experiment 20000173 PARAMETER Experiment Name: At_42deg_Heat_P Parameter: Temperature (deg C) Value: 42 vs. 22
  misc_feature: MA Experiment 20000173 PARAMETER Experiment Name: At_42deg_Heat_P Parameter: Timepoint (hr) Value: 6
  misc_feature: MA Experiment 20000173 PARAMETER Experiment Name: At_42deg_Heat_P Parameter: Tissue Value: Aerial
  misc_feature: MA Experiment ID: 20000185 Result: Down-regulated in Transcription
  misc_feature: MA Experiment 20000185 PARAMETER Experiment Name: At_Roots__P Parameter: Age (day) Value: 7 vs. 21
  misc_feature: MA Experiment 20000185 PARAMETER Experiment Name: At_Roots__P Parameter: Organism Value: A. thaliana
  misc_feature: MA Experiment 20000185 PARAMETER Experiment Name: At_Roots__P Parameter: Tissue Value: Roots vs. Whole Plant
  misc_feature: MA Experiment ID: 20000495 Result: Down-regulated in Transcription
  misc_feature: MA Experiment 20000495 PARAMETER Experiment Name: At_Guard_Cells_P Parameter: Harvest Date Value: 8/2/2002
  misc_feature: MA Experiment 20000495 PARAMETER Experiment Name: At_Guard_Cells_P Parameter: Organism Value: A. thaliana
  misc_feature: MA Experiment 20000495 PARAMETER Experiment Name: At_Guard_Cells_P Parameter: Tissue Value: Guard Cells vs. Leaves
  misc_feature: MA Experiment ID: 20001451 Result: Down-regulated in Transcription
  misc_feature: MA Experiment 20001451 PARAMETER Experiment Name: At_Far-red-induction_P Parameter: Age (day) Value: 7
  misc_feature: MA Experiment 20001451 PARAMETER Experiment Name: At_Far-red-induction_P Parameter: Light Value: Far-red vs. White
  misc_feature: MA Experiment 20001451 PARAMETER Experiment Name: At_Far-red-induction_P Parameter: Organism Value: A. thaliana
  misc_feature: MA Experiment 20001451 PARAMETER Experiment Name: At_Far-red-induction_P Parameter: Plant Line Value: Columbia
  misc_feature: MA Experiment 20001451 PARAMETER Experiment Name: At_Far-red-induction_P Parameter: Timepoint (hr) Value: 24
  misc_feature: MA Experiment 20001451 PARAMETER Experiment Name: At_Far-red-induction_P Parameter: Tissue Value: Whole Plant
  misc_feature: MA Experiment ID: 20001558 Result: Up-regulated in Transcription
  misc_feature: MA Experiment 20001558 PARAMETER Experiment Name: At_Drought_Soil_Dry_P Parameter: Age (day) Value: 27
  misc_feature: MA Experiment 20001558 PARAMETER Experiment Name: At_Drought_Soil_Dry_P Parameter: Organism Value: A. thaliana
  misc_feature: MA Experiment 20001558 PARAMETER Experiment Name: At_Drought_Soil_Dry_P Parameter: Plant Line Value: WS
  misc_feature: MA Experiment 20001558 PARAMETER Experiment Name: At_Drought_Soil_Dry_P Parameter: Post Timepoint (hr) Value: 6
  misc_feature: MA Experiment 20001558 PARAMETER Experiment Name: At_Drought_Soil_Dry_P Parameter: Post-Treatment Value: Re-Water vs. No Drought
  misc_feature: MA Experiment 20001558 PARAMETER Experiment Name: At_Drought_Soil_Dry_P Parameter: Timepoint (day) Value: 13
  misc_feature: MA Experiment 20001558 PARAMETER Experiment Name: At_Drought_Soil_Dry_P Parameter: Treatment Value: Drought vs. No Drought
  misc_feature: MA Experiment ID: 20001757 Result: Up-regulated in Transcription
  misc_feature: MA Experiment 20001757 PARAMETER Experiment Name: At_50mM_NH4NO3_L-to-H_P Parameter: Timepoint (hr) Value: 6
  misc_feature: MA Experiment 20001757 PARAMETER Experiment Name: At_50mM_NH4NO3_L-to-H_P Parameter: Tissue Value: Leaf
  misc_feature: MA Experiment 20001757 PARAMETER Experiment Name: At_50mM_NH4NO3_L-to-H_P Parameter: Treatment Value: 50mM NH4NO3 vs 100mM Mannitol
  misc_feature: MA Experiment ID: 20001905 Result: Down-regulated in Transcription
  misc_feature: MA Experiment 20001905 PARAMETER Experiment Name: At_Drought_Reproduction_P Parameter: Age (day) Value: 40
  misc_feature: MA Experiment 20001905 PARAMETER Experiment Name: At_Drought_Reproduction_P Parameter: Organism Value: A. thaliana
  misc_feature: MA Experiment 20001905 PARAMETER Experiment Name: At_Drought_Reproduction_P Parameter: Plant Line Value: WS
  misc_feature: MA Experiment 20001905 PARAMETER Experiment Name: At_Drought_Reproduction_P Parameter: Timepoint (day) Value: 10
  misc_feature: MA Experiment 20001905 PARAMETER Experiment Name: At_Drought_Reproduction_P Parameter: Tissue Value: Rosettes
  misc_feature: MA Experiment 20001905 PARAMETER Experiment Name: At_Drought_Reproduction_P Parameter: Treatment Value: Drought vs. No Drought
atgttgacgagtcccagtaacgcacttcacagtagtactccacaattctggccacttcgccggagcaagctttgccgttcccggaatttccctcgttttcactccggcgaacgcagcagcggcggaggaggaaaattgtgctcgctctctcttctctccggaagtggcgccggtaaattcagtgtcagagctctagttaggcctgatgataccgacgacgctgactccgtcggcgatgggtctctggcttttcctaaccacgtttctgtcaaaattccattcggaaatagagagattttagttgagactggtctcatggggagacaagcaagttctgcagtcacggtcacagatggagaaactattgtctacacatccgtttgtctagctgatgttccgagtgagccatcagattttcttcccctttatgttcactatcaggagcgattctcagctgtaggtcgaactagtggtggattttttaagcgagaagggagaaccaaagatcacgaggttctgatttgtaggttgatcgatagacctctacgccccactatgcccaaaggtttctacaatgaaactcagattttatcctgggttttgagctacgatggattacacgcacctgatgctttagctgttacatctgctggaattgctgtagctctttcagaagtaccaaatgcgaaagcgattgcaggagttcgggttggtcttattgggggtgaattcattgtcaatccaaccgtgaaggagatggaagaatcacagctagatttgtttctagctggaacagatactgcaattctaacgatagagggatacagtaattttcttcctgaggaaatgcttctccaagctgttaaagttggacaggatgctgtacaggctacatgcattgctattgaagttttagcaaagaaatatggaaagcctaaaatgcttgacgctatcagattaccacctccagagctatacaagcatgtgaaagaacttgctggtgaggaattgacaaaagcgttacaaattaagagtaaaatatcgagaaggaaagccatatcgtccctggaagaaaaggtcttgacaatactgacagagaagggatatgttattgatgaggtagcttttggaaccatagaagcacaaccggatctgttggaggatgaagacgaggatgaggaagttgttcctgaaggtgaggtggaccaaggcgatgttcacattagacccatccctcggaaacctattcctttactattttctgaagtagatgtcaagctagtcttcaaagaagtatcgtcgaagcttctacgtaggcgaattgttgagggaggtaaaagaagtgatggtcggactctggatgagattcgtccaattaattcaagatgtggactgcttcccagggcacatggaagtactctgttcacacgtggggaaacacaggcactggcagttgttacgcttggtgataaacaaatggcgcagagaattgacaaccttgagggttctgatgaatacaagaggttctatcttcagtacacttttcctccatcgtctgttggtgaagttggacgaattggtgcacccagtagaagagaaataggtcatgggacactagcagagcgagcattggagaccattctacctagtgatgatgactttccttacacaatacgtgttgaaagtacagtaattgaaagcaatggttcttcaagtatggcatctgtttgtggcggttgcttggctttgcaagatgctggagttccagtcaaatgttctgttgctgggatagcaatgggaatggtttgggatactgaagaatttggaggtgatggatctccccttatcctttctgacatcactggagctgaagatgcatctggtgatatggactttaaggttgctgggaatgaagatggcgttaccgcctttcagatggacatcaaggtaggaggaattactttagagataatggaaaaggctctaatacaggcaaaagctgggcgtcgccatattcttgctgaaatggcaaagtgctcaccgcctcccacgctaagcctctcaaaatatgctccattgatacttattatgaaggttcatccaagcaaagtatactctcttattggttctggaggtaagaaagtaaagagcatcattgaagaatctggagttgaggccattgacatgcaagatgatggaactgtcaaaattatggcaattgatgtagcgagtctagaaagggcgaaagcgattattagtggattgacaatggttccctctgttggtgatatctacaggaattgtgaaatcaagtcaatggctccttatggtgcatttgtagagatagcgcctgggcgggaaggtctttgccatatcagtgagctgagtgctgaatggcttgcaaaaccagaggatgcctataaagtaggagaccgcattgacgtcaaattaatagaggtaaatgaaaagggtcagcttcgacttagtgtacgggctttacttcccgaatcagagacagacaaagacagtcagaaacaacagccggcaggtgattctaccaaagacaagagttcgcaaaggaaatatgtaaatacttcgtcaaaggaccgtgcagctgcaggagcatcaaaggtttcatctggggatgaacttgtcctgaagaagaaagatgtaaggagagcaactggtggtagtagtgacaagacaatgaatagcaatagcagtaccaacgaagaaagtttagtcaacggtgaagctacaatcagctag

SEQ ID NO: 85601 - protein, 922 aa, Arabidopsis thaliana
  peptide (1)..(922): Ceres Seq. ID no. 12681247
  misc_feature (455)..(589): Pfam Name: 3' exoribonuclease family, domain 1 Pfam Description: 3' exoribonuclease family, domain 1
  misc_feature (44)..(843): Homolog of NCBI NO: 7488820 NR Description: polyribonucleotide nucleotidyltransferase (EC - garden pea >gi|2286200|gb|AAC50039.1| polynucleotide
  misc_feature (10)..(828): Homolog of NCBI NO: 1924972 NR Description: polyribonucleotide phophorylase
  misc_feature (10)..(788): Homolog of NCBI NO: 2129483 NR Description: exoribonuclease 100 RNP - spinach
  misc_feature (10)..(788): Homolog of NCBI NO: 1588265 NR Description: 100RNP protein
  misc_feature (420)..(834): Homolog of NCBI NO: 15834850 NR Description: polyribonucleotide nucleotidyltransferase muridarum] >gi|11279139|pir||G81725 polyribonucleotide
  misc_feature (96)..(367): Homolog of NCBI NO: 15834850 NR Description: polyribonucleotide nucleotidyltransferase muridarum] >gi|11279139|pir||G81725 polyribonucleotide
  misc_feature (420)..(836): Homolog of NCBI NO: 15605577 NR Description: Polyribonucleotide Nucleotidyltransferase
  misc_feature (96)..(367): Homolog of NCBI NO: 15605577 NR Description: Polyribonucleotide Nucleotidyltransferase
  misc_feature (419)..(836): Homolog of NCBI NO: 29840519 NR Description: polyribonucleotide nucleotidyltransferase caviae GPIC] >gi|29834868|gb|AAP05503.1| polyribonucleotide
  misc_feature (97)..(411): Homolog of NCBI NO: 29840519 NR Description: polyribonucleotide nucleotidyltransferase caviae GPIC] >gi|29834868|gb|AAP05503.1| polyribonucleotide
MLTSPSNALHSSTPQFWPLRRSKLCRSRNFPRFHSGERSSGGGGKLCSLSLLSGSGAGKFSVRALVRPDDTDDADSVGDGSLAFPNHVSVKIPFGNREILVETGLMGRQASSAVTVTDGETIVYTSVCLADVPSEPSDFLPLYVHYQERFSAVGRTSGGFFKREGRTKDHEVLICRLIDRPLRPTMPKGFYNETQILSWVLSYDGLHAPDALAVTSAGIAVALSEVPNAKAIAGVRVGLIGGEFIVNPTVKEMEESQLDLFLAGTDTAILTIEGYSNFLPEEMLLQAVKVGQDAVQATCIAIEVLAKKYGKPKMLDAIRLPPPELYKHVKELAGEELTKALQIKSKISRRKAISSLEEKVLTILTEKGYVIDEVAFGTIEAQPDLLEDEDEDEEVVPEGEVDQGDVHIRPIPRKPIPLLFSEVDVKLVFKEVSSKLLRRRIVEGGKRSDGRTLDEIRPINSRCGLLPRAHGSTLFTRGETQALAVVTLGDKQMAQRIDNLEGSDEYKRFYLQYTFPPSSVGEVGRIGAPSRREIGHGTLAERALETILPSDDDFPYTIRVESTVIESNGSSSMASVCGGCLALQDAGVPVKCSVAGIAMGMVWDTEEFGGDGSPLILSDITGAEDASGDMDFKVAGNEDGVTAFQMDIKVGGITLEIMEKALIQAKAGRRHILAEMAKCSPPPTLSLSKYAPLILIMKVHPSKVYSLIGSGGKKVKSIIEESGVEAIDMQDDGTVKIMAIDVASLERAKAIISGLTMVPSVGDIYRNCEIKSMAPYGAFVEIAPGREGLCHISELSAEWLAKPEDAYKVGDRIDVKLIEVNEKGQLRLSVRALLPESETDKDSQKQQPAGDSTKDKSSQRKYVNTSSKDRAAAGASKVSSGDELVLKKKDVRRATGGSSDKTMNSNSSTNEESLVNGEATIS

SEQ ID NO: 85602 - protein, 817 aa, Arabidopsis thaliana; identical to SEQ ID NO: 71781
  peptide (1)..(817): Ceres Seq. ID no. 12681248
  misc_feature (350)..(484): Pfam Name: 3' exoribonuclease family, domain 1 Pfam Description: 3' exoribonuclease family, domain 1
  misc_feature (1)..(738): Homolog of NCBI NO: 7488820 NR Description: polyribonucleotide nucleotidyltransferase (EC - garden pea >gi|2286200|gb|AAC50039.1| polynucleotide
  misc_feature (1)..(723): Homolog of NCBI NO: 1924972 NR Description: polyribonucleotide phophorylase
  misc_feature (1)..(683): Homolog of NCBI NO: 2129483 NR Description: exoribonuclease 100 RNP - spinach
  misc_feature (1)..(683): Homolog of NCBI NO: 1588265 NR Description: 100RNP protein
  misc_feature (315)..(729): Homolog of NCBI NO: 15834850 NR Description: polyribonucleotide nucleotidyltransferase muridarum] >gi|11279139|pir||G81725 polyribonucleotide
  misc_feature (1)..(262): Homolog of NCBI NO: 15834850 NR Description: polyribonucleotide nucleotidyltransferase muridarum] >gi|11279139|pir||G81725 polyribonucleotide
  misc_feature (315)..(731): Homolog of NCBI NO: 15605577 NR Description: Polyribonucleotide Nucleotidyltransferase
  misc_feature (1)..(262): Homolog of NCBI NO: 15605577 NR Description: Polyribonucleotide Nucleotidyltransferase
  misc_feature (314)..(731): Homolog of NCBI NO: 29840519 NR Description: polyribonucleotide nucleotidyltransferase caviae GPIC] >gi|29834868|gb|AAP05503.1| polyribonucleotide
  misc_feature (1)..(306): Homolog of NCBI NO: 29840519 NR Description: polyribonucleotide nucleotidyltransferase caviae GPIC] >gi|29834868|gb|AAP05503.1| polyribonucleotide

SEQ ID NO: 85603 - protein, 737 aa, Arabidopsis thaliana; identical to SEQ ID NO: 71782
  peptide (1)..(737): Ceres Seq. ID no. 12681249
  misc_feature (270)..(404): Pfam Name: 3' exoribonuclease family, domain 1 Pfam Description: 3' exoribonuclease family, domain 1
  misc_feature (1)..(658): Homolog of NCBI NO: 7488820 NR Description: polyribonucleotide nucleotidyltransferase (EC - garden pea >gi|2286200|gb|AAC50039.1| polynucleotide
  misc_feature (1)..(643): Homolog of NCBI NO: 1924972 NR Description: polyribonucleotide phophorylase
  misc_feature (1)..(603): Homolog of NCBI NO: 2129483 NR Description: exoribonuclease 100 RNP - spinach
  misc_feature (1)..(603): Homolog of NCBI NO: 1588265 NR Description: 100RNP protein
  misc_feature (235)..(649): Homolog of NCBI NO: 15834850 NR Description: polyribonucleotide nucleotidyltransferase muridarum] >gi|11279139|pir||G81725 polyribonucleotide
  misc_feature (1)..(182): Homolog of NCBI NO: 15834850 NR Description: polyribonucleotide nucleotidyltransferase muridarum] >gi|11279139|pir||G81725 polyribonucleotide
  misc_feature (235)..(651): Homolog of NCBI NO: 15605577 NR Description: Polyribonucleotide Nucleotidyltransferase
  misc_feature (1)..(182): Homolog of NCBI NO: 15605577 NR Description: Polyribonucleotide Nucleotidyltransferase
  misc_feature (234)..(651): Homolog of NCBI NO: 29840519 NR Description: polyribonucleotide nucleotidyltransferase caviae GPIC] >gi|29834868|gb|AAP05503.1| polyribonucleotide
  misc_feature (1)..(226): Homolog of NCBI NO: 29840519 NR Description: polyribonucleotide nucleotidyltransferase caviae GPIC] >gi|29834868|gb|AAP05503.1| polyribonucleotide

SEQ ID NO: 85604 - DNA, 1464 bp, Arabidopsis thaliana
  misc_feature (1)..(1464): Ceres Seq. ID no. 12681265
  misc_feature: MA Experiment ID: 108461 Result: Up-regulated in Transcription
  misc_feature: MA Experiment 108461 PARAMETER Experiment Name: At_Germinating_Seeds_cDNA_P Parameter: Age (day) Value: 1 vs. 0
  misc_feature: MA Experiment 108461 PARAMETER Experiment Name: At_Germinating_Seeds_cDNA_P Parameter: Tissue Value: Germinating Seeds
  misc_feature: MA Experiment ID: 108462 Result: Up-regulated in Transcription
  misc_feature: MA Experiment 108462 PARAMETER Experiment Name: At_Germinating_Seeds_cDNA_P Parameter: Age (day) Value: 2 vs. 0
  misc_feature: MA Experiment 108462 PARAMETER Experiment Name: At_Germinating_Seeds_cDNA_P Parameter: Tissue Value: Germinating Seeds
  misc_feature: MA Experiment ID: 108463 Result: Up-regulated in Transcription
  misc_feature: MA Experiment 108463 PARAMETER Experiment Name: At_Germinating_Seeds_cDNA_P Parameter: Age (day) Value: 3 vs. 0
  misc_feature: MA Experiment 108463 PARAMETER Experiment Name: At_Germinating_Seeds_cDNA_P Parameter: Tissue Value: Germinating Seeds
  misc_feature: MA Experiment ID: 108464 Result: Up-regulated in Transcription
  misc_feature: MA Experiment 108464 PARAMETER Experiment Name: At_Germinating_Seeds_cDNA_P Parameter: Age (day) Value: 4 vs. 0
  misc_feature: MA Experiment 108464 PARAMETER Experiment Name: At_Germinating_Seeds_cDNA_P Parameter: Tissue Value: Germinating Seeds
  misc_feature: MA Experiment ID: 108473 Result: Down-regulated in Transcription
  misc_feature: MA Experiment 108473 PARAMETER Experiment Name: At_Drought_Flowers_cDNA_P Parameter: Timepoint (hr) Value: 7 d
  misc_feature: MA Experiment 108473 PARAMETER Experiment Name: At_Drought_Flowers_cDNA_P Parameter: Tissue Value: Flower
  misc_feature: MA Experiment 108473 PARAMETER Experiment Name: At_Drought_Flowers_cDNA_P Parameter: Treatment Value: Drought vs. No Drought
  misc_feature: MA Experiment ID: 108561 Result: Down-regulated in Transcription
  misc_feature: MA Experiment 108561 PARAMETER Experiment Name: At_100uM_ABA_cDNA_P Parameter: Timepoint (hr) Value: 6
  misc_feature: MA Experiment 108561 PARAMETER Experiment Name: At_100uM_ABA_cDNA_P Parameter: Tissue Value: Aerial
  misc_feature: MA Experiment 108561 PARAMETER Experiment Name: At_100uM_ABA_cDNA_P Parameter: Treatment Value: 100uM ABA vs. No Treatment
  misc_feature: MA Experiment ID: 108573 Result: Down-regulated in Transcription
  misc_feature: MA Experiment 108573 PARAMETER Experiment Name: At_Drought_cDNA_P Parameter: Timepoint (hr) Value: 6
  misc_feature: MA Experiment 108573 PARAMETER Experiment Name: At_Drought_cDNA_P Parameter: Tissue Value: Aerial
  misc_feature: MA Experiment 108573 PARAMETER Experiment Name: At_Drought_cDNA_P Parameter: Treatment Value: Drought vs. No Drought
  misc_feature: MA Experiment ID: 108576 Result: Down-regulated in Transcription
  misc_feature: MA Experiment 108576 PARAMETER Experiment Name: At_42deg_Heat_cDNA_P Parameter: Temperature (deg C) Value: 42 vs. 22
  misc_feature: MA Experiment 108576 PARAMETER Experiment Name: At_42deg_Heat_cDNA_P Parameter: Timepoint (hr) Value: 1
  misc_feature: MA Experiment 108576 PARAMETER Experiment Name: At_42deg_Heat_cDNA_P Parameter: Tissue Value: Aerial
  misc_feature: MA Experiment ID: 108585 Result: Down-regulated in Transcription
  misc_feature: MA Experiment 108585 PARAMETER Experiment Name: At_5mM_NaNP_cDNA_P Parameter: Timepoint (hr) Value: 6
  misc_feature: MA Experiment 108585 PARAMETER Experiment Name: At_5mM_NaNP_cDNA_P Parameter: Tissue Value: Aerial
  misc_feature: MA Experiment 108585 PARAMETER Experiment Name: At_5mM_NaNP_cDNA_P Parameter: Treatment Value: null
  misc_feature: MA Experiment ID: 108595 Result: Down-regulated in Transcription
  misc_feature: MA Experiment 108595 PARAMETER Experiment Name: At_Ler-pi_Ovule_cDNA_P Parameter: Plant Line Value: null
  misc_feature: MA Experiment ID: 108607 Result: Down-regulated in Transcription
  misc_feature: MA Experiment 108607 PARAMETER Experiment Name: At_100uM_ABA_cDNA_P Parameter: Timepoint (hr) Value: 4
  misc_feature: MA Experiment 108607 PARAMETER Experiment Name: At_100uM_ABA_cDNA_P Parameter: Tissue Value: Aerial
  misc_feature: MA Experiment 108607 PARAMETER Experiment Name: At_100uM_ABA_cDNA_P Parameter: Treatment Value: 100uM ABA vs. No Treatment
  misc_feature: MA Experiment ID: 20000069 Result: Down-regulated in Transcription
  misc_feature: MA Experiment 20000069 PARAMETER Experiment Name: At_100uM_ABA_Mutants_cDNA_P Parameter: Plant Line Value: CS23
  misc_feature: MA Experiment 20000069 PARAMETER Experiment Name: At_100uM_ABA_Mutants_cDNA_P Parameter: Timepoint (hr) Value: 6
  misc_feature: MA Experiment 20000069 PARAMETER Experiment Name: At_100uM_ABA_Mutants_cDNA_P Parameter: Tissue Value: Aerial
  misc_feature: MA Experiment 20000069 PARAMETER Experiment Name: At_100uM_ABA_Mutants_cDNA_P Parameter: Treatment Value: 100uM ABA vs. No Treatment
  misc_feature: MA Experiment ID: 20000093 Result: Down-regulated in Transcription
  misc_feature: MA Experiment 20000093 PARAMETER Experiment Name: At_42deg_Heat_cDNA_P Parameter: Temperature (deg C) Value: 42 vs. 22
  misc_feature: MA Experiment 20000093 PARAMETER Experiment Name: At_42deg_Heat_cDNA_P Parameter: Timepoint (hr) Value: 0.5
  misc_feature: MA Experiment 20000093 PARAMETER Experiment Name: At_42deg_Heat_cDNA_P Parameter: Tissue Value: Aerial
  misc_feature: MA Experiment ID: 20000112 Result: Down-regulated in Transcription
  misc_feature: MA Experiment 20000112 PARAMETER Experiment Name: At_42deg_Heat_cDNA_P Parameter: Temperature (deg C) Value: 42 vs. 22
  misc_feature: MA Experiment 20000112 PARAMETER Experiment Name: At_42deg_Heat_cDNA_P Parameter: Timepoint (hr) Value: 2
  misc_feature: MA Experiment 20000112 PARAMETER Experiment Name: At_42deg_Heat_cDNA_P Parameter: Tissue Value: Aerial
  misc_feature: MA Experiment ID: 20000113 Result: Down-regulated in Transcription
  misc_feature: MA Experiment 20000113 PARAMETER Experiment Name: At_42deg_Heat_cDNA_P Parameter: Temperature (deg C) Value: 42 vs. 22
  misc_feature: MA Experiment 20000113 PARAMETER Experiment Name: At_42deg_Heat_cDNA_P Parameter: Timepoint (hr) Value: 8
  misc_feature: MA Experiment 20000113 PARAMETER Experiment Name: At_42deg_Heat_cDNA_P Parameter: Tissue Value: Aerial
  misc_feature: MA Experiment ID: 20000117 Result: Down-regulated in Transcription
  misc_feature: MA Experiment 20000117 PARAMETER Experiment Name: At_100uM_ABA_Mutants_cDNA_P Parameter: Plant Line Value: Columbia
  misc_feature: MA Experiment 20000117 PARAMETER Experiment Name: At_100uM_ABA_Mutants_cDNA_P Parameter: Timepoint (hr) Value: 6
  misc_feature: MA Experiment 20000117 PARAMETER Experiment Name: At_100uM_ABA_Mutants_cDNA_P Parameter: Tissue Value: Aerial
  misc_feature: MA Experiment 20000117 PARAMETER Experiment Name: At_100uM_ABA_Mutants_cDNA_P Parameter: Treatment Value: 100uM ABA vs. No Treatment
  misc_feature: MA Experiment ID: 20000144 Result: Down-regulated in Transcription
  misc_feature: MA Experiment 20000144 PARAMETER Experiment Name: At_42deg_Heat_cDNA_P Parameter: Temperature (deg C) Value: 42 vs. 22
  misc_feature: MA Experiment 20000144 PARAMETER Experiment Name: At_42deg_Heat_cDNA_P Parameter: Timepoint (hr) Value: 1
  misc_feature: MA Experiment 20000144 PARAMETER Experiment Name: At_42deg_Heat_cDNA_P Parameter: Tissue Value: Aerial
  misc_feature: MA Experiment ID: 20000171 Result: Down-regulated in Transcription
  misc_feature: MA Experiment 20000171 PARAMETER Experiment Name: At_42deg_Heat_P Parameter: Age (day) Value: 14
  misc_feature: MA Experiment 20000171 PARAMETER Experiment Name: At_42deg_Heat_P Parameter: Organism Value: A. thaliana
  misc_feature: MA Experiment 20000171 PARAMETER Experiment Name: At_42deg_Heat_P Parameter: Plant Line Value: WS
  misc_feature: MA Experiment 20000171 PARAMETER Experiment Name: At_42deg_Heat_P Parameter: Temperature (deg C) Value: 42 vs. 22
  misc_feature: MA Experiment 20000171 PARAMETER Experiment Name: At_42deg_Heat_P Parameter: Timepoint (hr) Value: 1
  misc_feature: MA Experiment 20000171 PARAMETER Experiment Name: At_42deg_Heat_P Parameter: Tissue Value: Aerial
  misc_feature: MA Experiment ID: 20000179 Result: Up-regulated in Transcription
  misc_feature: MA Experiment 20000179 PARAMETER Experiment Name: At_Germinating_Seeds_P Parameter: Age (hr) Value: 6 vs. 0
  misc_feature: MA Experiment 20000179 PARAMETER Experiment Name: At_Germinating_Seeds_P Parameter: Tissue Value: Germinating Seeds
  misc_feature: MA Experiment ID: 20000180 Result: Up-regulated in Transcription
  misc_feature: MA Experiment 20000180 PARAMETER Experiment Name: At_Germinating_Seeds_P Parameter: Age (hr) Value: 24 vs. 0
  misc_feature: MA Experiment 20000180 PARAMETER Experiment Name: At_Germinating_Seeds_P Parameter: Tissue Value: Germinating Seeds
  misc_feature: MA Experiment ID: 20000182 Result: Down-regulated in Transcription
  misc_feature: MA Experiment 20000182 PARAMETER Experiment Name: At_2mM_SA_P Parameter: Age (day) Value: 14
  misc_feature: MA Experiment 20000182 PARAMETER Experiment Name: At_2mM_SA_P Parameter: Organism Value: A. thaliana
  misc_feature: MA Experiment 20000182 PARAMETER Experiment Name: At_2mM_SA_P Parameter: Plant Line Value: WS
  misc_feature: MA Experiment 20000182 PARAMETER Experiment Name: At_2mM_SA_P Parameter: Timepoint (hr) Value: 6
  misc_feature: MA Experiment 20000182 PARAMETER Experiment Name: At_2mM_SA_P Parameter: Tissue Value: Aerial
  misc_feature: MA Experiment 20000182 PARAMETER Experiment Name: At_2mM_SA_P Parameter: Treatment Value: 2mM SA vs. No Treatment
  misc_feature: MA Experiment ID: 20000184 Result: Up-regulated in Transcription
  misc_feature: MA Experiment 20000184 PARAMETER Experiment Name: At_Shoots__P Parameter: Age (day) Value: 7
  misc_feature: MA Experiment 20000184 PARAMETER Experiment Name: At_Shoots__P Parameter: Tissue Value: Shoots vs. Whole Plant
  misc_feature: MA Experiment ID: 20000185 Result: Down-regulated in Transcription
  misc_feature: MA Experiment 20000185 PARAMETER Experiment Name: At_Roots__P Parameter: Age (day) Value: 7 vs. 21
  misc_feature: MA Experiment 20000185 PARAMETER Experiment Name: At_Roots__P Parameter: Organism Value: A. thaliana
  misc_feature: MA Experiment 20000185 PARAMETER Experiment Name: At_Roots__P Parameter: Tissue Value: Roots vs. Whole Plant
  misc_feature: MA Experiment ID: 20000234 Result: Up-regulated in Transcription
  misc_feature: MA Experiment 20000234 PARAMETER Experiment Name: At_Siliques_P Parameter: Age (day) Value: 21
  misc_feature: MA Experiment 20000234 PARAMETER Experiment Name: At_Siliques_P Parameter: Organism Value: A. thaliana
  misc_feature: MA Experiment 20000234 PARAMETER Experiment Name: At_Siliques_P Parameter: Plant Line Value: WS
  misc_feature: MA Experiment 20000234 PARAMETER Experiment Name: At_Siliques_P Parameter: Tissue Value: Less Than 5mm Siliques vs. Whole Plant
  misc_feature: MA Experiment ID: 20000264 Result: Up-regulated in Transcription
  misc_feature: MA Experiment 20000264 PARAMETER Experiment Name: At_Open_Flower_P Parameter: Age (day) Value: 21
  misc_feature: MA Experiment 20000264 PARAMETER Experiment Name: At_Open_Flower_P Parameter: Plant Line Value: WS
  misc_feature: MA Experiment 20000264 PARAMETER Experiment Name: At_Open_Flower_P Parameter: Tissue Value: Open Flower vs. Whole Plant
  misc_feature: MA Experiment ID: 20000265 Result: Up-regulated in Transcription
  misc_feature: MA Experiment 20000265 PARAMETER Experiment Name: At_Open_Flower_P Parameter: Age (day) Value: 21
  misc_feature: MA Experiment 20000265 PARAMETER Experiment Name: At_Open_Flower_P Parameter: Plant Line Value: WS
  misc_feature: MA Experiment 20000265 PARAMETER Experiment Name: At_Open_Flower_P Parameter: Tissue Value: Closed Flower vs. Whole Plant
  misc_feature: MA Experiment ID: 20000286 Result: Up-regulated in Transcription
  misc_feature: MA Experiment 20000286 PARAMETER Experiment Name: At_Open_Flower_P Parameter: Age (day) Value: 21
  misc_feature: MA Experiment 20000286 PARAMETER Experiment Name: At_Open_Flower_P Parameter: Plant Line Value: WS
  misc_feature: MA Experiment 20000286 PARAMETER Experiment Name: At_Open_Flower_P Parameter: Tissue Value: Half Open vs. Whole Plant
  misc_feature: MA Experiment ID: 20000436 Result: Down-regulated in Transcription
  misc_feature: MA Experiment 20000436 PARAMETER Experiment Name: At_Drought_P Parameter: Age (day) Value: 7
  misc_feature: MA Experiment 20000436 PARAMETER Experiment Name: At_Drought_P Parameter: Organism Value: A. thaliana
  misc_feature: MA Experiment 20000436 PARAMETER Experiment Name: At_Drought_P Parameter: Plant Line Value: WS
  misc_feature: MA Experiment 20000436 PARAMETER Experiment Name: At_Drought_P Parameter: Timepoint (hr) Value: 12
  misc_feature: MA Experiment 20000436 PARAMETER Experiment Name: At_Drought_P Parameter: Tissue Value: Whole Plant
  misc_feature: MA Experiment 20000436 PARAMETER Experiment Name: At_Drought_P Parameter: Treatment Value: Drought vs. No Drought
  misc_feature: MA Experiment ID: 20000437 Result: Down-regulated in Transcription
  misc_feature: MA Experiment 20000437 PARAMETER Experiment Name: At_Drought_P Parameter: Age (day) Value: 8
  misc_feature: MA Experiment 20000437 PARAMETER Experiment Name: At_Drought_P Parameter: Organism Value: A. thaliana
  misc_feature: MA Experiment 20000437 PARAMETER Experiment Name: At_Drought_P Parameter: Plant Line Value: WS
  misc_feature: MA Experiment 20000437 PARAMETER Experiment Name: At_Drought_P Parameter: Timepoint (hr) Value: 24
  misc_feature: MA Experiment 20000437 PARAMETER Experiment Name: At_Drought_P Parameter: Tissue Value: Whole Plant
  misc_feature: MA Experiment 20000437 PARAMETER Experiment Name: At_Drought_P Parameter: Treatment Value: Drought vs. No Drought
  misc_feature: MA Experiment ID: 20000438 Result: Up-regulated in Transcription
  misc_feature: MA Experiment 20000438 PARAMETER Experiment Name: At_Shoots__P Parameter: Age (day) Value: 14
  misc_feature: MA Experiment 20000438 PARAMETER Experiment Name: At_Shoots__P Parameter: Tissue Value: Shoots vs. Whole Plant
  misc_feature: MA Experiment ID: 20000439 Result: Down-regulated in Transcription
  misc_feature: MA Experiment 20000439 PARAMETER Experiment Name: At_Roots__P Parameter: Age (day) Value: 14 vs. 21
  misc_feature: MA Experiment 20000439 PARAMETER Experiment Name: At_Roots__P Parameter: Organism Value: A. thaliana
  misc_feature: MA Experiment 20000439 PARAMETER Experiment Name: At_Roots__P Parameter: Tissue Value: Roots vs. Whole Plant
  misc_feature: MA Experiment ID: 20000527 Result: Down-regulated in Transcription
  misc_feature: MA Experiment 20000527 PARAMETER Experiment Name: At_10percent_PEG_P Parameter: Age (day) Value: 20
  misc_feature: MA Experiment 20000527 PARAMETER Experiment Name: At_10percent_PEG_P Parameter: Organism Value: A. thaliana
  misc_feature: MA Experiment 20000527 PARAMETER Experiment Name: At_10percent_PEG_P Parameter: Plant Line Value: WS
  misc_feature: MA Experiment 20000527 PARAMETER Experiment Name: At_10percent_PEG_P Parameter: Timepoint (day) Value: 20
  misc_feature: MA Experiment 20000527 PARAMETER Experiment Name: At_10percent_PEG_P Parameter: Tissue Value: Whole Plant
  misc_feature: MA Experiment 20000527 PARAMETER Experiment Name: At_10percent_PEG_P Parameter: Treatment Value: 10percent PEG vs. No Treatment
  misc_feature: MA Experiment ID: 20000794 Result: Down-regulated in Transcription
  misc_feature: MA Experiment 20000794 PARAMETER Experiment Name: At_Petals_P Parameter: Age (day) Value: 23-25 days
  misc_feature: MA Experiment 20000794 PARAMETER Experiment Name: At_Petals_P Parameter: Plant Line Value: WS
  misc_feature: MA Experiment 20000794 PARAMETER Experiment Name: At_Petals_P Parameter: Tissue Value: Petals vs. Whole plant
  misc_feature: MA Experiment ID: 20001248 Result: Down-regulated in Transcription
  misc_feature: MA Experiment 20001248 PARAMETER Experiment Name: At_Far-red-induction_P Parameter: Age (day) Value: 7
  misc_feature: MA Experiment 20001248 PARAMETER Experiment Name: At_Far-red-induction_P Parameter: Light Value: Far-red vs. White
  misc_feature: MA Experiment 20001248 PARAMETER Experiment Name: At_Far-red-induction_P Parameter: Organism Value: A. thaliana
  misc_feature: MA Experiment 20001248 PARAMETER Experiment Name: At_Far-red-induction_P Parameter: Plant Line Value: Columbia
  misc_feature: MA Experiment 20001248 PARAMETER Experiment Name: At_Far-red-induction_P Parameter: Timepoint (hr) Value: 4
  misc_feature: MA Experiment 20001248 PARAMETER Experiment Name: At_Far-red-induction_P Parameter: Tissue Value: Whole Plant
  misc_feature: MA Experiment ID: 20001450 Result: Down-regulated in Transcription
  misc_feature: MA Experiment 20001450 PARAMETER Experiment Name: At_Far-red-induction_P Parameter: Age (day) Value: 7
  misc_feature: MA Experiment 20001450 PARAMETER Experiment Name: At_Far-red-induction_P Parameter: Light Value: Far-red vs. White
  misc_feature: MA Experiment 20001450 PARAMETER Experiment Name: At_Far-red-induction_P Parameter: Organism Value: A. thaliana
  misc_feature: MA Experiment 20001450 PARAMETER Experiment Name: At_Far-red-induction_P Parameter: Plant Line Value: Columbia
  misc_feature: MA Experiment 20001450 PARAMETER Experiment Name: At_Far-red-induction_P Parameter: Timepoint (hr) Value: 8
  misc_feature: MA Experiment 20001450 PARAMETER Experiment Name: At_Far-red-induction_P Parameter: Tissue Value: Whole Plant
  misc_feature: MA Experiment ID: 20001451 Result: Down-regulated in Transcription
  misc_feature: MA Experiment 20001451 PARAMETER Experiment Name: At_Far-red-induction_P Parameter: Age (day) Value: 7
  misc_feature: MA Experiment 20001451 PARAMETER Experiment Name: At_Far-red-induction_P Parameter: Light Value: Far-red vs. White
  misc_feature: MA Experiment 20001451 PARAMETER Experiment Name: At_Far-red-induction_P Parameter: Organism Value: A. thaliana
  misc_feature: MA Experiment 20001451 PARAMETER Experiment Name: At_Far-red-induction_P Parameter: Plant Line Value: Columbia
  misc_feature: MA Experiment 20001451 PARAMETER Experiment Name: At_Far-red-induction_P Parameter: Timepoint (hr) Value: 24
  misc_feature: MA Experiment 20001451 PARAMETER Experiment Name: At_Far-red-induction_P Parameter: Tissue Value: Whole Plant
  misc_feature: MA Experiment ID: 20001555 Result: Down-regulated in Transcription
  misc_feature: MA Experiment 20001555 PARAMETER Experiment Name: At_Drought_Soil_Dry_P Parameter: Age (day) Value: 24
  misc_feature: MA Experiment 20001555 PARAMETER Experiment Name: At_Drought_Soil_Dry_P Parameter: Organism Value: A. thaliana
  misc_feature: MA Experiment 20001555 PARAMETER Experiment Name: At_Drought_Soil_Dry_P Parameter: Plant Line Value: WS
  misc_feature: MA Experiment 20001555 PARAMETER Experiment Name: At_Drought_Soil_Dry_P Parameter: Post Timepoint (hr) Value: None
  misc_feature: MA Experiment 20001555 PARAMETER Experiment Name: At_Drought_Soil_Dry_P Parameter: Post-Treatment Value: None
  misc_feature: MA Experiment 20001555 PARAMETER Experiment Name: At_Drought_Soil_Dry_P Parameter: Timepoint (day) Value: 10
  misc_feature: MA Experiment 20001555 PARAMETER Experiment Name: At_Drought_Soil_Dry_P Parameter: Treatment Value: Drought vs. No Drought
  misc_feature: MA Experiment ID: 20001556 Result: Down-regulated in Transcription
  misc_feature: MA Experiment 20001556 PARAMETER Experiment Name: At_Drought_Soil_Dry_P Parameter: Age (day) Value: 26
  misc_feature: MA Experiment 20001556 PARAMETER Experiment Name: At_Drought_Soil_Dry_P Parameter: Organism Value: A. thaliana
  misc_feature: MA Experiment 20001556 PARAMETER Experiment Name: At_Drought_Soil_Dry_P Parameter: Plant Line Value: WS
  misc_feature: MA Experiment 20001556 PARAMETER Experiment Name: At_Drought_Soil_Dry_P Parameter: Post Timepoint (hr) Value: None
  misc_feature: MA Experiment 20001556 PARAMETER Experiment Name: At_Drought_Soil_Dry_P Parameter: Post-Treatment Value: None
  misc_feature: MA Experiment 20001556 PARAMETER Experiment Name: At_Drought_Soil_Dry_P Parameter: Timepoint (day) Value: 12
  misc_feature: MA Experiment 20001556 PARAMETER Experiment Name: At_Drought_Soil_Dry_P Parameter: Treatment Value: Drought vs. No Drought
  misc_feature: MA Experiment ID: 20001559 Result: Down-regulated in Transcription
  misc_feature: MA Experiment 20001559 PARAMETER Experiment Name: At_Drought_Soil_Dry_P Parameter: Age (day) Value: 28
  misc_feature: MA Experiment 20001559 PARAMETER Experiment Name: At_Drought_Soil_Dry_P Parameter: Organism Value: A. thaliana
  misc_feature: MA Experiment 20001559 PARAMETER Experiment Name: At_Drought_Soil_Dry_P Parameter: Plant Line Value: WS
  misc_feature: MA Experiment 20001559 PARAMETER Experiment Name: At_Drought_Soil_Dry_P Parameter: Post Timepoint (hr) Value: 29
  misc_feature: MA Experiment 20001559 PARAMETER Experiment Name: At_Drought_Soil_Dry_P Parameter: Post-Treatment Value: Re-Water vs. No Drought
  misc_feature: MA Experiment 20001559 PARAMETER Experiment Name: At_Drought_Soil_Dry_P Parameter: Timepoint (day) Value: 14
  misc_feature: MA Experiment 20001559 PARAMETER Experiment Name: At_Drought_Soil_Dry_P Parameter: Treatment Value: Drought vs. No Drought
  misc_feature: MA Experiment ID: 20001906 Result: Down-regulated in Transcription
  misc_feature: MA Experiment 20001906 PARAMETER Experiment Name: At_Drought_Reproduction_P Parameter: Age (day) Value: 35
  misc_feature: MA Experiment 20001906 PARAMETER Experiment Name: At_Drought_Reproduction_P Parameter: Organism Value: A. thaliana
  misc_feature: MA Experiment 20001906 PARAMETER Experiment Name: At_Drought_Reproduction_P Parameter: Plant Line Value: WS
  misc_feature: MA Experiment 20001906 PARAMETER Experiment Name: At_Drought_Reproduction_P Parameter: Timepoint (day) Value: 5
  misc_feature: MA Experiment 20001906 PARAMETER Experiment Name: At_Drought_Reproduction_P Parameter: Tissue Value: Siliques
  misc_feature: MA Experiment 20001906 PARAMETER Experiment Name: At_Drought_Reproduction_P Parameter: Treatment Value: Drought vs. No Drought
  misc_feature: MA Experiment ID: 20001911 Result: Down-regulated in Transcription
  misc_feature: MA Experiment 20001911 PARAMETER Experiment Name: At_Drought_Reproduction_P Parameter: Age (day) Value: 40
  misc_feature: MA Experiment 20001911 PARAMETER Experiment Name: At_Drought_Reproduction_P Parameter: Organism Value: A. thaliana
  misc_feature: MA Experiment 20001911 PARAMETER Experiment Name: At_Drought_Reproduction_P Parameter: Plant Line Value: WS
  misc_feature: MA Experiment 20001911 PARAMETER Experiment Name: At_Drought_Reproduction_P Parameter: Timepoint (day) Value: 10
  misc_feature: MA Experiment 20001911 PARAMETER Experiment Name: At_Drought_Reproduction_P Parameter: Tissue Value: Flowers
  misc_feature: MA Experiment 20001911 PARAMETER Experiment Name: At_Drought_Reproduction_P Parameter: Treatment Value: Drought vs. No Drought
atatcatacgtcaatttataaacgtttcttctcattcgtcatctagtcccattctctgtccataacaatgaatatcaattgttctccattagggtttctaatttcactcttcttcattgttacttttcttgcaccacaagtcaaatctagggctttctttgtctttggtgactctctcgtcgacaatggaaacaacgactacctcgtcaccactgcccgtgccgacaattacccgtatggtatcgactacccgacccgtagacccaccggacgtttctctaacggccttaacattcccgacattatcagtgaggctataggcatgccgtcgactttgccgtaccttagcccgcatctcaccggagaaaatcttctagtcggtgctaattttgcctccgcaggaattggaatcctcaacgacactggaattcaattcgtaaacataattagaatttctaaacagatggaatacttcgaacagtaccagctacgagtgagtgcattgatcggaccagaagctacacaacagctagttaaccaagctcttgtcctaattacactcggtggtaatgatttcgtcaacaattattatctaattccgttttcagctcgttctcgccaatacgcgttaccagactacgttgtgtatctcatttccgaatacggaaagattctcagaaaactctacgaactgggtgcaagacgagttttggtaactggaactggtgcaatgggatgtgctcccgcggagctggctcagcatagccgcaatggcgagtgctatggcgccctccaaacagcagccgctttgttcaatccgcaattagttgatttgatcgcatcagtcaatgctgaaattggtcaagacgtgtttgtagcagccaatgcctatcaaatgaacatggattatctatctaatcctgaacaatttgggtttgtgacatcgaaggtggcatgttgtggacaaggaccgtacaatggcataggactatgcacaccagtctcgaatttgtgtccgaatagagacttatatgcgttttgggatgcgtttcatccgacagagaaagccaataggatcatcgttaatcagatcctgactggttcctccaagtatatgcaccctatgaatcttagcacggccatgctattggattcttctaaaatctagtttaagtgatttctgtcaactaaatgtcaggtcattccttctgtactttgcattgttgttaatgtgttgattaataagttcaatggctacaattagtttaagcatgcaagagagtttttattgtcggtcgtctagtttgatgtctttgcttgttgtatcttgttattttttttattttataaaagaaccgttgtatcttggttagcttagtttagtcttttttggtttgtatgccaattatatcatgtaatatttgaaaacttgtagtgattgatatatgattttcttttctattc

SEQ ID NO: 85605 - protein, 366 aa, Arabidopsis thaliana; identical to SEQ ID NO: 25979
  peptide (1)..(366): Ceres Seq. ID no. 12681266
  misc_feature (30)..(342): Pfam Name: GDSL-like Lipase/Acylhydrolase Pfam Description: GDSL-like Lipase/Acylhydrolase
  misc_feature (1)..(366): Homolog of NCBI NO: 15229265 NR Description: putative GDSL-motif lipase/acylhydrolase; protein
  misc_feature (8)..(363): Homolog of NCBI NO: 15242808 NR Description: putative protein; protein id: At5g33370.1,
  misc_feature (24)..(364): Homolog of NCBI NO: 28071322 NR Description: P0705A05.30 [Oryza sativa (japonica
  misc_feature (17)..(363): Homolog of NCBI NO: 15235421 NR Description: Proline-rich APG - like protein; protein id:
  misc_feature (3)..(365): Homolog of NCBI NO: 37535146 NR Description: putative early nodulin gene (Enod) related
  misc_feature (22)..(365): Homolog of NCBI NO: 22758315 NR Description: putative early nodulin gene (Enod) related
  misc_feature (12)..(361): Homolog of NCBI NO: 15238814 NR Description: putative protein; protein id: At5g18430.1
  misc_feature (21)..(189): Homolog of NCBI NO: 37789825 NR Description: putative GDSL-motif lipase [Vitis vinifera]
  misc_feature (29)..(355): Homolog of NCBI NO: 11280578 NR Description: hypothetical protein F14F8_100 - Arabidopsis >gi|9755617|emb|CAC01771.1| putative protein [Arabidopsis
  misc_feature (3)..(357): Homolog of NCBI NO: 34909504 NR Description: putative GDSL-motif lipase/hydrolase-like protein

SEQ ID NO: 85606 - protein, 281 aa, Arabidopsis thaliana; identical to SEQ ID NO: 25980
  peptide (1)..(281): Ceres Seq. ID no. 12681267
  misc_feature (1)..(257): Pfam Name: GDSL-like Lipase/Acylhydrolase Pfam Description: GDSL-like Lipase/Acylhydrolase
  misc_feature (1)..(281): Homolog of NCBI NO: 15229265 NR Description: putative GDSL-motif lipase/acylhydrolase; protein
  misc_feature (1)..(278): Homolog of NCBI NO: 15242808 NR Description: putative protein; protein id: At5g33370.1,
  misc_feature (1)..(279): Homolog of NCBI NO: 28071322 NR Description: P0705A05.30 [Oryza sativa (japonica
  misc_feature (1)..(278): Homolog of NCBI NO: 15235421 NR Description: Proline-rich APG - like protein; protein id:
  misc_feature (1)..(280): Homolog of NCBI NO: 37535146 NR Description: putative early nodulin gene (Enod) related
  misc_feature (1)..(280): Homolog of NCBI NO: 22758315 NR Description: putative early nodulin gene (Enod) related
  misc_feature (1)..(276): Homolog of NCBI NO: 15238814 NR Description: putative protein; protein id: At5g18430.1
  misc_feature (1)..(104): Homolog of NCBI NO: 37789825 NR Description: putative GDSL-motif lipase [Vitis vinifera]
  misc_feature (1)..(270): Homolog of NCBI NO: 11280578 NR Description: hypothetical protein F14F8_100 - Arabidopsis >gi|9755617|emb|CAC01771.1| putative protein [Arabidopsis
  misc_feature (1)..(272): Homolog of NCBI NO: 34909504 NR Description: putative GDSL-motif lipase/hydrolase-like protein

SEQ ID NO: 85607 - protein, 234 aa, Arabidopsis thaliana; identical to SEQ ID NO: 25981
  peptide (1)..(234): Ceres Seq. ID no. 12681268
  misc_feature (1)..(210): Pfam Name: GDSL-like Lipase/Acylhydrolase Pfam Description: GDSL-like Lipase/Acylhydrolase
  misc_feature (1)..(234): Homolog of NCBI NO: 15229265 NR Description: putative GDSL-motif lipase/acylhydrolase; protein
  misc_feature (1)..(231): Homolog of NCBI NO: 15242808 NR Description: putative protein; protein id: At5g33370.1,
  misc_feature (1)..(232): Homolog of NCBI NO: 28071322 NR Description: P0705A05.30 [Oryza sativa (japonica
  misc_feature (1)..(231): Homolog of NCBI NO: 15235421 NR Description: Proline-rich APG - like protein; protein id:
  misc_feature (1)..(233): Homolog of NCBI NO: 37535146 NR Description: putative early nodulin gene (Enod) related
  misc_feature (1)..(233): Homolog of NCBI NO: 22758315 NR Description: putative early nodulin gene (Enod) related
  misc_feature (1)..(229): Homolog of NCBI NO: 15238814 NR Description: putative protein; protein id: At5g18430.1
  misc_feature (1)..(57): Homolog of NCBI NO: 37789825 NR Description: putative GDSL-motif lipase [Vitis vinifera]
  misc_feature (1)..(223): Homolog of NCBI NO: 11280578 NR Description: hypothetical protein F14F8_100 - Arabidopsis >gi|9755617|emb|CAC01771.1| putative protein [Arabidopsis
  misc_feature (1)..(225): Homolog of NCBI NO: 34909504 NR Description: putative GDSL-motif lipase/hydrolase-like protein

SEQ ID NO: 85608 - DNA, 1131 bp, Arabidopsis thaliana
  misc_feature (1)..(1131): Ceres Seq. ID no. 12681368
  misc_feature: MA Experiment ID: 108434 Result: Down-regulated in Transcription
  misc_feature: MA Experiment 108434 PARAMETER Experiment Name: At_Root_Tips_cDNA_P Parameter: Tissue Value: Root Tips
  misc_feature: MA Experiment ID: 108462 Result: Up-regulated in Transcription
  misc_feature: MA Experiment 108462 PARAMETER Experiment Name: At_Germinating_Seeds_cDNA_P Parameter: Age (day) Value: 2 vs. 0
  misc_feature: MA Experiment 108462 PARAMETER Experiment Name: At_Germinating_Seeds_cDNA_P Parameter: Tissue Value: Germinating Seeds
  misc_feature: MA Experiment ID: 108463 Result: Up-regulated in Transcription
  misc_feature: MA Experiment 108463 PARAMETER Experiment Name: At_Germinating_Seeds_cDNA_P Parameter: Age (day) Value: 3 vs. 0
  misc_feature: MA Experiment 108463 PARAMETER Experiment Name: At_Germinating_Seeds_cDNA_P Parameter: Tissue Value: Germinating Seeds
  misc_feature: MA Experiment ID: 108464 Result: Up-regulated in Transcription
  misc_feature: MA Experiment 108464 PARAMETER Experiment Name: At_Germinating_Seeds_cDNA_P Parameter: Age (day) Value: 4 vs. 0
  misc_feature: MA Experiment 108464 PARAMETER Experiment Name: At_Germinating_Seeds_cDNA_P Parameter: Tissue Value: Germinating Seeds
  misc_feature: MA Experiment ID: 108569 Result: Up-regulated in Transcription
  misc_feature: MA Experiment 108569 PARAMETER Experiment Name: At_0.001%_MeJA__cDNA_P Parameter: Timepoint (hr) Value: 6
  misc_feature: MA Experiment 108569 PARAMETER Experiment Name: At_0.001%_MeJA__cDNA_P Parameter: Tissue Value: Aerial
  misc_feature: MA Experiment 108569 PARAMETER Experiment Name: At_0.001%_MeJA__cDNA_P Parameter: Treatment Value: 0.001% MeJA vs. No Treatment
  misc_feature: MA Experiment ID: 108572 Result: Up-regulated in Transcription
  misc_feature: MA Experiment 108572 PARAMETER Experiment Name: At_Drought_cDNA_P Parameter: Timepoint (hr) Value: 1
  misc_feature: MA Experiment 108572 PARAMETER Experiment Name: At_Drought_cDNA_P Parameter: Tissue Value: Aerial
  misc_feature: MA Experiment 108572 PARAMETER Experiment Name: At_Drought_cDNA_P Parameter: Treatment Value: Drought vs. No Drought
  misc_feature: MA Experiment ID: 108573 Result: Up-regulated in Transcription
  misc_feature: MA Experiment 108573 PARAMETER Experiment Name: At_Drought_cDNA_P Parameter: Timepoint (hr) Value: 6
  misc_feature: MA Experiment 108573 PARAMETER Experiment Name: At_Drought_cDNA_P Parameter: Tissue Value: Aerial
  misc_feature: MA Experiment 108573 PARAMETER Experiment Name: At_Drought_cDNA_P Parameter: Treatment Value: Drought vs. No Drought
  misc_feature: MA Experiment ID: 108574 Result: Up-regulated in Transcription
  misc_feature: MA Experiment 108574 PARAMETER Experiment Name: At_Wounding__cDNA_P Parameter: Timepoint (hr) Value: 1
  misc_feature: MA Experiment 108574 PARAMETER Experiment Name: At_Wounding__cDNA_P Parameter: Tissue Value: Aerial
  misc_feature: MA Experiment 108574 PARAMETER Experiment Name: At_Wounding__cDNA_P Parameter: Treatment Value: Wounding vs. No Wounding
  misc_feature: MA Experiment ID: 108576 Result: Up-regulated in Transcription
  misc_feature: MA Experiment 108576 PARAMETER Experiment Name: At_42deg_Heat_cDNA_P Parameter: Temperature (deg C) Value: 42 vs. 22
  misc_feature: MA Experiment 108576 PARAMETER Experiment Name: At_42deg_Heat_cDNA_P Parameter: Timepoint (hr) Value: 1
  misc_feature: MA Experiment 108576 PARAMETER Experiment Name: At_42deg_Heat_cDNA_P Parameter: Tissue Value: Aerial
  misc_feature: MA Experiment ID: 108577 Result: Up-regulated in Transcription
  misc_feature: MA Experiment 108577 PARAMETER Experiment Name: At_42deg_Heat_cDNA_P Parameter: Temperature (deg C) Value: 42 vs. 22
  misc_feature: MA Experiment 108577 PARAMETER Experiment Name: At_42deg_Heat_cDNA_P Parameter: Timepoint (hr) Value: 6
  misc_feature: MA Experiment 108577 PARAMETER Experiment Name: At_42deg_Heat_cDNA_P Parameter: Tissue Value: Aerial
  misc_feature: MA Experiment ID: 108579 Result: Down-regulated in Transcription
  misc_feature: MA Experiment 108579 PARAMETER Experiment Name: At_4deg_Cold_cDNA_P Parameter: Temperature (deg C) Value: 4 vs. 22
  misc_feature: MA Experiment 108579 PARAMETER Experiment Name: At_4deg_Cold_cDNA_P Parameter: Timepoint (hr) Value: 6
  misc_feature: MA Experiment 108579 PARAMETER Experiment Name: At_4deg_Cold_cDNA_P Parameter: Tissue Value: Aerial
  misc_feature: MA Experiment ID: 108585 Result: Up-regulated in Transcription
  misc_feature: MA Experiment 108585 PARAMETER Experiment Name: At_5mM_NaNP_cDNA_P Parameter: Timepoint (hr) Value: 6
  misc_feature: MA Experiment 108585 PARAMETER Experiment Name: At_5mM_NaNP_cDNA_P Parameter: Tissue Value: Aerial
  misc_feature: MA Experiment 108585 PARAMETER Experiment Name: At_5mM_NaNP_cDNA_P Parameter: Treatment Value: null
  misc_feature: MA Experiment ID: 108594 Result: Down-regulated in Transcription
  misc_feature: MA Experiment 108594 PARAMETER Experiment Name: At_Ler-rhl_Root_cDNA_P Parameter: Plant Line Value: null
  misc_feature: MA Experiment ID: 20000086 Result: Down-regulated in Transcription
  misc_feature: MA Experiment 20000086 PARAMETER Experiment Name: At_100uM_ABA_Mutants_cDNA_P Parameter: Plant Line Value: CS22
  misc_feature: MA Experiment 20000086 PARAMETER Experiment Name: At_100uM_ABA_Mutants_cDNA_P Parameter: Timepoint (hr) Value: 6
  misc_feature: MA Experiment 20000086 PARAMETER Experiment Name: At_100uM_ABA_Mutants_cDNA_P Parameter: Tissue Value: Aerial
  misc_feature: MA Experiment 20000086 PARAMETER Experiment Name: At_100uM_ABA_Mutants_cDNA_P Parameter: Treatment Value: 100uM ABA vs. No Treatment
  misc_feature: MA Experiment ID: 20000087 Result: Down-regulated in Transcription
  misc_feature: MA Experiment 20000087 PARAMETER Experiment Name: At_100uM_ABA_Mutants_cDNA_P Parameter: Plant Line Value: WS
  misc_feature: MA Experiment 20000087 PARAMETER Experiment Name: At_100uM_ABA_Mutants_cDNA_P Parameter: Timepoint (hr) Value: 6
  misc_feature: MA Experiment 20000087 PARAMETER Experiment Name: At_100uM_ABA_Mutants_cDNA_P Parameter: Tissue Value: Aerial
  misc_feature: MA Experiment 20000087 PARAMETER Experiment Name: At_100uM_ABA_Mutants_cDNA_P Parameter: Treatment Value: 100uM ABA vs. No Treatment
  misc_feature: MA Experiment ID: 20000089 Result: Down-regulated in Transcription
  misc_feature: MA Experiment ID: 20000090 Result: Down-regulated in Transcription
  misc_feature: MA Experiment ID: 20000093 Result: Up-regulated in Transcription
  misc_feature: MA Experiment 20000093 PARAMETER Experiment Name: At_42deg_Heat_cDNA_P Parameter: Temperature (deg C) Value: 42 vs. 22
  misc_feature: MA Experiment 20000093 PARAMETER Experiment Name: At_42deg_Heat_cDNA_P Parameter: Timepoint (hr) Value: 0.5
  misc_feature: MA Experiment 20000093 PARAMETER Experiment Name: At_42deg_Heat_cDNA_P Parameter: Tissue Value: Aerial
  misc_feature: MA Experiment ID: 20000111 Result: Up-regulated in Transcription
  misc_feature: MA Experiment 20000111 PARAMETER Experiment Name: At_42deg_Heat_cDNA_P Parameter: Temperature (deg C) Value: 42 vs. 22
  misc_feature: MA Experiment 20000111 PARAMETER Experiment Name: At_42deg_Heat_cDNA_P Parameter: Timepoint (hr) Value: 6
  misc_feature: MA Experiment 20000111 PARAMETER Experiment Name: At_42deg_Heat_cDNA_P Parameter: Tissue Value: Aerial
  misc_feature: MA Experiment ID: 20000113 Result: Up-regulated in Transcription
  misc_feature: MA Experiment 20000113 PARAMETER Experiment Name: At_42deg_Heat_cDNA_P Parameter: Temperature (deg C) Value: 42 vs. 22
  misc_feature: MA Experiment 20000113 PARAMETER Experiment Name: At_42deg_Heat_cDNA_P Parameter: Timepoint (hr) Value: 8
  misc_feature: MA Experiment 20000113 PARAMETER Experiment Name: At_42deg_Heat_cDNA_P Parameter: Tissue Value: Aerial
  misc_feature: MA Experiment ID: 20000166 Result: Up-regulated in Transcription
  misc_feature: MA Experiment 20000166 PARAMETER Experiment Name: At_100uM_ABA_P Parameter: Age (day) Value: 14
  misc_feature: MA Experiment 20000166 PARAMETER Experiment Name: At_100uM_ABA_P Parameter: Organism Value: A. thaliana
  misc_feature: MA Experiment 20000166 PARAMETER Experiment Name: At_100uM_ABA_P Parameter: Plant Line Value: WS
  misc_feature: MA Experiment 20000166 PARAMETER Experiment Name: At_100uM_ABA_P Parameter: Timepoint (hr) Value: 1
  misc_feature: MA Experiment 20000166 PARAMETER Experiment Name: At_100uM_ABA_P Parameter: Tissue Value: Aerial
  misc_feature: MA Experiment 20000166 PARAMETER Experiment Name: At_100uM_ABA_P Parameter: Treatment Value: 100uM ABA vs. No Treatment
  misc_feature: MA Experiment ID: 20000171 Result: Up-regulated in Transcription
  misc_feature: MA Experiment 20000171 PARAMETER Experiment Name: At_42deg_Heat_P Parameter: Age (day) Value: 14
  misc_feature: MA Experiment 20000171 PARAMETER Experiment Name: At_42deg_Heat_P Parameter: Organism Value: A. thaliana
  misc_feature: MA Experiment 20000171 PARAMETER Experiment Name: At_42deg_Heat_P Parameter: Plant Line Value: WS
  misc_feature: MA Experiment 20000171 PARAMETER Experiment Name: At_42deg_Heat_P Parameter: Temperature (deg C) Value: 42 vs. 22
  misc_feature: MA Experiment 20000171 PARAMETER Experiment Name: At_42deg_Heat_P Parameter: Timepoint (hr) Value: 1
  misc_feature: MA Experiment 20000171 PARAMETER Experiment Name: At_42deg_Heat_P Parameter: Tissue Value: Aerial
  misc_feature: MA Experiment ID: 20000173 Result: Up-regulated in Transcription
  misc_feature: MA Experiment 20000173 PARAMETER Experiment Name: At_42deg_Heat_P Parameter: Age (day) Value: 14
  misc_feature: MA Experiment 20000173 PARAMETER Experiment Name: At_42deg_Heat_P Parameter: Organism Value: A. thaliana
  misc_feature: MA Experiment 20000173 PARAMETER Experiment Name: At_42deg_Heat_P Parameter: Plant Line Value: WS
  misc_feature: MA Experiment 20000173 PARAMETER Experiment Name: At_42deg_Heat_P Parameter: Temperature (deg C) Value: 42 vs. 22
  misc_feature: MA Experiment 20000173 PARAMETER Experiment Name: At_42deg_Heat_P Parameter: Timepoint (hr) Value: 6
  misc_feature: MA Experiment 20000173 PARAMETER Experiment Name: At_42deg_Heat_P Parameter: Tissue Value: Aerial
  misc_feature: MA Experiment ID: 20000182 Result: Up-regulated in Transcription
  misc_feature: MA Experiment 20000182 PARAMETER Experiment Name: At_2mM_SA_P Parameter: Age (day) Value: 14
  misc_feature: MA Experiment 20000182 PARAMETER Experiment Name: At_2mM_SA_P Parameter: Organism Value: A. thaliana
  misc_feature: MA Experiment 20000182 PARAMETER Experiment Name: At_2mM_SA_P Parameter: Plant Line Value: WS
  misc_feature: MA Experiment 20000182 PARAMETER Experiment Name: At_2mM_SA_P Parameter: Timepoint (hr) Value: 6
  misc_feature: MA Experiment 20000182 PARAMETER Experiment Name: At_2mM_SA_P Parameter: Tissue Value: Aerial
  misc_feature: MA Experiment 20000182 PARAMETER Experiment Name: At_2mM_SA_P Parameter: Treatment Value: 2mM SA vs. No Treatment
  misc_feature: MA Experiment ID: 20000184 Result: Up-regulated in Transcription
  misc_feature: MA Experiment 20000184 PARAMETER Experiment Name: At_Shoots__P Parameter: Age (day) Value: 7
  misc_feature: MA Experiment 20000184 PARAMETER Experiment Name: At_Shoots__P Parameter: Tissue Value: Shoots vs. Whole Plant
  misc_feature: MA Experiment ID: 20000185 Result: Up-regulated in Transcription
  misc_feature: MA Experiment 20000185 PARAMETER Experiment Name: At_Roots__P Parameter: Age (day) Value: 7 vs. 21
  misc_feature: MA Experiment 20000185 PARAMETER Experiment Name: At_Roots__P Parameter: Organism Value: A. thaliana
  misc_feature: MA Experiment 20000185 PARAMETER Experiment Name: At_Roots__P Parameter: Tissue Value: Roots vs. Whole Plant
  misc_feature: MA Experiment ID: 20000269 Result: Down-regulated in Transcription
  misc_feature: MA Experiment 20000269 PARAMETER Experiment Name: At_1mM_KNO3_L-vs-H_Roots_P Parameter: Age (day) Value: 7,10,12
  misc_feature: MA Experiment 20000269 PARAMETER Experiment Name: At_1mM_KNO3_L-vs-H_Roots_P Parameter: Organism Value: A. thaliana
  misc_feature: MA Experiment 20000269 PARAMETER Experiment Name: At_1mM_KNO3_L-vs-H_Roots_P Parameter: Plant Line Value: WS
  misc_feature: MA Experiment 20000269 PARAMETER Experiment Name: At_1mM_KNO3_L-vs-H_Roots_P Parameter: Timepoint (day) Value: 7,10,12
  misc_feature: MA Experiment 20000269 PARAMETER Experiment Name: At_1mM_KNO3_L-vs-H_Roots_P Parameter: Tissue Value: Roots
  misc_feature: MA Experiment 20000269 PARAMETER Experiment Name: At_1mM_KNO3_L-vs-H_Roots_P Parameter: Treatment Value: 1mM KNO3 vs. 50mM KNO3
  misc_feature: MA Experiment ID: 20000437 Result: Down-regulated in Transcription
  misc_feature: MA Experiment 20000437 PARAMETER Experiment Name: At_Drought_P Parameter: Age (day) Value: 8
  misc_feature: MA Experiment 20000437 PARAMETER Experiment Name: At_Drought_P Parameter: Organism Value: A. thaliana
  misc_feature: MA Experiment 20000437 PARAMETER Experiment Name: At_Drought_P Parameter: Plant Line Value: WS
  misc_feature: MA Experiment 20000437 PARAMETER Experiment Name: At_Drought_P Parameter: Timepoint (hr) Value: 24
  misc_feature: MA Experiment 20000437 PARAMETER Experiment Name: At_Drought_P Parameter: Tissue Value: Whole Plant
  misc_feature: MA Experiment 20000437 PARAMETER Experiment Name: At_Drought_P Parameter: Treatment Value: Drought vs. No Drought
  misc_feature: MA Experiment ID: 20000439 Result: Up-regulated in Transcription
  misc_feature: MA Experiment 20000439 PARAMETER Experiment Name: At_Roots__P Parameter: Age (day) Value: 14 vs. 21
  misc_feature: MA Experiment 20000439 PARAMETER Experiment Name: At_Roots__P Parameter: Organism Value: A. thaliana
  misc_feature: MA Experiment 20000439 PARAMETER Experiment Name: At_Roots__P Parameter: Tissue Value: Roots vs. Whole Plant
  misc_feature: MA Experiment ID: 20000451 Result: Down-regulated in Transcription
  misc_feature: MA Experiment 20000451 PARAMETER Experiment Name: At_CS6879_Shoots-Roots_P Parameter: Age (day) Value: 14
  misc_feature: MA Experiment 20000451 PARAMETER Experiment Name: At_CS6879_Shoots-Roots_P Parameter: Organism Value: A. thaliana
  misc_feature: MA Experiment 20000451 PARAMETER Experiment Name: At_CS6879_Shoots-Roots_P Parameter: Plant Line Value: CS6879 vs. WS
  misc_feature: MA Experiment 20000451 PARAMETER Experiment Name: At_CS6879_Shoots-Roots_P Parameter: Tissue Value: Roots
  misc_feature: MA Experiment ID: 20000506 Result: Up-regulated in Transcription
  misc_feature: MA Experiment 20000506 PARAMETER Experiment Name: At_Wounding_P Parameter: Organism Value: A. thaliana
  misc_feature: MA Experiment 20000506 PARAMETER Experiment Name: At_Wounding_P Parameter: Plant Line Value: WS
  misc_feature: MA Experiment 20000506 PARAMETER Experiment Name: At_Wounding_P Parameter: Timepoint (hr) Value: 6
  misc_feature: MA Experiment 20000506 PARAMETER Experiment Name: At_Wounding_P Parameter: Tissue Value: Aerial
  misc_feature: MA Experiment 20000506 PARAMETER Experiment Name: At_Wounding_P Parameter: Treatment Value: Wounding vs. No Wounding
  misc_feature: MA Experiment ID: 20001247 Result: Up-regulated in Transcription
  misc_feature: MA Experiment 20001247 PARAMETER Experiment Name: At_Far-red-induction_P Parameter: Age (day) Value: 7
  misc_feature: MA Experiment 20001247 PARAMETER Experiment Name: At_Far-red-induction_P Parameter: Light Value: Far-red vs. White
  misc_feature: MA Experiment 20001247 PARAMETER Experiment Name: At_Far-red-induction_P Parameter: Organism Value: A. thaliana
  misc_feature: MA Experiment 20001247 PARAMETER Experiment Name: At_Far-red-induction_P Parameter: Plant Line Value: Columbia
  misc_feature: MA Experiment 20001247 PARAMETER Experiment Name: At_Far-red-induction_P Parameter: Timepoint (hr) Value: 1
  misc_feature: MA Experiment 20001247 PARAMETER Experiment Name: At_Far-red-induction_P Parameter: Tissue Value: Whole Plant
  misc_feature: MA Experiment ID: 20001248 Result: Down-regulated in Transcription
  misc_feature: MA Experiment 20001248 PARAMETER Experiment Name: At_Far-red-induction_P Parameter: Age (day) Value: 7
  misc_feature: MA Experiment 20001248 PARAMETER Experiment Name: At_Far-red-induction_P Parameter: Light Value: Far-red vs. White
  misc_feature: MA Experiment 20001248 PARAMETER Experiment Name: At_Far-red-induction_P Parameter: Organism Value: A. thaliana
  misc_feature: MA Experiment 20001248 PARAMETER Experiment Name: At_Far-red-induction_P Parameter: Plant Line Value: Columbia
  misc_feature: MA Experiment 20001248 PARAMETER Experiment Name: At_Far-red-induction_P Parameter: Timepoint (hr) Value: 4
  misc_feature: MA Experiment 20001248 PARAMETER Experiment Name: At_Far-red-induction_P Parameter: Tissue Value: Whole Plant
  misc_feature: MA Experiment ID: 20001556 Result: Down-regulated in Transcription
  misc_feature: MA Experiment 20001556 PARAMETER Experiment Name: At_Drought_Soil_Dry_P Parameter: Age (day) Value: 26
  misc_feature: MA Experiment 20001556 PARAMETER Experiment Name: At_Drought_Soil_Dry_P Parameter: Organism Value: A. thaliana
  misc_feature: MA Experiment 20001556 PARAMETER Experiment Name: At_Drought_Soil_Dry_P Parameter: Plant Line Value: WS
  misc_feature: MA Experiment 20001556 PARAMETER Experiment Name: At_Drought_Soil_Dry_P Parameter: Post Timepoint (hr) Value: None
  misc_feature: MA Experiment 20001556 PARAMETER Experiment Name: At_Drought_Soil_Dry_P Parameter: Post-Treatment Value: None
  misc_feature: MA Experiment 20001556 PARAMETER Experiment Name: At_Drought_Soil_Dry_P Parameter: Timepoint (day) Value: 12
  misc_feature: MA Experiment 20001556 PARAMETER Experiment Name: At_Drought_Soil_Dry_P Parameter: Treatment Value: Drought vs. No Drought
  misc_feature: MA Experiment ID: 20001557 Result: Up-regulated in Transcription
  misc_feature: MA Experiment 20001557 PARAMETER Experiment Name: At_Drought_Soil_Dry_P Parameter: Age (day) Value: 27
  misc_feature: MA Experiment 20001557 PARAMETER Experiment Name: At_Drought_Soil_Dry_P Parameter: Organism Value: A. thaliana
  misc_feature: MA Experiment 20001557 PARAMETER Experiment Name: At_Drought_Soil_Dry_P Parameter: Plant Line Value: WS
  misc_feature: MA Experiment 20001557 PARAMETER Experiment Name: At_Drought_Soil_Dry_P Parameter: Post Timepoint (hr) Value: 3
  misc_feature: MA Experiment 20001557 PARAMETER Experiment Name: At_Drought_Soil_Dry_P Parameter: Post-Treatment Value: Re-Water vs. No Drought
  misc_feature: MA Experiment 20001557 PARAMETER Experiment Name: At_Drought_Soil_Dry_P Parameter: Timepoint (day) Value: 13
  misc_feature: MA Experiment 20001557 PARAMETER Experiment Name: At_Drought_Soil_Dry_P Parameter: Treatment Value: Drought vs. No Drought
  misc_feature: MA Experiment ID: 20001558 Result: Up-regulated in Transcription
  misc_feature: MA Experiment 20001558 PARAMETER Experiment Name: At_Drought_Soil_Dry_P Parameter: Age (day) Value: 27
  misc_feature: MA Experiment 20001558 PARAMETER Experiment Name: At_Drought_Soil_Dry_P Parameter: Organism Value: A. thaliana
  misc_feature: MA Experiment 20001558 PARAMETER Experiment Name: At_Drought_Soil_Dry_P Parameter: Plant Line Value: WS
  misc_feature: MA Experiment 20001558 PARAMETER Experiment Name: At_Drought_Soil_Dry_P Parameter: Post Timepoint (hr) Value: 6
  misc_feature: MA Experiment 20001558 PARAMETER Experiment Name: At_Drought_Soil_Dry_P Parameter: Post-Treatment Value: Re-Water vs. No Drought
  misc_feature: MA Experiment 20001558 PARAMETER Experiment Name: At_Drought_Soil_Dry_P Parameter: Timepoint (day) Value: 13
  misc_feature: MA Experiment 20001558 PARAMETER Experiment Name: At_Drought_Soil_Dry_P Parameter: Treatment Value: Drought vs. No Drought
  misc_feature: MA Experiment ID: 20001560 Result: Up-regulated in Transcription
  misc_feature: MA Experiment 20001560 PARAMETER Experiment Name: At_Drought_Soil_Dry_P Parameter: Age (day) Value: 28
  misc_feature: MA Experiment 20001560 PARAMETER Experiment Name: At_Drought_Soil_Dry_P Parameter: Organism Value: A. thaliana
  misc_feature: MA Experiment 20001560 PARAMETER Experiment Name: At_Drought_Soil_Dry_P Parameter: Plant Line Value: WS
  misc_feature: MA Experiment 20001560 PARAMETER Experiment Name: At_Drought_Soil_Dry_P Parameter: Post Timepoint (hr) Value: None
  misc_feature: MA Experiment 20001560 PARAMETER Experiment Name: At_Drought_Soil_Dry_P Parameter: Post-Treatment Value: None
  misc_feature: MA Experiment 20001560 PARAMETER Experiment Name: At_Drought_Soil_Dry_P Parameter: Timepoint (day) Value: 14
  misc_feature: MA Experiment 20001560 PARAMETER Experiment Name: At_Drought_Soil_Dry_P Parameter: Treatment Value: Drought vs. No Drought
  misc_feature: MA Experiment ID: 20001768 Result: Up-regulated in Transcription
  misc_feature: MA Experiment 20001768 PARAMETER Experiment Name: At_Far-red-enriched-adult_P Parameter: Age (day) Value: 28
  misc_feature: MA Experiment 20001768 PARAMETER Experiment Name: At_Far-red-enriched-adult_P Parameter: Light Value: Far-red enriched vs. White
  misc_feature: MA Experiment 20001768 PARAMETER Experiment Name: At_Far-red-enriched-adult_P Parameter: Organism Value: A. thaliana
  misc_feature: MA Experiment 20001768 PARAMETER Experiment Name: At_Far-red-enriched-adult_P Parameter: Plant Line Value: Columbia
  misc_feature: MA Experiment 20001768 PARAMETER Experiment Name: At_Far-red-enriched-adult_P Parameter: Timepoint (hr) Value: 1
  misc_feature: MA Experiment 20001768 PARAMETER Experiment Name: At_Far-red-enriched-adult_P Parameter: Tissue Value: Aerial
  misc_feature: MA Experiment ID: 20001905 Result: Down-regulated in Transcription
  misc_feature: MA Experiment 20001905 PARAMETER Experiment Name: At_Drought_Reproduction_P Parameter: Age (day) Value: 40
  misc_feature: MA Experiment 20001905 PARAMETER Experiment Name: At_Drought_Reproduction_P Parameter: Organism Value: A. thaliana
  misc_feature: MA Experiment 20001905 PARAMETER Experiment Name: At_Drought_Reproduction_P Parameter: Plant Line Value: WS
  misc_feature: MA Experiment 20001905 PARAMETER Experiment Name: At_Drought_Reproduction_P Parameter: Timepoint (day) Value: 10
  misc_feature: MA Experiment 20001905 PARAMETER Experiment Name: At_Drought_Reproduction_P Parameter: Tissue Value: Rosettes
  misc_feature: MA Experiment 20001905 PARAMETER Experiment Name: At_Drought_Reproduction_P Parameter: Treatment Value: Drought vs. No Drought
  misc_feature: MA Experiment ID: 20001911 Result: Down-regulated in Transcription
  misc_feature: MA Experiment 20001911 PARAMETER Experiment Name: At_Drought_Reproduction_P Parameter: Age (day) Value: 40
  misc_feature: MA Experiment 20001911 PARAMETER Experiment Name: At_Drought_Reproduction_P Parameter: Organism Value: A. thaliana
  misc_feature: MA Experiment 20001911 PARAMETER Experiment Name: At_Drought_Reproduction_P Parameter: Plant Line Value: WS
  misc_feature: MA Experiment 20001911 PARAMETER Experiment Name: At_Drought_Reproduction_P Parameter: Timepoint (day) Value: 10
  misc_feature: MA Experiment 20001911 PARAMETER Experiment Name: At_Drought_Reproduction_P Parameter: Tissue Value: Flowers
  misc_feature: MA Experiment 20001911 PARAMETER Experiment Name: At_Drought_Reproduction_P Parameter: Treatment Value: Drought vs. No Drought
acaagccctacaacaaccacaaagcaaaacacttacttagaaagtccagaaacatccattaacacatatggctaaagacgtggaaggacctgatggatttcagacgagagattacgaagatcctccgccaacaccgtttttcgacgcagaggagcttaccaagtggtctttatacagagcagtcatcgccgagttcgtagccactctcctcttcttgtacgtcaccgttttaactgtcattggttacaagattcagtccgacacaaaagccggtggagttgactgcggcggcgtcggaatccttggcatcgcgtgggcttttggtggcatgatcttcatccttgtctactgcaccgccggtatctcaggtggtcacataaaccctgcggtgacgtttggtttgttcttagcccggaaggtatcgctgattagggcggtgctttacatggtggctcagtgtttgggtgctatttgtggagttgggtttgtgaaggcatttcaaagctctcactatgttaattacggtggaggagccaactttctagctgacggctacaatacaggcaccggactcgcggcagagatcatcggaacattcgtgcttgtctacacagtcttctccgctactgatcccaaacgcaacgctagagactcccacgttccggttttggcgccacttccgattgggtttgcggtgtttatggtacatttggccactattccgatcaccggaaccggtatcaacccggctaggagtttcggagccgccgtaatctttaacaagagcaagccatgggatgaccactggatattctgggtgggaccattcattggagctacgatagctgcattttatcaccaattcgttctaagggcctcaggctccaagtccctcggttcattcagaagtgcagccaacgtttaaacttagccacgaaagaaaaaaagtgtgcctacaattatgtagaaacatatcctcttttccactcgtatcttagcttcttcctattttctatttctaactgtgtgattccatattaaatcgagtgaaatgtttttcaattcatctttgcaacgtatgtaagtttggtgtattgagaaaaaaaatcgagaaagacaactttttcttcg

SEQ ID NO: 85609 - protein, 285 aa, Arabidopsis thaliana; identical to SEQ ID NO: 28819
  peptide (1)..(285): Ceres Seq. ID no. 12681369
  misc_feature (29)..(264): Pfam Name: Major intrinsic protein Pfam Description: Major intrinsic protein
  misc_feature (1)..(285): Homolog of NCBI NO: 15228096 NR Description: aquaporin (plasma membrane intrinsic protein 2C); id: At2g37180.1, supported by cDNA: 11998., supported by cDNA: supported by cDNA: gi_20465732 [Arabidopsis thaliana] membrane
  misc_feature (1)..(285): Homolog of NCBI NO: 21537097 NR Description: aquaporin (plasma membrane intrinsic protein 2C)
  misc_feature (1)..(285): Homolog of NCBI NO: 15228095 NR Description: aquaporin (plasma membrane intrinsic protein 2B); id: At2g37170.1, supported by cDNA: 25220. [Arabidopsis thaliana]
  misc_feature (1)..(285): Homolog of NCBI NO: 21554356 NR Description: aquaporin (plasma membrane intrinsic protein 2B)
  misc_feature (1)..(285): Homolog of NCBI NO: 629543 NR Description: plasma membrane intrinsic protein 2b - thaliana >gi|472879|emb|CAA53478.1| plasma membrane intrinsic
  misc_feature (1)..(283): Homolog of NCBI NO: 7209560 NR Description: Plasma membrane aquaporin 2b [Raphanus sativus]
  misc_feature (1)..(283): Homolog of NCBI NO: 5081423 NR Description: plasma membrane intrinsic protein 2 [Brassica
  misc_feature (1)..(283): Homolog of NCBI NO: 7209562 NR Description: Plasma membrane aquaporin 2c [Raphanus sativus]
  misc_feature (1)..(285): Homolog of NCBI NO: 3551133 NR Description: Plasma membrane aquaporin (PAQ2) [Raphanus
  misc_feature (1)..(285): Homolog of NCBI NO: 5081421 NR Description: plasma membrane intrinsic protein 1 [Brassica

SEQ ID NO: 85610 - protein, 198 aa, Arabidopsis thaliana; identical to SEQ ID NO: 28820
  peptide (1)..(198): Ceres Seq. ID no. 12681370
  misc_feature (1)..(177): Pfam Name: Major intrinsic protein Pfam Description: Major intrinsic protein
  misc_feature (1)..(198): Homolog of NCBI NO: 15228096 NR Description: aquaporin (plasma membrane intrinsic protein 2C); id: At2g37180.1, supported by cDNA: 11998., supported by cDNA: supported by cDNA: gi_20465732 [Arabidopsis thaliana] membrane
  misc_feature (1)..(198): Homolog of NCBI NO: 21537097 NR Description: aquaporin (plasma membrane intrinsic protein 2C)
  misc_feature (1)..(198): Homolog of NCBI NO: 15228095 NR Description: aquaporin (plasma membrane intrinsic protein 2B); id: At2g37170.1, supported by cDNA: 25220. [Arabidopsis thaliana]
  misc_feature (1)..(198): Homolog of NCBI NO: 21554356 NR Description: aquaporin (plasma membrane intrinsic protein 2B)
  misc_feature (1)..(198): Homolog of NCBI NO: 629543 NR Description: plasma membrane intrinsic protein 2b - thaliana >gi|472879|emb|CAA53478.1| plasma membrane intrinsic
  misc_feature (1)..(196): Homolog of NCBI NO: 7209560 NR Description: Plasma membrane aquaporin 2b [Raphanus sativus]
  misc_feature (1)..(196): Homolog of NCBI NO: 5081423 NR Description: plasma membrane intrinsic protein 2 [Brassica
  misc_feature (1)..(196): Homolog of NCBI NO: 7209562 NR Description: Plasma membrane aquaporin 2c [Raphanus sativus]
  misc_feature (1)..(198): Homolog of NCBI NO: 3551133 NR Description: Plasma membrane aquaporin (PAQ2) [Raphanus
  misc_feature (1)..(198): Homolog of NCBI NO: 5081421 NR Description: plasma membrane intrinsic protein 1 [Brassica

SEQ ID NO: 85611 - protein, 159 aa, Arabidopsis thaliana; identical to SEQ ID NO: 28821
  peptide (1)..(159): Ceres Seq. ID no. 12681371
  misc_feature (1)..(138): Pfam Name: Major intrinsic protein Pfam Description: Major intrinsic protein
  misc_feature (1)..(159): Homolog of NCBI NO: 15228096 NR Description: aquaporin (plasma membrane intrinsic protein 2C); id: At2g37180.1, supported by cDNA: 11998., supported by cDNA: supported by cDNA: gi_20465732 [Arabidopsis thaliana] membrane
  misc_feature (1)..(159): Homolog of NCBI NO: 21537097 NR Description: aquaporin (plasma membrane intrinsic protein 2C)
  misc_feature (1)..(159): Homolog of NCBI NO: 15228095 NR Description: aquaporin (plasma membrane intrinsic protein 2B); id: At2g37170.1, supported by cDNA: 25220. [Arabidopsis thaliana]
  misc_feature (1)..(159): Homolog of NCBI NO: 21554356 NR Description: aquaporin (plasma membrane intrinsic protein 2B)
  misc_feature (1)..(159): Homolog of NCBI NO: 629543 NR Description: plasma membrane intrinsic protein 2b - thaliana >gi|472879|emb|CAA53478.1| plasma membrane intrinsic
  misc_feature (1)..(157): Homolog of NCBI NO: 7209560 NR Description: Plasma membrane aquaporin 2b [Raphanus sativus]
  misc_feature (1)..(157): Homolog of NCBI NO: 5081423 NR Description: plasma membrane intrinsic protein 2 [Brassica
  misc_feature (1)..(157): Homolog of NCBI NO: 7209562 NR Description: Plasma membrane aquaporin 2c [Raphanus sativus]
  misc_feature (1)..(159): Homolog of NCBI NO: 3551133 NR Description: Plasma membrane aquaporin (PAQ2) [Raphanus
  misc_feature (1)..(159): Homolog of NCBI NO: 5081421 NR Description: plasma membrane intrinsic protein 1 [Brassica

SEQ ID NO: 85612 - DNA, 1197 bp, Arabidopsis thaliana
  misc_feature (1)..(1197): Ceres Seq. ID no. 12681384
  misc_feature: MA Experiment ID: 20000180 Result: Down-regulated in Transcription
  misc_feature: MA Experiment 20000180 PARAMETER Experiment Name: At_Germinating_Seeds_P Parameter: Age (hr) Value: 24 vs. 0
  misc_feature: MA Experiment 20000180 PARAMETER Experiment Name: At_Germinating_Seeds_P Parameter: Tissue Value: Germinating Seeds
atgctggaggattcttcaagctctgtcaagcgagatggatggagtttcgatgcttatggtttatcatccgccgtgagatcttgtgggttgaatcgagactttagaaccggttctgggtttcattgtttagcgttgaaaggtgggtttatctcagatgtctacttaggaagttctctggtcgttttgtacagagattctggtgaagtagagaatgcatataaagtgtttgaagaaatgcctgagaggaatgtggtttcatggacggctatgatttcagggtttgcgcaagaatggcgagttgatatctgcttgaagctttattcaaagatgagaaagtcaacctctgatccgaatgattacacattcacggctctcttgagcgcttgcacgggaagcggagccctagggcaaggaagaagtgttcattgtcagacactccacatgggattgaagtcgtatctacatatctcaaactctctcatctcgatgtactgcaaatgcggtgatttgaaggatgcttttcgtatctttgaccagttttcaaacaaagacgttgtttcttggaactctatgattgctggttacgcgcagcacggccttgcaatgcaagcaatcgagctctttgaattaatgatgcctaaaagcggaacaaagccagatgcaatcacatatctaggagttttgtcatcgtgtagacacgcaggtcttgtaaaagaaggaagaaagttcttcaatttgatggcggaacacggcctgaaaccagaactcaaccattactcttgtctagtcgatcttctcgggagatttggtctgttgcaagaagccctggaactgatcgagaacatgccaatgaaaccaaactcagtcatatggggatctctgctattctcttgccgtgttcacggcgatgtctggaccggaatcagagctgcagaggaacgactaatgcttgaacctgattgcgcagccacgcatgtccagctggcaaatctttacgccagtgtagggtactggaaagaagcggcgacagtgaggaagctgatgaaagataaaggactgaagacgaatccgggttgcagttggatcgagatcaataactatgttttcatgtttaaagctgaagatggtagcaactgtagaatgctagagattgttcatgttcttcattgtctcattgatcacatggagttcctctaa

SEQ ID NO: 85613 - protein, 398 aa, Arabidopsis thaliana; identical to SEQ ID NO: 70580
  peptide (1)..(398): Ceres Seq. ID no. 12681385
  misc_feature (85)..(119): Pfam Name: PPR repeat Pfam Description: PPR repeat
  misc_feature (1)..(398): Homolog of NCBI NO: 15228119 NR Description: hypothetical protein; protein id: At2g37320.1
  misc_feature (15)..(396): Homolog of NCBI NO: 40253530 NR Description: putative pentatricopeptide (PPR)
  misc_feature (17)..(384): Homolog of NCBI NO: 37534806 NR Description: putative PPR-repeat containing protein [Oryza
  misc_feature (11)..(384): Homolog of NCBI NO: 15229561 NR Description: hypothetical protein; protein id: At3g24000.1 thaliana] >gi|9294669|dbj|BAB03018.1| contains similarity to
  misc_feature (17)..(396): Homolog of NCBI NO: 15237212 NR Description: selenium-binding protein-like; protein id:
  misc_feature (11)..(395): Homolog of NCBI NO: 15227724 NR Description: putative selenium-binding protein; protein id:
  misc_feature (11)..(395): Homolog of NCBI NO: 28392910 NR Description: putative selenium-binding protein [Arabidopsis
  misc_feature (9)..(392): Homolog of NCBI NO: 15238326 NR Description: putative protein; protein id: At5g04780.1
  misc_feature (9)..(375): Homolog of NCBI NO: 15222917 NR Description: hypothetical protein; protein id: At1g50270.1
  misc_feature (9)..(378): Homolog of NCBI NO: 15221566 NR Description: hypothetical protein; protein id: At1g68930.1

SEQ ID NO: 85614 - protein, 320 aa, Arabidopsis thaliana; identical to SEQ ID NO: 70581
  peptide (1)..(320): Ceres Seq. ID no. 12681386
  misc_feature (7)..(41): Pfam Name: PPR repeat Pfam Description: PPR repeat
  misc_feature (1)..(320): Homolog of NCBI NO: 15228119 NR Description: hypothetical protein; protein id: At2g37320.1
  misc_feature (1)..(318): Homolog of NCBI NO: 40253530 NR Description: putative pentatricopeptide (PPR)
  misc_feature (1)..(306): Homolog of NCBI NO: 37534806 NR Description: putative PPR-repeat containing protein [Oryza
  misc_feature (1)..(306): Homolog of NCBI NO: 15229561 NR Description: hypothetical protein; protein id: At3g24000.1 thaliana] >gi|9294669|dbj|BAB03018.1| contains similarity to
  misc_feature (1)..(318): Homolog of NCBI NO: 15237212 NR Description: selenium-binding protein-like; protein id:
  misc_feature (1)..(317): Homolog of NCBI NO: 15227724 NR Description: putative selenium-binding protein; protein id:
  misc_feature (1)..(317): Homolog of NCBI NO: 28392910 NR Description: putative selenium-binding protein [Arabidopsis
  misc_feature (1)..(314): Homolog of NCBI NO: 15238326 NR Description: putative protein; protein id: At5g04780.1
  misc_feature (1)..(297): Homolog of NCBI NO: 15222917 NR Description: hypothetical protein; protein id: At1g50270.1
  misc_feature (1)..(300): Homolog of NCBI NO: 15221566 NR Description: hypothetical protein; protein id: At1g68930.1

SEQ ID NO: 85615 - protein, 309 aa, Arabidopsis thaliana
  peptide (1)..(309): Ceres Seq. ID no. 12681387
  misc_feature (1)..(30): Pfam Name: PPR repeat Pfam Description: PPR repeat
  misc_feature (1)..(309): Homolog of NCBI NO: 15228119 NR Description: hypothetical protein; protein id: At2g37320.1
  misc_feature (1)..(307): Homolog of NCBI NO: 40253530 NR Description: putative pentatricopeptide (PPR)
  misc_feature (1)..(295): Homolog of NCBI NO: 37534806 NR Description: putative PPR-repeat containing protein [Oryza
  misc_feature (1)..(295): Homolog of NCBI NO: 15229561 NR Description: hypothetical protein; protein id: At3g24000.1 thaliana] >gi|9294669|dbj|BAB03018.1| contains similarity to
  misc_feature (1)..(307): Homolog of NCBI NO: 15237212 NR Description: selenium-binding protein-like; protein id:
  misc_feature (1)..(306): Homolog of NCBI NO: 15227724 NR Description: putative selenium-binding protein; protein id:
  misc_feature (1)..(306): Homolog of NCBI NO: 28392910 NR Description: putative selenium-binding protein [Arabidopsis
  misc_feature (1)..(303): Homolog of NCBI NO: 15238326 NR Description: putative protein; protein id: At5g04780.1
  misc_feature (1)..(286): Homolog of NCBI NO: 15222917 NR Description: hypothetical protein; protein id: At1g50270.1
  misc_feature (1)..(289): Homolog of NCBI NO: 15221566 NR Description: hypothetical protein; protein id: At1g68930.1
MISGFAQEWRVDICLKLYSKMRKSTSDPNDYTFTALLSACTGSGALGQGRSVHCQTLHMGLKSYLHISNSLISMYCKCGDLKDAFRIFDQFSNKDVVSWNSMIAGYAQHGLAMQAIELFELMMPKSGTKPDAITYLGVLSSCRHAGLVKEGRKFFNLMAEHGLKPELNHYSCLVDLLGRFGLLQEALELIENMPMKPNSVIWGSLLFSCRVHGDVWTGIRAAEERLMLEPDCAATHVQLANLYASVGYWKEAATVRKLMKDKGLKTNPGCSWIEINNYVFMFKAEDGSNCRMLEIVHVLHCLIDHMEFL

SEQ ID NO: 85616 - DNA, 1155 bp, Arabidopsis thaliana
  misc_feature (1)..(1155): Ceres Seq. ID no. 12681440
  misc_feature: MA Experiment ID: 20000355 Result: Up-regulated in Transcription
  misc_feature: MA Experiment 20000355 PARAMETER Experiment Name: At_Siliques_Sub_P Parameter: Age (day) Value: 21
  misc_feature: MA Experiment 20000355 PARAMETER Experiment Name: At_Siliques_Sub_P Parameter: Organism Value: A. thaliana
  misc_feature: MA Experiment 20000355 PARAMETER Experiment Name: At_Siliques_Sub_P Parameter: Plant Line Value: WS
  misc_feature: MA Experiment 20000355 PARAMETER Experiment Name: At_Siliques_Sub_P Parameter: Tissue Value: Less Than 5mm Siliques vs. Whole Plant
atgtatggtggaaaaagttacatactcaaagggagtgtatcactttccttgatcatcctcattcttttggtgacaacactcctggtttccgcaaaaaaccagcctcgcatttctctgattgaagtaaaaacttgtaacttggcaaagggggaatgggttgaagacaagaagcggccattgtattctggttttgaatgtaaacaatggttatcaaacatattttcctgcagggtaatgggcagacccgacttctcatttgagggttaccggtggcagccagaaggttgcaacataccagagtttaacagagtcaacttcttgagaagaatgcagaacaagactatagcatttataggagactccttgggaagggaacaatttcaatccctgatgtgtatggccactggaggtaaagagagtccggaggttcaaaacgtgggatcggagtatggtcttgtgatacctaaaggagctcctcgtcctggtggttgggcttataggtttccgaccacaaacacaacggttttgtcttattggtcagctagtttaacagatttggtaccgatgaacaatacagatccacctcatcttattgcaatgcatcttgaccgtccaccagcattcataagaaactaccttcaccgtttccatgtattggttctaaacaccggtcaccattggagcagagataagatagaaaaaaatcattgggtgatgcacgtaaatggaacacgtgtcgaaggcggatatttcaagaacgttgaaaacgctaaaatttttacaatacacagcctggtgaagtggcttgatgcacaacttccattgcatccacggttgaaagctttctttacgacgatttcccctaggcatgaaaagtgtaacaatactatccctttgtctagaggaagcaaaatcacaggcgaaggtggatcgctcgatacaatagttgagagtgctgtgaatgggacaagggtcaagattcttgacataactgcactttctaaactaagagatgaagctcatatcgcagggtgtaaactcaaaccgaaaaaggcgagtaacgtgacttcagctccaacgttcaacgattgcttgcattggtgcttacccgggatcccggatacttggaatgaacttctcatagcacagctttga

SEQ ID NO: 85617 - protein, 384 aa, Arabidopsis thaliana; identical to SEQ ID NO: 70547
  peptide (1)..(384): Ceres Seq. ID no. 12681441
  misc_feature (227)..(384): Pfam Name: Arabidopsis proteins of unknown function Pfam Description: Arabidopsis proteins of unknown function
  misc_feature (1)..(384): Homolog of NCBI NO: 15224349 NR Description: unknown protein; protein id: At2g37720.1
  misc_feature (1)..(384): Homolog of NCBI NO: 8777315 NR Description: gene_id:MBM17.12~pir||T02538~strong similarity to
  misc_feature (1)..(384): Homolog of NCBI NO: 30697938 NR Description: expressed protein [Arabidopsis thaliana]
  misc_feature (43)..(384): Homolog of NCBI NO: 15810385 NR Description: unknown protein [Arabidopsis thaliana]
  misc_feature (43)..(384): Homolog of NCBI NO: 18420285 NR Description: putative protein; protein id: At5g20680.1,
  misc_feature (43)..(384): Homolog of NCBI NO: 7487161 NR Description: hypothetical protein At2g38320 [imported] -
  misc_feature (43)..(384): Homolog of NCBI NO: 18404712 NR Description: expressed protein; protein id: At2g38320.1, by cDNA: gi_13878094 [Arabidopsis thaliana] unknown protein [Arabidopsis thaliana]
  misc_feature (9)..(384): Homolog of NCBI NO: 23617116 NR Description: leaf senescence related protein-like [Oryza
  misc_feature (218)..(384): Homolog of NCBI NO: 28393769 NR Description: unknown protein [Arabidopsis thaliana]
  misc_feature (14)..(133): Homolog of NCBI NO: 28393769 NR Description: unknown protein [Arabidopsis thaliana]

SEQ ID NO: 85618 - protein, 306 aa, Arabidopsis thaliana
  peptide (1)..(306): Ceres Seq. ID no. 12681442
  misc_feature (149)..(306): Pfam Name: Arabidopsis proteins of unknown function Pfam Description: Arabidopsis proteins of unknown function
  misc_feature (1)..(306): Homolog of NCBI NO: 15224349 NR Description: unknown protein; protein id: At2g37720.1
  misc_feature (1)..(306): Homolog of NCBI NO: 8777315 NR Description: gene_id:MBM17.12~pir||T02538~strong similarity to
  misc_feature (1)..(306): Homolog of NCBI NO: 30697938 NR Description: expressed protein [Arabidopsis thaliana]
  misc_feature (1)..(306): Homolog of NCBI NO: 15810385 NR Description: unknown protein [Arabidopsis thaliana]
  misc_feature (1)..(306): Homolog of NCBI NO: 18420285 NR Description: putative protein; protein id: At5g20680.1,
  misc_feature (1)..(306): Homolog of NCBI NO: 7487161 NR Description: hypothetical protein At2g38320 [imported] -
  misc_feature (1)..(306): Homolog of NCBI NO: 18404712 NR Description: expressed protein; protein id: At2g38320.1, by cDNA: gi_13878094 [Arabidopsis thaliana] unknown protein [Arabidopsis thaliana]
  misc_feature (1)..(306): Homolog of NCBI NO: 23617116 NR Description: leaf senescence related protein-like [Oryza
  misc_feature (140)..(306): Homolog of NCBI NO: 28393769 NR Description: unknown protein [Arabidopsis thaliana]
  misc_feature (1)..(55): Homolog of NCBI NO: 28393769 NR Description: unknown protein [Arabidopsis thaliana]
MGRPDFSFEGYRWQPEGCNIPEFNRVNFLRRMQNKTIAFIGDSLGREQFQSLMCMATGGKESPEVQNVGSEYGLVIPKGAPRPGGWAYRFPTTNTTVLSYWSASLTDLVPMNNTDPPHLIAMHLDRPPAFIRNYLHRFHVLVLNTGHHWSRDKIEKNHWVMHVNGTRVEGGYFKNVENAKIFTIHSLVKWLDAQLPLHPRLKAFFTTISPRHEKCNNTIPLSRGSKITGEGGSLDTIVESAVNGTRVKILDITALSKLRDEAHIAGCKLKPKKASNVTSAPTFNDCLHWCLPGIPDTWNELLIAQL

SEQ ID NO: 85619 - protein, 275 aa, Arabidopsis thaliana
  peptide (1)..(275): Ceres Seq. ID no. 12681443
  misc_feature (118)..(275): Pfam Name: Arabidopsis proteins of unknown function Pfam Description: Arabidopsis proteins of unknown function
  misc_feature (1)..(275): Homolog of NCBI NO: 15224349 NR Description: unknown protein; protein id: At2g37720.1
  misc_feature (1)..(275): Homolog of NCBI NO: 8777315 NR Description: gene_id:MBM17.12~pir||T02538~strong similarity to
  misc_feature (1)..(275): Homolog of NCBI NO: 30697938 NR Description: expressed protein [Arabidopsis thaliana]
  misc_feature (1)..(275): Homolog of NCBI NO: 15810385 NR Description: unknown protein [Arabidopsis thaliana]
  misc_feature (1)..(275): Homolog of NCBI NO: 18420285 NR Description: putative protein; protein id: At5g20680.1,
  misc_feature (1)..(275): Homolog of NCBI NO: 7487161 NR Description: hypothetical protein At2g38320 [imported] -
  misc_feature (1)..(275): Homolog of NCBI NO: 18404712 NR Description: expressed protein; protein id: At2g38320.1, by cDNA: gi_13878094 [Arabidopsis thaliana] unknown protein [Arabidopsis thaliana]
  misc_feature (1)..(275): Homolog of NCBI NO: 23617116 NR Description: leaf senescence related protein-like [Oryza
  misc_feature (109)..(275): Homolog of NCBI NO: 28393769 NR Description: unknown protein [Arabidopsis thaliana]
  misc_feature (1)..(24): Homolog of NCBI NO: 28393769 NR Description: unknown protein [Arabidopsis thaliana]
MQNKTIAFIGDSLGREQFQSLMCMATGGKESPEVQNVGSEYGLVIPKGAPRPGGWAYRFPTTNTTVLSYWSASLTDLVPMNNTDPPHLIAMHLDRPPAFIRNYLHRFHVLVLNTGHHWSRDKIEKNHWVMHVNGTRVEGGYFKNVENAKIFTIHSLVKWLDAQLPLHPRLKAFFTTISPRHEKCNNTIPLSRGSKITGEGGSLDTIVESAVNGTRVKILDITALSKLRDEAHIAGCKLKPKKASNVTSAPTFNDCLHWCLPGIPDTWNELLIAQL

SEQ ID NO: 85620 - DNA, 1299 bp, Arabidopsis thaliana
  misc_feature (1)..(1299): Ceres Seq. ID no. 12681452
  misc_feature: MA Experiment ID: 20000169 Result: Down-regulated in Transcription
  misc_feature: MA Experiment 20000169 PARAMETER Experiment Name: At_100uM_ABA_P Parameter: Age (day) Value: 14
  misc_feature: MA Experiment 20000169 PARAMETER Experiment Name: At_100uM_ABA_P Parameter: Organism Value: A. thaliana
  misc_feature: MA Experiment 20000169 PARAMETER Experiment Name: At_100uM_ABA_P Parameter: Plant Line Value: WS
  misc_feature: MA Experiment 20000169 PARAMETER Experiment Name: At_100uM_ABA_P Parameter: Timepoint (hr) Value: 6
  misc_feature: MA Experiment 20000169 PARAMETER Experiment Name: At_100uM_ABA_P Parameter: Tissue Value: Aerial
  misc_feature: MA Experiment 20000169 PARAMETER Experiment Name: At_100uM_ABA_P Parameter: Treatment Value: 100uM ABA vs. No Treatment
  misc_feature: MA Experiment ID: 20000180 Result: Down-regulated in Transcription
  misc_feature: MA Experiment 20000180 PARAMETER Experiment Name: At_Germinating_Seeds_P Parameter: Age (hr) Value: 24 vs. 0
  misc_feature: MA Experiment 20000180 PARAMETER Experiment Name: At_Germinating_Seeds_P Parameter: Tissue Value: Germinating Seeds
  misc_feature: MA Experiment ID: 20000438 Result: Up-regulated in Transcription
  misc_feature: MA Experiment 20000438 PARAMETER Experiment Name: At_Shoots__P Parameter: Age (day) Value: 14
  misc_feature: MA Experiment 20000438 PARAMETER Experiment Name: At_Shoots__P Parameter: Tissue Value: Shoots vs. Whole Plant
  misc_feature: MA Experiment ID: 20000794 Result: Down-regulated in Transcription
  misc_feature: MA Experiment 20000794 PARAMETER Experiment Name: At_Petals_P Parameter: Age (day) Value: 23-25 days
  misc_feature: MA Experiment 20000794 PARAMETER Experiment Name: At_Petals_P Parameter: Plant Line Value: WS
  misc_feature: MA Experiment 20000794 PARAMETER Experiment Name: At_Petals_P Parameter: Tissue Value: Petals vs. Whole plant
  misc_feature: MA Experiment ID: 20001450 Result: Down-regulated in Transcription
  misc_feature: MA Experiment 20001450 PARAMETER Experiment Name: At_Far-red-induction_P Parameter: Age (day) Value: 7
  misc_feature: MA Experiment 20001450 PARAMETER Experiment Name: At_Far-red-induction_P Parameter: Light Value: Far-red vs. White
  misc_feature: MA Experiment 20001450 PARAMETER Experiment Name: At_Far-red-induction_P Parameter: Organism Value: A. thaliana
  misc_feature: MA Experiment 20001450 PARAMETER Experiment Name: At_Far-red-induction_P Parameter: Plant Line Value: Columbia
  misc_feature: MA Experiment 20001450 PARAMETER Experiment Name: At_Far-red-induction_P Parameter: Timepoint (hr) Value: 8
  misc_feature: MA Experiment 20001450 PARAMETER Experiment Name: At_Far-red-induction_P Parameter: Tissue Value: Whole Plant
  misc_feature: MA Experiment ID: 20001451 Result: Down-regulated in Transcription
  misc_feature: MA Experiment 20001451 PARAMETER Experiment Name: At_Far-red-induction_P Parameter: Age (day) Value: 7
  misc_feature: MA Experiment 20001451 PARAMETER Experiment Name: At_Far-red-induction_P Parameter: Light Value: Far-red vs. White
  misc_feature: MA Experiment 20001451 PARAMETER Experiment Name: At_Far-red-induction_P Parameter: Organism Value: A. thaliana
  misc_feature: MA Experiment 20001451 PARAMETER Experiment Name: At_Far-red-induction_P Parameter: Plant Line Value: Columbia
  misc_feature: MA Experiment 20001451 PARAMETER Experiment Name: At_Far-red-induction_P Parameter: Timepoint (hr) Value: 24
  misc_feature: MA Experiment 20001451 PARAMETER Experiment Name: At_Far-red-induction_P Parameter: Tissue Value: Whole Plant
  misc_feature: MA Experiment ID: 20001757 Result: Up-regulated in Transcription
  misc_feature: MA Experiment 20001757 PARAMETER Experiment Name: At_50mM_NH4NO3_L-to-H_P Parameter: Timepoint (hr) Value: 6
  misc_feature: MA Experiment 20001757 PARAMETER Experiment Name: At_50mM_NH4NO3_L-to-H_P Parameter: Tissue Value: Leaf
  misc_feature: MA Experiment 20001757 PARAMETER Experiment Name: At_50mM_NH4NO3_L-to-H_P Parameter: Treatment Value: 50mM NH4NO3 vs 100mM Mannitol
  misc_feature: MA Experiment ID: 20001905 Result: Down-regulated in Transcription
  misc_feature: MA Experiment 20001905 PARAMETER Experiment Name: At_Drought_Reproduction_P Parameter: Age (day) Value: 40
  misc_feature: MA Experiment 20001905 PARAMETER Experiment Name: At_Drought_Reproduction_P Parameter: Organism Value: A. thaliana
  misc_feature: MA Experiment 20001905 PARAMETER Experiment Name: At_Drought_Reproduction_P Parameter: Plant Line Value: WS
  misc_feature: MA Experiment 20001905 PARAMETER Experiment Name: At_Drought_Reproduction_P Parameter: Timepoint (day) Value: 10
  misc_feature: MA Experiment 20001905 PARAMETER Experiment Name: At_Drought_Reproduction_P Parameter: Tissue Value: Rosettes
  misc_feature: MA Experiment 20001905 PARAMETER Experiment Name: At_Drought_Reproduction_P Parameter: Treatment Value: Drought vs. No Drought
atggcaggatgtgcaatgaatcttcagttctcaagtgttgtgaaagtgagaaacgagatctcttcttttgggatttgtaatcgagactttgtatttagagatttagccaaggcaatgaaagtgcctgttttgcggattagaggtggttcaggtaggcaaaggtcgaggcttttcgtggttaatatgtctcaatctcccattgagccacaatctggtggttttgcggctactgaacaaattaaaggagaaggtgataatagtatcttagggaaagacaatgttagaaacttaggaactgatcagcttgagaatttggatattgatggtaatgttggagatggttttaatggtagtgatggtaatgggggtggtggaggaggtggaaatggaggagaaggtgatggtgaaggtgaagactacgaagaaaaagagtttggaccgatattgaaatttgaagaggtcatgaaggagactgaagctagaggagctactcttccatctgatatgttggaagctgctaagaactatgggatccgcaaagtgcttctccttaggtacttggatttgcagagctcagcagggcttcttgggtttgctataagatcatgggctatgcttcgtaacagaatgttggctgatccatctttcctcttcaaaataggggctgagatagtcattgattcttgctgtgccactgttgctgaagttcaaaagagagggaaagatttctgggcggagtttgagttgtatgttgctgatcttttagttggaactgtggttaacattgctctggtcggtatgttggcgccttatgttcgttttggacaaccttccgcatcacctggcttcttaggacgcatggtttttgcatataatgcgcttcctagcagtgtttttgaagctgaaaggccaggatgtagattttccgctcaacagagacttgctacatacttctacaagggtataatgtatggtgcagttggatttggatgtggcattgtaggtcaaggcattgcaaatcttatcatgactgccaaacgaaacataaataaatcagaagagaacatcccggtaccaccgctaatcaagagtgcagctctctggggtgtattcttgagtgtttcttcgaatactcgttatcaaatcatcaatggtctagaaagagtggtcgaagcatcaccttttgccaagaaattccctccggcggctatggccttcacagttggtgtacggttggccaataacatctacggcggaatgcagtttgtggattgggcaagattgagcggttgtcagtga

SEQ ID NO: 85621 - protein, 432 aa, Arabidopsis thaliana
  peptide (1)..(432): Ceres Seq. ID no. 12681453
  misc_feature (1)..(432): Homolog of NCBI NO: 30687286 NR Description: expressed protein [Arabidopsis thaliana]
  misc_feature (1)..(347): Homolog of NCBI NO: 30687283 NR Description: expressed protein [Arabidopsis thaliana] unknown protein [Arabidopsis thaliana]
  misc_feature (106)..(432): Homolog of NCBI NO: 15242979 NR Description: putative protein; protein id: At5g22790.1, by cDNA: gi_13605898, supported by cDNA: gi_19548024 [Arabidopsis >gi|9758754|dbj|BAB09278.1| gb|AAF31706.1~gene_id:K8E10.2~similar
  misc_feature (103)..(432): Homolog of NCBI NO: 34395170 NR Description: chloroplast lumen common protein family-like
  misc_feature (103)..(432): Homolog of NCBI NO: 34900644 NR Description: hypothetical protein~similar to Arabidopsis
  misc_feature (165)..(432): Homolog of NCBI NO: 6934300 NR Description: unknown [Euphorbia esula]
  misc_feature (110)..(432): Homolog of NCBI NO: 18416870 NR Description: putative protein; protein id: At5g12470.1, by cDNA: gi_20268751, supported by cDNA: gi_21281148 [Arabidopsis >gi|14586377|emb|CAC42908.1| putative protein [Arabidopsis
  misc_feature (194)..(432): Homolog of NCBI NO: 15231951 NR Description: unknown protein; protein id: At3g08640.1, by cDNA: gi_19698960 [Arabidopsis thaliana]
  misc_feature (109)..(170): Homolog of NCBI NO: 15231951 NR Description: unknown protein; protein id: At3g08640.1, by cDNA: gi_19698960 [Arabidopsis thaliana]
  misc_feature (194)..(432): Homolog of NCBI NO: 15231950 NR Description: unknown protein; protein id: At3g08630.1
MAGCAMNLQFSSVVKVRNEISSFGICNRDFVFRDLAKAMKVPVLRIRGGSGRQRSRLFVVNMSQSPIEPQSGGFAATEQIKGEGDNSILGKDNVRNLGTDQLENLDIDGNVGDGFNGSDGNGGGGGGGNGGEGDGEGEDYEEKEFGPILKFEEVMKETEARGATLPSDMLEAAKNYGIRKVLLLRYLDLQSSAGLLGFAIRSWAMLRNRMLADPSFLFKIGAEIVIDSCCATVAEVQKRGKDFWAEFELYVADLLVGTVVNIALVGMLAPYVRFGQPSASPGFLGRMVFAYNALPSSVFEAERPGCRFSAQQRLATYFYKGIMYGAVGFGCGIVGQGIANLIMTAKRNINKSEENIPVPPLIKSAALWGVFLSVSSNTRYQIINGLERVVEASPFAKKFPPAAMAFTVGVRLANNIYGGMQFVDWARLSGCQ

SEQ ID NO: 85622 - protein, 427 aa, Arabidopsis thaliana
  peptide (1)..(427): Ceres Seq. ID no. 12681454
  misc_feature (1)..(427): Homolog of NCBI NO: 30687286 NR Description: expressed protein [Arabidopsis thaliana]
  misc_feature (1)..(342): Homolog of NCBI NO: 30687283 NR Description: expressed protein [Arabidopsis thaliana] unknown protein [Arabidopsis thaliana]
  misc_feature (101)..(427): Homolog of NCBI NO: 15242979 NR Description: putative protein; protein id: At5g22790.1, by cDNA: gi_13605898, supported by cDNA: gi_19548024 [Arabidopsis >gi|9758754|dbj|BAB09278.1| gb|AAF31706.1~gene_id:K8E10.2~similar
  misc_feature (98)..(427): Homolog of NCBI NO: 34395170 NR Description: chloroplast lumen common protein family-like
  misc_feature (98)..(427): Homolog of NCBI NO: 34900644 NR Description: hypothetical protein~similar to Arabidopsis
  misc_feature (160)..(427): Homolog of NCBI NO: 6934300 NR Description: unknown [Euphorbia esula]
  misc_feature (105)..(427): Homolog of NCBI NO: 18416870 NR Description: putative protein; protein id: At5g12470.1, by cDNA: gi_20268751, supported by cDNA: gi_21281148 [Arabidopsis >gi|14586377|emb|CAC42908.1| putative protein [Arabidopsis
  misc_feature (189)..(427): Homolog of NCBI NO: 15231951 NR Description: unknown protein; protein id: At3g08640.1, by cDNA: gi_19698960 [Arabidopsis thaliana]
  misc_feature (104)..(165): Homolog of NCBI NO: 15231951 NR Description: unknown protein; protein id: At3g08640.1, by cDNA: gi_19698960 [Arabidopsis thaliana]
  misc_feature (189)..(427): Homolog of NCBI NO: 15231950 NR Description: unknown protein; protein id: At3g08630.1
MNLQFSSVVKVRNEISSFGICNRDFVFRDLAKAMKVPVLRIRGGSGRQRSRLFVVNMSQSPIEPQSGGFAATEQIKGEGDNSILGKDNVRNLGTDQLENLDIDGNVGDGFNGSDGNGGGGGGGNGGEGDGEGEDYEEKEFGPILKFEEVMKETEARGATLPSDMLEAAKNYGIRKVLLLRYLDLQSSAGLLGFAIRSWAMLRNRMLADPSFLFKIGAEIVIDSCCATVAEVQKRGKDFWAEFELYVADLLVGTVVNIALVGMLAPYVRFGQPSASPGFLGRMVFAYNALPSSVFEAERPGCRFSAQQRLATYFYKGIMYGAVGFGCGIVGQGIANLIMTAKRNINKSEENIPVPPLIKSAALWGVFLSVSSNTRYQIINGLERVVEASPFAKKFPPAAMAFTVGVRLANNIYGGMQFVDWARLSGCQ

SEQ ID NO: 85623 - protein, 394 aa, Arabidopsis thaliana
  peptide (1)..(394): Ceres Seq. ID no. 12681455
  misc_feature (1)..(394): Homolog of NCBI NO: 30687286 NR Description: expressed protein [Arabidopsis thaliana]
  misc_feature (1)..(309): Homolog of NCBI NO: 30687283 NR Description: expressed protein [Arabidopsis thaliana] unknown protein [Arabidopsis thaliana]
  misc_feature (68)..(394): Homolog of NCBI NO: 15242979 NR Description: putative protein; protein id: At5g22790.1, by cDNA: gi_13605898, supported by cDNA: gi_19548024 [Arabidopsis >gi|9758754|dbj|BAB09278.1| gb|AAF31706.1~gene_id:K8E10.2~similar
  misc_feature (65)..(394): Homolog of NCBI NO: 34395170 NR Description: chloroplast lumen common protein family-like
  misc_feature (65)..(394): Homolog of NCBI NO: 34900644 NR Description: hypothetical protein~similar to Arabidopsis
  misc_feature (127)..(394): Homolog of NCBI NO: 6934300 NR Description: unknown [Euphorbia esula]
  misc_feature (72)..(394): Homolog of NCBI NO: 18416870 NR Description: putative protein; protein id: At5g12470.1, by cDNA: gi_20268751, supported by cDNA: gi_21281148 [Arabidopsis >gi|14586377|emb|CAC42908.1| putative protein [Arabidopsis
  misc_feature (156)..(394): Homolog of NCBI NO: 15231951 NR Description: unknown protein; protein id: At3g08640.1, by cDNA: gi_19698960 [Arabidopsis thaliana]
  misc_feature (71)..(132): Homolog of NCBI NO: 15231951 NR Description: unknown protein; protein id: At3g08640.1, by cDNA: gi_19698960 [Arabidopsis thaliana]
  misc_feature (156)..(394): Homolog of NCBI NO: 15231950 NR Description: unknown protein; protein id: At3g08630.1
MKVPVLRIRGGSGRQRSRLFVVNMSQSPIEPQSGGFAATEQIKGEGDNSILGKDNVRNLGTDQLENLDIDGNVGDGFNGSDGNGGGGGGGNGGEGDGEGEDYEEKEFGPILKFEEVMKETEARGATLPSDMLEAAKNYGIRKVLLLRYLDLQSSAGLLGFAIRSWAMLRNRMLADPSFLFKIGAEIVIDSCCATVAEVQKRGKDFWAEFELYVADLLVGTVVNIALVGMLAPYVRFGQPSASPGFLGRMVFAYNALPSSVFEAERPGCRFSAQQRLATYFYKGIMYGAVGFGCGIVGQGIANLIMTAKRNINKSEENIPVPPLIKSAALWGVFLSVSSNTRYQIINGLERVVEASPFAKKFPPAAMAFTVGVRLANNIYGGMQFVDWARLSGCQ

SEQ ID NO: 85624 - DNA, 2274 bp, Arabidopsis thaliana
  misc_feature (1)..(2274): Ceres Seq. ID no. 12681468
  misc_feature: MA Experiment ID: 20000265 Result: Up-regulated in Transcription
  misc_feature: MA Experiment 20000265 PARAMETER Experiment Name: At_Open_Flower_P Parameter: Age (day) Value: 21
  misc_feature: MA Experiment 20000265 PARAMETER Experiment Name: At_Open_Flower_P Parameter: Plant Line Value: WS
  misc_feature: MA Experiment 20000265 PARAMETER Experiment Name: At_Open_Flower_P Parameter: Tissue Value: Closed Flower vs. Whole Plant
  misc_feature: MA Experiment ID: 20001248 Result: Down-regulated in Transcription
  misc_feature: MA Experiment 20001248 PARAMETER Experiment Name: At_Far-red-induction_P Parameter: Age (day) Value: 7
  misc_feature: MA Experiment 20001248 PARAMETER Experiment Name: At_Far-red-induction_P Parameter: Light Value: Far-red vs. White
  misc_feature: MA Experiment 20001248 PARAMETER Experiment Name: At_Far-red-induction_P Parameter: Organism Value: A. thaliana
  misc_feature: MA Experiment 20001248 PARAMETER Experiment Name: At_Far-red-induction_P Parameter: Plant Line Value: Columbia
  misc_feature: MA Experiment 20001248 PARAMETER Experiment Name: At_Far-red-induction_P Parameter: Timepoint (hr) Value: 4
  misc_feature: MA Experiment 20001248 PARAMETER Experiment Name: At_Far-red-induction_P Parameter: Tissue Value: Whole Plant
atggctgtttcactaccattgtttcaatttatactctttcttcttcttcttcttctttcaagaacggtttatgcatacttaatcggagtcggaagctatgacatcactggtcctgccgctgatgtcaacatgatgggctacgcaaactcagatcaaatcgcttccggtattcatttccggttacgagctcgtgccttcatcgtcgctgagcctcaaggtaaccgcgtcgtgtttgtcaatctcgacgcttgtatggcttctcaaatcgttacaatcaaagttcttgagcgtctcaaagcaaggtatggtgagctttacacagagaagaatgtagcaataagtggaattcacacacatgctggaccaggaggatatcttcaatacgtcacatatattgtgacgtctcttggatttgttcgtcaatcttttgacgttgttgttaacggcattgagcaaagcattgtccaagcacacgaaagcctacgtcctggttctgcttttgttaacaaaggggatcttttggatgctggtgtgaatcgaagtccgagttcttatctgaacaatcctgcagctgagaggagtaaatataagtatgatgttgataaggaaatgactcttgttaagtttgttgattctcagttgggacctactggtagttttaactggtttgctactcatgggacttccatgagtcggactaactcgttgattagtggagataacaaaggcgctgcagctcggtttatggaggattggtttgagaatggacagaagaattctgttagctctagaaacatccctcggagagtatcaaccattgtttctgatttcagtagaaaccagagtagacttttggatattgcggctacttataagtcatctagaggacattctgtggataagtcccttgatgttaaaacccgagtaagaaacggttcgaagcgtaaatttgtctctgccttctgtcaatcaaactgtggtgatgtgagtccaaatactcttggtaccttttgcattgacactggactgccttgtgatttcaatcacagtacctgcaatggacagaacgagttgtgctatggccgtggtccgggctaccctgatgaatttgagagtacacgtatcattggagaaaagcaattcaaaatggctgtggaactttttaacaaagctacagagaagctgcaggggaaaattggttaccaacatgcgtatctagatttctcgaatcttgatgtcacagttcctaaagcaggcggtggctctgagacggttaagacatgtccagctgcaatggggtttggttttgctgctggaacaactgatggtccaggtgcttttgatttcaaacaaggagatgatcagggtaatgtgttttggagactagtgaggaatgtgttaagaactcctggtccagaacaggtccaatgccaaaaaccaaaacccattttacttgacactggtgagatgaaagaaccatatgactgggcgccttcaattcttccgattcagatacttcgcattggccaattagtcatcctcagtgttcccggagagttcacaacaatggctggaagacgtctccgtgacgctatcaagtcttttctcatttcttcggaccccaaggaattcagcaacaacatgcatgtcgtaatcgcaggtctcaccaacacctattctcagtacatcgccactttcgaagagtacgaggttcaaagatacgagggcgcctcaacgttatacggacgacacacactcactgcttatatccaagagttcaagaaactagccacagctttagttaacggtctaacactcccacgtggtccgcaacctcctgaccttttagacaaacagatcagtttactatcccctgtggttgtagactcaactcctctaggagtcaaattcggtgacgtcaaagctgatgtacctccaaagtcaacgttcaggagaggtcaacaagttaacgcaacgttttggtcaggatgtcctcgaaatgatttgatgactgaaggatcattcgctgtggtggagacgctgcgtgagggagggaaatgggctccggtgtatgatgacgatgacttcagtttgaagttcaagtggtcgagaccggcaaagctgagttcggagagccaagccacgattgagtggagggtaccggaatctgcggtagccggagtttatagaataagacattatggagcttctaagtcgttgtttggatccattagtagcttctctggttcttctagtgcctttgtagttgtatga

SEQ ID NO: 85625 - protein, 757 aa, Arabidopsis thaliana
  peptide (1)..(757): Ceres Seq. ID no. 12681469
  misc_feature (26)..(756): Pfam Name: Neutral/alkaline non-lysosomal ceramidase Pfam Description: Neutral/alkaline non-lysosomal ceramidase
  misc_feature (11)..(756): Homolog of NCBI NO: 34912830 NR Description: P0501G01.24 [Oryza sativa (japonica
  misc_feature (6)..(756): Homolog of NCBI NO: 15222380 NR Description: unknown protein; protein id: At1g07380.1
  misc_feature (6)..(742): Homolog of NCBI NO: 25333800 NR Description: protein F22G5.28 [imported] - Arabidopsis >gi|8778548|gb|AAF79556.1|AC022464_14 F22G5.28 [Arabidopsis
  misc_feature (97)..(756): Homolog of NCBI NO: 9759229 NR Description: neutral ceramidase [Arabidopsis thaliana]
  misc_feature (2)..(76): Homolog of NCBI NO: 9759229 NR Description: neutral ceramidase [Arabidopsis thaliana]
  misc_feature (240)..(756): Homolog of NCBI NO: 15237790 NR Description: random slug protein - like; protein id:
  misc_feature (317)..(757): Homolog of NCBI NO: 16758458 NR Description: N-acylsphingosine amidohydrolase 2 [Rattus
  misc_feature (20)..(250): Homolog of NCBI NO: 16758458 NR Description: N-acylsphingosine amidohydrolase 2 [Rattus
  misc_feature (317)..(757): Homolog of NCBI NO: 9845267 NR Description: N-acylsphingosine amidohydrolase (non-lysosomal
  misc_feature (26)..(250): Homolog of NCBI NO: 9845267 NR Description: N-acylsphingosine amidohydrolase (non-lysosomal
MAVSLPLFQFILFLLLLLLSRTVYAYLIGVGSYDITGPAADVNMMGYANSDQIASGIHFRLRARAFIVAEPQGNRVVFVNLDACMASQIVTIKVLERLKARYGELYTEKNVAISGIHTHAGPGGYLQYVTYIVTSLGFVRQSFDVVVNGIEQSIVQAHESLRPGSAFVNKGDLLDAGVNRSPSSYLNNPAAERSKYKYDVDKEMTLVKFVDSQLGPTGSFNWFATHGTSMSRTNSLISGDNKGAAARFMEDWFENGQKNSVSSRNIPRRVSTIVSDFSRNQSRLLDIAATYKSSRGHSVDKSLDVKTRVRNGSKRKFVSAFCQSNCGDVSPNTLGTFCIDTGLPCDFNHSTCNGQNELCYGRGPGYPDEFESTRIIGEKQFKMAVELFNKATEKLQGKIGYQHAYLDFSNLDVTVPKAGGGSETVKTCPAAMGFGFAAGTTDGPGAFDFKQGDDQGNVFWRLVRNVLRTPGPEQVQCQKPKPILLDTGEMKEPYDWAPSILPIQILRIGQLVILSVPGEFTTMAGRRLRDAIKSFLISSDPKEFSNNMHVVIAGLTNTYSQYIATFEEYEVQRYEGASTLYGRHTLTAYIQEFKKLATALVNGLTLPRGPQPPDLLDKQISLLSPVVVDSTPLGVKFGDVKADVPPKSTFRRGQQVNATFWSGCPRNDLMTEGSFAVVETLREGGKWAPVYDDDDFSLKFKWSRPAKLSSESQATIEWRVPESAVAGVYRIRHYGASKSLFGSISSFSGSSSAFVVV

SEQ ID NO: 85626 - protein, 714 aa, Arabidopsis thaliana
  peptide (1)..(714): Ceres Seq. ID no. 12681470
  misc_feature (1)..(713): Pfam Name: Neutral/alkaline non-lysosomal ceramidase Pfam Description: Neutral/alkaline non-lysosomal ceramidase
  misc_feature (1)..(713): Homolog of NCBI NO: 34912830 NR Description: P0501G01.24 [Oryza sativa (japonica
  misc_feature (1)..(713): Homolog of NCBI NO: 15222380 NR Description: unknown protein; protein id: At1g07380.1
  misc_feature (1)..(699): Homolog of NCBI NO: 25333800 NR Description: protein F22G5.28 [imported] - Arabidopsis >gi|8778548|gb|AAF79556.1|AC022464_14 F22G5.28 [Arabidopsis
  misc_feature (54)..(713): Homolog of NCBI NO: 9759229 NR Description: neutral ceramidase [Arabidopsis thaliana]
  misc_feature (1)..(33): Homolog of NCBI NO: 9759229 NR Description: neutral ceramidase [Arabidopsis thaliana]
  misc_feature (197)..(713): Homolog of NCBI NO: 15237790 NR Description: random slug protein - like; protein id:
  misc_feature (274)..(714): Homolog of NCBI NO: 16758458 NR Description: N-acylsphingosine amidohydrolase 2 [Rattus
  misc_feature (1)..(207): Homolog of NCBI NO: 16758458 NR Description: N-acylsphingosine amidohydrolase 2 [Rattus
  misc_feature (274)..(714): Homolog of NCBI NO: 9845267 NR Description: N-acylsphingosine amidohydrolase (non-lysosomal
  misc_feature (1)..(207): Homolog of NCBI NO: 9845267 NR Description: N-acylsphingosine amidohydrolase (non-lysosomal
MMGYANSDQIASGIHFRLRARAFIVAEPQGNRVVFVNLDACMASQIVTIKVLERLKARYGELYTEKNVAISGIHTHAGPGGYLQYVTYIVTSLGFVRQSFDVVVNGIEQSIVQAHESLRPGSAFVNKGDLLDAGVNRSPSSYLNNPAAERSKYKYDVDKEMTLVKFVDSQLGPTGSFNWFATHGTSMSRTNSLISGDNKGAAARFMEDWFENGQKNSVSSRNIPRRVSTIVSDFSRNQSRLLDIAATYKSSRGHSVDKSLDVKTRVRNGSKRKFVSAFCQSNCGDVSPNTLGTFCIDTGLPCDFNHSTCNGQNELCYGRGPGYPDEFESTRIIGEKQFKMAVELFNKATEKLQGKIGYQHAYLDFSNLDVTVPKAGGGSETVKTCPAAMGFGFAAGTTDGPGAFDFKQGDDQGNVFWRLVRNVLRTPGPEQVQCQKPKPILLDTGEMKEPYDWAPSILPIQILRIGQLVILSVPGEFTTMAGRRLRDAIKSFLISSDPKEFSNNMHVVIAGLTNTYSQYIATFEEYEVQRYEGASTLYGRHTLTAYIQEFKKLATALVNGLTLPRGPQPPDLLDKQISLLSPVVVDSTPLGVKFGDVKADVPPKSTFRRGQQVNATFWSGCPRNDLMTEGSFAVVETLREGGKWAPVYDDDDFSLKFKWSRPAKLSSESQATIEWRVPESAVAGVYRIRHYGASKSLFGSISSFSGSSSAFVVV

SEQ ID NO: 85627 - protein, 713 aa, Arabidopsis thaliana
  peptide (1)..(713): Ceres Seq. ID no. 12681471
  misc_feature (1)..(712): Pfam Name: Neutral/alkaline non-lysosomal ceramidase Pfam Description: Neutral/alkaline non-lysosomal ceramidase
  misc_feature (1)..(712): Homolog of NCBI NO: 34912830 NR Description: P0501G01.24 [Oryza sativa (japonica
  misc_feature (1)..(712): Homolog of NCBI NO: 15222380 NR Description: unknown protein; protein id: At1g07380.1
  misc_feature (1)..(698): Homolog of NCBI NO: 25333800 NR Description: protein F22G5.28 [imported] - Arabidopsis >gi|8778548|gb|AAF79556.1|AC022464_14 F22G5.28 [Arabidopsis
  misc_feature (53)..(712): Homolog of NCBI NO: 9759229 NR Description: neutral ceramidase [Arabidopsis thaliana]
  misc_feature (1)..(32): Homolog of NCBI NO: 9759229 NR Description: neutral ceramidase [Arabidopsis thaliana]
  misc_feature (196)..(712): Homolog of NCBI NO: 15237790 NR Description: random slug protein - like; protein id:
  misc_feature (273)..(713): Homolog of NCBI NO: 16758458 NR Description: N-acylsphingosine amidohydrolase 2 [Rattus
  misc_feature (1)..(206): Homolog of NCBI NO: 16758458 NR Description: N-acylsphingosine amidohydrolase 2 [Rattus
  misc_feature (273)..(713): Homolog of NCBI NO: 9845267 NR Description: N-acylsphingosine amidohydrolase (non-lysosomal
  misc_feature (1)..(206): Homolog of NCBI NO: 9845267 NR Description: N-acylsphingosine amidohydrolase (non-lysosomal
MGYANSDQIASGIHFRLRARAFIVAEPQGNRVVFVNLDACMASQIVTIKVLERLKARYGELYTEKNVAISGIHTHAGPGGYLQYVTYIVTSLGFVRQSFDVVVNGIEQSIVQAHESLRPGSAFVNKGDLLDAGVNRSPSSYLNNPAAERSKYKYDVDKEMTLVKFVDSQLGPTGSFNWFATHGTSMSRTNSLISGDNKGAAARFMEDWFENGQKNSVSSRNIPRRVSTIVSDFSRNQSRLLDIAATYKSSRGHSVDKSLDVKTRVRNGSKRKFVSAFCQSNCGDVSPNTLGTFCIDTGLPCDFNHSTCNGQNELCYGRGPGYPDEFESTRIIGEKQFKMAVELFNKATEKLQGKIGYQHAYLDFSNLDVTVPKAGGGSETVKTCPAAMGFGFAAGTTDGPGAFDFKQGDDQGNVFWRLVRNVLRTPGPEQVQCQKPKPILLDTGEMKEPYDWAPSILPIQILRIGQLVILSVPGEFTTMAGRRLRDAIKSFLISSDPKEFSNNMHVVIAGLTNTYSQYIATFEEYEVQRYEGASTLYGRHTLTAYIQEFKKLATALVNGLTLPRGPQPPDLLDKQISLLSPVVVDSTPLGVKFGDVKADVPPKSTFRRGQQVNATFWSGCPRNDLMTEGSFAVVETLREGGKWAPVYDDDDFSLKFKWSRPAKLSSESQATIEWRVPESAVAGVYRIRHYGASKSLFGSISSFSGSSSAFVVV

SEQ ID NO: 85628 - DNA, 1614 bp, Arabidopsis thaliana
  misc_feature (1)..(1614): Ceres Seq. ID no. 12681472
  misc_feature: MA Experiment ID: 20000171 Result: Up-regulated in Transcription
  misc_feature: MA Experiment 20000171 PARAMETER Experiment Name: At_42deg_Heat_P Parameter: Age (day) Value: 14
  misc_feature: MA Experiment 20000171 PARAMETER Experiment Name: At_42deg_Heat_P Parameter: Organism Value: A. thaliana
  misc_feature: MA Experiment 20000171 PARAMETER Experiment Name: At_42deg_Heat_P Parameter: Plant Line Value: WS
  misc_feature: MA Experiment 20000171 PARAMETER Experiment Name: At_42deg_Heat_P Parameter: Temperature (deg C) Value: 42 vs. 22
  misc_feature: MA Experiment 20000171 PARAMETER Experiment Name: At_42deg_Heat_P Parameter: Timepoint (hr) Value: 1
  misc_feature: MA Experiment 20000171 PARAMETER Experiment Name: At_42deg_Heat_P Parameter: Tissue Value: Aerial
  misc_feature: MA Experiment ID: 20000185 Result: Up-regulated in Transcription
  misc_feature: MA Experiment 20000185 PARAMETER Experiment Name: At_Roots__P Parameter: Age (day) Value: 7 vs. 21
  misc_feature: MA Experiment 20000185 PARAMETER Experiment Name: At_Roots__P Parameter: Organism Value: A. thaliana
  misc_feature: MA Experiment 20000185 PARAMETER Experiment Name: At_Roots__P Parameter: Tissue Value: Roots vs. Whole Plant
  misc_feature: MA Experiment ID: 20000265 Result: Up-regulated in Transcription
  misc_feature: MA Experiment 20000265 PARAMETER Experiment Name: At_Open_Flower_P Parameter: Age (day) Value: 21
  misc_feature: MA Experiment 20000265 PARAMETER Experiment Name: At_Open_Flower_P Parameter: Plant Line Value: WS
  misc_feature: MA Experiment 20000265 PARAMETER Experiment Name: At_Open_Flower_P Parameter: Tissue Value: Closed Flower vs. Whole Plant
  misc_feature: MA Experiment ID: 20000439 Result: Up-regulated in Transcription
  misc_feature: MA Experiment 20000439 PARAMETER Experiment Name: At_Roots__P Parameter: Age (day) Value: 14 vs. 21
  misc_feature: MA Experiment 20000439 PARAMETER Experiment Name: At_Roots__P Parameter: Organism Value: A. thaliana
  misc_feature: MA Experiment 20000439 PARAMETER Experiment Name: At_Roots__P Parameter: Tissue Value: Roots vs. Whole Plant
  misc_feature: MA Experiment ID: 20001910 Result: Down-regulated in Transcription
  misc_feature: MA Experiment 20001910 PARAMETER Experiment Name: At_Drought_Reproduction_P Parameter: Age (day) Value: 37
  misc_feature: MA Experiment 20001910 PARAMETER Experiment Name: At_Drought_Reproduction_P Parameter: Organism Value: A. thaliana
  misc_feature: MA Experiment 20001910 PARAMETER Experiment Name: At_Drought_Reproduction_P Parameter: Plant Line Value: WS
  misc_feature: MA Experiment 20001910 PARAMETER Experiment Name: At_Drought_Reproduction_P Parameter: Timepoint (day) Value: 7
  misc_feature: MA Experiment 20001910 PARAMETER Experiment Name: At_Drought_Reproduction_P Parameter: Tissue Value: Flowers
  misc_feature: MA Experiment 20001910 PARAMETER Experiment Name: At_Drought_Reproduction_P Parameter: Treatment Value: Drought vs. No Drought
atggcgacagtaggatccctgaaacctctgcaccattcctcatgttcatcgagtttccctcggaatccgatcgtaaaccggaaagcccttcttggttttgtgtttgattctgcccggaaaaaccagattcgatgtgagaatttacgatattcatcggaaagcgatgggaagagaagaaatgcggcggcgaagaagaggaatcaatccccggaaagatgtgcggcggagggagtactgaccggaggaggggggtcggaggcgattgcggaggtgaggacgatgatgcctgagaggattaaggtagtgatattgacggcgtgcatgatgtgtctatgtaacgccgacagagttgttatgtccgtcgcggtggttccactcgccgataagcttggctggtcgagttctttcttaggggtagttcagtcctccttcctatggggttacattttttcatccgttatcggaggggcattggtggatcggtatggaggaaaaagagtgttggcttggggtgtggcattgtggtccttagccactctactcactccttgggcagctgcacactcgaccttagccttattgtgtgtccgcgccttttttggcctcgctgaaggcgttgcaatgccctccatgaccaccctactctctcggtggtttccaatggatgaacgagcgagtgcggttggtatatctatggccgggtttcacatgggaaatgttgtgggacttctgttgacgccactcatgttatcttccataggaatctctggtccatttattctttttgcatccttaggtctattgtgggtatccacttggtcaagcggagttacaaacaaccctcaggacagtcctttcatcactaggtcagaactcaggcttatccaggctggaaaaccagttcaaccgtcaaccatttcgccgaaaccaaacccatctttgcgacttcttttgtcgaaattgcctacttgggcgatcatttttgctaatgtgactaacaactggggatactttgttcttctctcatggatgcctgtttacttccagacggtgtttaatgtgaatttgaagcaagcagcttggtttagcgctcttccatgggcgacaatggcgatctcaggttactatgcaggagcagcatcggacttcttgataagaactggtcactctgtaacctcagtacgaaagatcatgcaatctattggatttatgggtcccgggctgtctctgctctgcctcaacttcgcaaagtcgccttcttgtgcagcggttttcatgaccattgcattgagcttgagttcctttagccaagctggatttctcctcaatatgcaagacatcgcaccgcaatatgctgatggtggatcttttcttcttcttcttttgcatcgattttgtttcttgctgaaaaagttagggtttgtatatctggtgtgcgagacaggtatttcgaattgtgcgggtacgttggctgcgatcgtaagtacaatagggacgggatattttgtgcagtggctcggctcttttcaggcgttcttgacggttacggcctttctttactttgcaaccaccgtgttttggctcctctttgcaaccggagaacgagtcttctag

SEQ ID NO: 85629 - protein, 537 aa, Arabidopsis thaliana
  peptide (1)..(537): Ceres Seq. ID no. 12681473
  misc_feature (133)..(354): Pfam Name: Bacterial protein of unknown function (DUF894) Pfam Description: Bacterial protein of unknown function (DUF894)
  misc_feature (1)..(452): Homolog of NCBI NO: 15224438 NR Description: putative Na+-dependent inorganic phosphate protein id: At2g38060.1 [Arabidopsis thaliana]
  misc_feature (1)..(452): Homolog of NCBI NO: 34908356 NR Description: P0529H11.31 [Oryza sativa (japonica
  misc_feature (482)..(536): Homolog of NCBI NO: 34908356 NR Description: P0529H11.31 [Oryza sativa (japonica
  misc_feature (58)..(452): Homolog of NCBI NO: 17064732 NR Description: putative protein [Arabidopsis thaliana]
  misc_feature (482)..(536): Homolog of NCBI NO: 17064732 NR Description: putative protein [Arabidopsis thaliana]
  misc_feature (58)..(452): Homolog of NCBI NO: 22331630 NR Description: putative protein; protein id: At3g46980.1,
  misc_feature (482)..(536): Homolog of NCBI NO: 22331630 NR Description: putative protein; protein id: At3g46980.1,
  misc_feature (58)..(452): Homolog of NCBI NO: 11357408 NR Description: hypothetical protein F13I12.30 - Arabidopsis >gi|6522579|emb|CAB61944.1| putative protein [Arabidopsis
  misc_feature (482)..(536): Homolog of NCBI NO: 11357408 NR Description: hypothetical protein F13I12.30 - Arabidopsis >gi|6522579|emb|CAB61944.1| putative protein [Arabidopsis
  misc_feature (74)..(452): Homolog of NCBI NO: 30678625 NR Description: expressed protein [Arabidopsis thaliana]
MATVGSLKPLHHSSCSSSFPRNPIVNRKALLGFVFDSARKNQIRCENLRYSSESDGKRRNAAAKKRNQSPERCAAEGVLTGGGGSEAIAEVRTMMPERIKVVILTACMMCLCNADRVVMSVAVVPLADKLGWSSSFLGVVQSSFLWGYIFSSVIGGALVDRYGGKRVLAWGVALWSLATLLTPWAAAHSTLALLCVRAFFGLAEGVAMPSMTTLLSRWFPMDERASAVGISMAGFHMGNVVGLLLTPLMLSSIGISGPFILFASLGLLWVSTWSSGVTNNPQDSPFITRSELRLIQAGKPVQPSTISPKPNPSLRLLLSKLPTWAIIFANVTNNWGYFVLLSWMPVYFQTVFNVNLKQAAWFSALPWATMAISGYYAGAASDFLIRTGHSVTSVRKIMQSIGFMGPGLSLLCLNFAKSPSCAAVFMTIALSLSSFSQAGFLLNMQDIAPQYADGGSFLLLLLHRFCFLLKKLGFVYLVCETGISNCAGTLAAIVSTIGTGYFVQWLGSFQAFLTVTAFLYFATTVFWLLFATGERVF

SEQ ID NO: 85630 - protein, 444 aa, Arabidopsis thaliana
  peptide (1)..(444): Ceres Seq. ID no. 12681474
  misc_feature (40)..(261): Pfam Name: Bacterial protein of unknown function (DUF894) Pfam Description: Bacterial protein of unknown function (DUF894)
  misc_feature (1)..(359): Homolog of NCBI NO: 15224438 NR Description: putative Na+-dependent inorganic phosphate protein id: At2g38060.1 [Arabidopsis thaliana]
  misc_feature (1)..(359): Homolog of NCBI NO: 34908356 NR Description: P0529H11.31 [Oryza sativa (japonica
  misc_feature (389)..(443): Homolog of NCBI NO: 34908356 NR Description: P0529H11.31 [Oryza sativa (japonica
  misc_feature (1)..(359): Homolog of NCBI NO: 17064732 NR Description: putative protein [Arabidopsis thaliana]
  misc_feature (389)..(443): Homolog of NCBI NO: 17064732 NR Description: putative protein [Arabidopsis thaliana]
  misc_feature (1)..(359): Homolog of NCBI NO: 22331630 NR Description: putative protein; protein id: At3g46980.1,
  misc_feature (389)..(443): Homolog of NCBI NO: 22331630 NR Description: putative protein; protein id: At3g46980.1,
  misc_feature (1)..(359): Homolog of NCBI NO: 11357408 NR Description: hypothetical protein F13I12.30 - Arabidopsis >gi|6522579|emb|CAB61944.1| putative protein [Arabidopsis
  misc_feature (389)..(443): Homolog of NCBI NO: 11357408 NR Description: hypothetical protein F13I12.30 - Arabidopsis >gi|6522579|emb|CAB61944.1| putative protein [Arabidopsis
  misc_feature (1)..(359): Homolog of NCBI NO: 30678625 NR Description: expressed protein [Arabidopsis thaliana]
MMPERIKVVILTACMMCLCNADRVVMSVAVVPLADKLGWSSSFLGVVQSSFLWGYIFSSVIGGALVDRYGGKRVLAWGVALWSLATLLTPWAAAHSTLALLCVRAFFGLAEGVAMPSMTTLLSRWFPMDERASAVGISMAGFHMGNVVGLLLTPLMLSSIGISGPFILFASLGLLWVSTWSSGVTNNPQDSPFITRSELRLIQAGKPVQPSTISPKPNPSLRLLLSKLPTWAIIFANVTNNWGYFVLLSWMPVYFQTVFNVNLKQAAWFSALPWATMAISGYYAGAASDFLIRTGHSVTSVRKIMQSIGFMGPGLSLLCLNFAKSPSCAAVFMTIALSLSSFSQAGFLLNMQDIAPQYADGGSFLLLLLHRFCFLLKKLGFVYLVCETGISNCAGTLAAIVSTIGTGYFVQWLGSFQAFLTVTAFLYFATTVFWLLFATGERVF

SEQ ID NO: 85631 - protein, 443 aa, Arabidopsis thaliana
  peptide (1)..(443): Ceres Seq. ID no. 12681475
  misc_feature (39)..(260): Pfam Name: Bacterial protein of unknown function (DUF894) Pfam Description: Bacterial protein of unknown function (DUF894)
  misc_feature (1)..(358): Homolog of NCBI NO: 15224438 NR Description: putative Na+-dependent inorganic phosphate protein id: At2g38060.1 [Arabidopsis thaliana]
  misc_feature (1)..(358): Homolog of NCBI NO: 34908356 NR Description: P0529H11.31 [Oryza sativa (japonica
  misc_feature (388)..(442): Homolog of NCBI NO: 34908356 NR Description: P0529H11.31 [Oryza sativa (japonica
  misc_feature (1)..(358): Homolog of NCBI NO: 17064732 NR Description: putative protein [Arabidopsis thaliana]
  misc_feature (388)..(442): Homolog of NCBI NO: 17064732 NR Description: putative protein [Arabidopsis thaliana]
  misc_feature (1)..(358): Homolog of NCBI NO: 22331630 NR Description: putative protein; protein id: At3g46980.1,
  misc_feature (388)..(442): Homolog of NCBI NO: 22331630 NR Description: putative protein; protein id: At3g46980.1,
  misc_feature (1)..(358): Homolog of NCBI NO: 11357408 NR Description: hypothetical protein F13I12.30 - Arabidopsis >gi|6522579|emb|CAB61944.1| putative protein [Arabidopsis
  misc_feature (388)..(442): Homolog of NCBI NO: 11357408 NR Description: hypothetical protein F13I12.30 - Arabidopsis >gi|6522579|emb|CAB61944.1| putative protein [Arabidopsis
  misc_feature (1)..(358): Homolog of NCBI NO: 30678625 NR Description: expressed protein [Arabidopsis thaliana]
MPERIKVVILTACMMCLCNADRVVMSVAVVPLADKLGWSSSFLGVVQSSFLWGYIFSSVIGGALVDRYGGKRVLAWGVALWSLATLLTPWAAAHSTLALLCVRAFFGLAEGVAMPSMTTLLSRWFPMDERASAVGISMAGFHMGNVVGLLLTPLMLSSIGISGPFILFASLGLLWVSTWSSGVTNNPQDSPFITRSELRLIQAGKPVQPSTISPKPNPSLRLLLSKLPTWAIIFANVTNNWGYFVLLSWMPVYFQTVFNVNLKQAAWFSALPWATMAISGYYAGAASDFLIRTGHSVTSVRKIMQSIGFMGPGLSLLCLNFAKSPSCAAVFMTIALSLSSFSQAGFLLNMQDIAPQYADGGSFLLLLLHRFCFLLKKLGFVYLVCETGISNCAGTLAAIVSTIGTGYFVQWLGSFQAFLTVTAFLYFATTVFWLLFATGERVF

SEQ ID NO: 85632 - DNA, 1137 bp, Arabidopsis thaliana
  misc_feature (1)..(1137): Ceres Seq. ID no. 12681499
  misc_feature: MA Experiment ID: 20000355 Result: Up-regulated in Transcription
  misc_feature: MA Experiment 20000355 PARAMETER Experiment Name: At_Siliques_Sub_P Parameter: Age (day) Value: 21
  misc_feature: MA Experiment 20000355 PARAMETER Experiment Name: At_Siliques_Sub_P Parameter: Organism Value: A. thaliana
  misc_feature: MA Experiment 20000355 PARAMETER Experiment Name: At_Siliques_Sub_P Parameter: Plant Line Value: WS
  misc_feature: MA Experiment 20000355 PARAMETER Experiment Name: At_Siliques_Sub_P Parameter: Tissue Value: Less Than 5mm Siliques vs. Whole Plant
atggggtcaattcgtggtgaccttcagccgctctttgtcatgccaccacctcccctcgatgaagattgtgatgatatcttcaattctgacgaatcttcatgggggttgttgagcttgtcctgcttcgcgtcggtttgtctgatttttggtgtttacggtagtgaaactgtctggcttggacctaactcgtccattcttgttaaaccaagttccatctttgtcaaaagcattaaggtgaaggagcttgatttttcaaagcctggacttcagctatatggattcaatggtcaatctactcctagtggttattttggatggccatactacttaaatagaggaacgcatatgaatatatcttataacattttacctaaaggttctgcagttcggcttgtgatcactgaaggctctcaagttataggaatgccattcttctatcggtcgtcgctgaaggatattgcatttcgtgacaccgcttggtcatggaatctaattcaggggagtggtatgattcaattggatataagtaagtctaaaggttattatcttactgtggctaacttgaagaggaaggacatagaggtggaactggatattgatgtgaaggctgtcttgtatgatactaaacaatcatcctacaattgttccttcagcaatggcgagtgctcattcaaaatgaatgaaaggtaccctgttgaaaattatgctgtcgtaacttcaccagcactgggtcagggagtatccatcgatgatgaatggtatatcgagttgtcatatcaacctagattgattgcatatggaagcttcacaggtgtgttgctttccttcatgctggtagctatacacttctgcaacaagttaaagtgctgtggtggagagggatttttatccggagatgattcagtgagaacatgtctacttgcagacaaaggtgacaatgattgttgtaatgatgtcgaagcaagtaacaaaagtctctgtgccatttgttttgatgctccaagagattgttgtttcctcccgtgtggccattgcgtctcctgttaccaatgcggaacaaagataaaaagaaccaaggggaggtgtccaatatgtcgaaagaaaatgatacatgtgaagcgaatctatacagcttaa

SEQ ID NO: 85633 - protein, 378 aa, Arabidopsis thaliana
  peptide (1)..(378): Ceres Seq. ID no. 12681500
  misc_feature (327)..(365): Pfam Name: Zinc finger, C3HC4 type (RING finger) Pfam Description: Zinc finger, C3HC4 type (RING finger)
  misc_feature (1)..(135): Homolog of NCBI NO: 15224468 NR Description: hypothetical protein; protein id: At2g38220.1
  misc_feature (167)..(279): Homolog of NCBI NO: 15224468 NR Description: hypothetical protein; protein id: At2g38220.1
  misc_feature (142)..(307): Homolog of NCBI NO: 15224464 NR Description: hypothetical protein; protein id: At2g38200.1
  misc_feature (193)..(378): Homolog of NCBI NO: 29648940 NR Description: hypothetical protein [Arabidopsis thaliana]
  misc_feature (1)..(195): Homolog of NCBI NO: 29648951 NR Description: hypothetical protein [Arabidopsis thaliana]
  misc_feature (28)..(313): Homolog of NCBI NO: 30679266 NR Description: expressed protein [Arabidopsis thaliana]
  misc_feature (321)..(376): Homolog of NCBI NO: 30679266 NR Description: expressed protein [Arabidopsis thaliana]
  misc_feature (28)..(376): Homolog of NCBI NO: 11357966 NR Description: hypothetical protein T10O8.160 - Arabidopsis >gi|7320723|emb|CAB81928.1| putative protein [Arabidopsis
  misc_feature (317)..(377): Homolog of NCBI NO: 15224462 NR Description: unknown protein; protein id: At2g38190.1
  misc_feature (277)..(323): Homolog of NCBI NO: 15224462 NR Description: unknown protein; protein id: At2g38190.1
MGSIRGDLQPLFVMPPPPLDEDCDDIFNSDESSWGLLSLSCFASVCLIFGVYGSETVWLGPNSSILVKPSSIFVKSIKVKELDFSKPGLQLYGFNGQSTPSGYFGWPYYLNRGTHMNISYNILPKGSAVRLVITEGSQVIGMPFFYRSSLKDIAFRDTAWSWNLIQGSGMIQLDISKSKGYYLTVANLKRKDIEVELDIDVKAVLYDTKQSSYNCSFSNGECSFKMNERYPVENYAVVTSPALGQGVSIDDEWYIELSYQPRLIAYGSFTGVLLSFMLVAIHFCNKLKCCGGEGFLSGDDSVRTCLLADKGDNDCCNDVEASNKSLCAICFDAPRDCCFLPCGHCVSCYQCGTKIKRTKGRCPICRKKMIHVKRIYTA

SEQ ID NO: 85634 - protein, 365 aa, Arabidopsis thaliana
  peptide (1)..(365): Ceres Seq. ID no. 12681501
  misc_feature (314)..(352): Pfam Name: Zinc finger, C3HC4 type (RING finger) Pfam Description: Zinc finger, C3HC4 type (RING finger)
  misc_feature (1)..(122): Homolog of NCBI NO: 15224468 NR Description: hypothetical protein; protein id: At2g38220.1
  misc_feature (154)..(266): Homolog of NCBI NO: 15224468 NR Description: hypothetical protein; protein id: At2g38220.1
  misc_feature (129)..(294): Homolog of NCBI NO: 15224464 NR Description: hypothetical protein; protein id: At2g38200.1
  misc_feature (180)..(365): Homolog of NCBI NO: 29648940 NR Description: hypothetical protein [Arabidopsis thaliana]
  misc_feature (1)..(182): Homolog of NCBI NO: 29648951 NR Description: hypothetical protein [Arabidopsis thaliana]
  misc_feature (15)..(300): Homolog of NCBI NO: 30679266 NR Description: expressed protein [Arabidopsis thaliana]
  misc_feature (308)..(363): Homolog of NCBI NO: 30679266 NR Description: expressed protein [Arabidopsis thaliana]
  misc_feature (15)..(363): Homolog of NCBI NO: 11357966 NR Description: hypothetical protein T10O8.160 - Arabidopsis >gi|7320723|emb|CAB81928.1| putative protein [Arabidopsis
  misc_feature (304)..(364): Homolog of NCBI NO: 15224462 NR Description: unknown protein; protein id: At2g38190.1
  misc_feature (264)..(310): Homolog of NCBI NO: 15224462 NR Description: unknown protein; protein id: At2g38190.1
MPPPPLDEDCDDIFNSDESSWGLLSLSCFASVCLIFGVYGSETVWLGPNSSILVKPSSIFVKSIKVKELDFSKPGLQLYGFNGQSTPSGYFGWPYYLNRGTHMNISYNILPKGSAVRLVITEGSQVIGMPFFYRSSLKDIAFRDTAWSWNLIQGSGMIQLDISKSKGYYLTVANLKRKDIEVELDIDVKAVLYDTKQSSYNCSFSNGECSFKMNERYPVENYAVVTSPALGQGVSIDDEWYIELSYQPRLIAYGSFTGVLLSFMLVAIHFCNKLKCCGGEGFLSGDDSVRTCLLADKGDNDCCNDVEASNKSLCAICFDAPRDCCFLPCGHCVSCYQCGTKIKRTKGRCPICRKKMIHVKRIYTA

SEQ ID NO: 85635 - protein, 263 aa, Arabidopsis thaliana
  peptide (1)..(263): Ceres Seq. ID no. 12681502
  misc_feature (212)..(250): Pfam Name: Zinc finger, C3HC4 type (RING finger) Pfam Description: Zinc finger, C3HC4 type (RING finger)
  misc_feature (1)..(20): Homolog of NCBI NO: 15224468 NR Description: hypothetical protein; protein id: At2g38220.1
  misc_feature (52)..(164): Homolog of NCBI NO: 15224468 NR Description: hypothetical protein; protein id: At2g38220.1
  misc_feature (27)..(192): Homolog of NCBI NO: 15224464 NR Description: hypothetical protein; protein id: At2g38200.1
  misc_feature (78)..(263): Homolog of NCBI NO: 29648940 NR Description: hypothetical protein [Arabidopsis thaliana]
  misc_feature (1)..(80): Homolog of NCBI NO: 29648951 NR Description: hypothetical protein [Arabidopsis thaliana]
  misc_feature (1)..(198): Homolog of NCBI NO: 30679266 NR Description: expressed protein [Arabidopsis thaliana]
  misc_feature (206)..(261): Homolog of NCBI NO: 30679266 NR Description: expressed protein [Arabidopsis thaliana]
  misc_feature (1)..(261): Homolog of NCBI NO: 11357966 NR Description: hypothetical protein T10O8.160 - Arabidopsis >gi|7320723|emb|CAB81928.1| putative protein [Arabidopsis
  misc_feature (202)..(262): Homolog of NCBI NO: 15224462 NR Description: unknown protein; protein id: At2g38190.1
  misc_feature (162)..(208): Homolog of NCBI NO: 15224462 NR Description: unknown protein; protein id: At2g38190.1
MNISYNILPKGSAVRLVITEGSQVIGMPFFYRSSLKDIAFRDTAWSWNLIQGSGMIQLDISKSKGYYLTVANLKRKDIEVELDIDVKAVLYDTKQSSYNCSFSNGECSFKMNERYPVENYAVVTSPALGQGVSIDDEWYIELSYQPRLIAYGSFTGVLLSFMLVAIHFCNKLKCCGGEGFLSGDDSVRTCLLADKGDNDCCNDVEASNKSLCAICFDAPRDCCFLPCGHCVSCYQCGTKIKRTKGRCPICRKKMIHVKRIYTA

SEQ ID NO: 85636 - DNA, 1530 bp, Arabidopsis thaliana
  misc_feature (1)..(1530): Ceres Seq. ID no. 12681521
  misc_feature: MA Experiment ID: 20000185 Result: Down-regulated in Transcription
  misc_feature: MA Experiment 20000185 PARAMETER Experiment Name: At_Roots__P Parameter: Age (day) Value: 7 vs. 21
  misc_feature: MA Experiment 20000185 PARAMETER Experiment Name: At_Roots__P Parameter: Organism Value: A. thaliana
  misc_feature: MA Experiment 20000185 PARAMETER Experiment Name: At_Roots__P Parameter: Tissue Value: Roots vs. Whole Plant
atggcggcggtcgctacctccttctgtttctctccccatcgatcgccgtcacgttttggaaaccctaattcatccattcgaagaacaatcgtctgtaaatcatctcctcgcgatgaatctccagccgtctccacttcttctcagcgaccggaaaagcagcagaatcctctgacttcacagaataaaccggatcatgatcacaaaccggatcctgggattggtaaaattggaatggagataatgtcaattgcattacctgctgcattagctttagctgctgatcctataacatctcttgtcgacactgccttcgttggccatattggttctgcggaattagctgcagtaggagtgtcagtttctgtattcaatttggtgtcgaagctcttcaatgttcctttactaaatgtcacaacatcgtttgttgcggaggagcaagcaattgctgctaaggatgataatgattctatagaaacaagcaagaaagtgctgccttcggtttcaacttcattagttcttgctgctggagttggtattgcagaggccattgcgctatctctcgggtctgatttcttgatggatgtcatggctataccttttgattcaccaatgcggataccagcagagcagttcctcagacttcgagcgtatggtgcaccaccaattgttgttgcattggctgcgcaaggagcttttcgagttgcggggaatgtacttaatgcggtattggatccaatcctgatatttgtccttggttttggtatctctggtgctgcggctgctactgtgatttctgaatacttgattgcatttattcttctatggaagttgaatgagaatgtagttttgctctctcctcaaatcaaagtgggaagagccaaccagtacctcaaatcaggtgggcttctcattggtagaacggtggctttgcttgtgccattcacattagctacttcgttagcagctcaaaatggacccactcaaatggctggccatcaaatcgtcttggaaatctggttggctgtctctttactcaccgatgctttagccattgctgcacagagtcttcttgccaccacttactctcaaggagaatacaaacaagcccgggaagttctcttcggagtccttcaagtaggtttagcaactggaactggtttggctgctgtattgttcatcactttcgaaccattttcaagcttattcacaacggattcagaagttttaaagattgctttgtcagggaccttatttgtggctggatctcaaccggtgaatgctctagcgtttgttttggatgggctctattatggtgtctctgacttcggatttgccgcttattctatggtgattgtcggattcatatcttccttgttcatgcttgtggctgcaccaacgtttggccttgccgggatctggactggtttgttcctcttcatggcgttgcggttggttgctggagcctggagattggggacaagaaccggtccatggaaaatgctatggtctgctccagagaagccagaatga

SEQ ID NO: 85637 - protein, 509 aa, Arabidopsis thaliana
  peptide (1)..(509): Ceres Seq. ID no. 12681522
  misc_feature (1)..(509): Homolog of NCBI NO: 30687474 NR Description: MATE efflux protein family [Arabidopsis thaliana] unknown protein [Arabidopsis thaliana]
  misc_feature (1)..(498): Homolog of NCBI NO: 7487160 NR Description: hypothetical protein At2g38330 [imported] - thaliana >gi|3395439|gb|AAC28771.1| hypothetical protein
  misc_feature (161)..(490): Homolog of NCBI NO: 25405456 NR Description: hypothetical protein F11M15.20 [imported] - thaliana >gi|4836944|gb|AAD30646.1|AC006085_19 Hypothetical
  misc_feature (75)..(153): Homolog of NCBI NO: 25405456 NR Description: hypothetical protein F11M15.20 [imported] - thaliana >gi|4836944|gb|AAD30646.1|AC006085_19 Hypothetical
  misc_feature (154)..(501): Homolog of NCBI NO: 15231918 NR Description: MATE efflux family protein, putative; protein id: supported by cDNA: gi_15912322, supported by cDNA: gi_15982819, by cDNA: gi_19310968 [Arabidopsis thaliana] protein [Arabidopsis
  misc_feature (77)..(172): Homolog of NCBI NO: 15231918 NR Description: MATE efflux family protein, putative; protein id: supported by cDNA: gi_15912322, supported by cDNA: gi_15982819, by cDNA: gi_19310968 [Arabidopsis thaliana] protein [Arabidopsis
  misc_feature (161)..(449): Homolog of NCBI NO: 19386721 NR Description: P0678F11.10 [Oryza sativa (japonica
  misc_feature (73)..(161): Homolog of NCBI NO: 19386721 NR Description: P0678F11.10 [Oryza sativa (japonica
  misc_feature (91)..(493): Homolog of NCBI NO: 37532300 NR Description: putative membrane protein [Oryza sativa (japonica group)] >gi|18958689|gb|AAL82672.1| putative membrane protein
  misc_feature (76)..(253): Homolog of NCBI NO: 15233839 NR Description: putative protein; protein id: At4g38380.1
MAAVATSFCFSPHRSPSRFGNPNSSIRRTIVCKSSPRDESPAVSTSSQRPEKQQNPLTSQNKPDHDHKPDPGIGKIGMEIMSIALPAALALAADPITSLVDTAFVGHIGSAELAAVGVSVSVFNLVSKLFNVPLLNVTTSFVAEEQAIAAKDDNDSIETSKKVLPSVSTSLVLAAGVGIAEAIALSLGSDFLMDVMAIPFDSPMRIPAEQFLRLRAYGAPPIVVALAAQGAFRVAGNVLNAVLDPILIFVLGFGISGAAAATVISEYLIAFILLWKLNENVVLLSPQIKVGRANQYLKSGGLLIGRTVALLVPFTLATSLAAQNGPTQMAGHQIVLEIWLAVSLLTDALAIAAQSLLATTYSQGEYKQAREVLFGVLQVGLATGTGLAAVLFITFEPFSSLFTTDSEVLKIALSGTLFVAGSQPVNALAFVLDGLYYGVSDFGFAAYSMVIVGFISSLFMLVAAPTFGLAGIWTGLFLFMALRLVAGAWRLGTRTGPWKMLWSAPEKPE

SEQ ID NO: 85638 - protein, 432 aa, Arabidopsis thaliana
  peptide (1)..(432): Ceres Seq. ID no. 12681523
  misc_feature (1)..(432): Homolog of NCBI NO: 30687474 NR Description: MATE efflux protein family [Arabidopsis thaliana] unknown protein [Arabidopsis thaliana]
  misc_feature (1)..(421): Homolog of NCBI NO: 7487160 NR Description: hypothetical protein At2g38330 [imported] - thaliana >gi|3395439|gb|AAC28771.1| hypothetical protein
  misc_feature (84)..(413): Homolog of NCBI NO: 25405456 NR Description: hypothetical protein F11M15.20 [imported] - thaliana >gi|4836944|gb|AAD30646.1|AC006085_19 Hypothetical
  misc_feature (1)..(76): Homolog of NCBI NO: 25405456 NR Description: hypothetical protein F11M15.20 [imported] - thaliana >gi|4836944|gb|AAD30646.1|AC006085_19 Hypothetical
  misc_feature (77)..(424): Homolog of NCBI NO: 15231918 NR Description: MATE efflux family protein, putative; protein id: supported by cDNA: gi_15912322, supported by cDNA: gi_15982819, by cDNA: gi_19310968 [Arabidopsis thaliana] protein [Arabidopsis
  misc_feature (1)..(95): Homolog of NCBI NO: 15231918 NR Description: MATE efflux family protein, putative; protein id: supported by cDNA: gi_15912322, supported by cDNA: gi_15982819, by cDNA: gi_19310968 [Arabidopsis thaliana] protein [Arabidopsis
  misc_feature (84)..(372): Homolog of NCBI NO: 19386721 NR Description: P0678F11.10 [Oryza sativa (japonica
  misc_feature (1)..(84): Homolog of NCBI NO: 19386721 NR Description: P0678F11.10 [Oryza sativa (japonica
  misc_feature (14)..(416): Homolog of NCBI NO: 37532300 NR Description: putative membrane protein [Oryza sativa (japonica group)] >gi|18958689|gb|AAL82672.1| putative membrane protein
  misc_feature (1)..(176): Homolog of NCBI NO: 15233839 NR Description: putative protein; protein id: At4g38380.1
MEIMSIALPAALALAADPITSLVDTAFVGHIGSAELAAVGVSVSVFNLVSKLFNVPLLNVTTSFVAEEQAIAAKDDNDSIETSKKVLPSVSTSLVLAAGVGIAEAIALSLGSDFLMDVMAIPFDSPMRIPAEQFLRLRAYGAPPIVVALAAQGAFRVAGNVLNAVLDPILIFVLGFGISGAAAATVISEYLIAFILLWKLNENVVLLSPQIKVGRANQYLKSGGLLIGRTVALLVPFTLATSLAAQNGPTQMAGHQIVLEIWLAVSLLTDALAIAAQSLLATTYSQGEYKQAREVLFGVLQVGLATGTGLAAVLFITFEPFSSLFTTDSEVLKIALSGTLFVAGSQPVNALAFVLDGLYYGVSDFGFAAYSMVIVGFISSLFMLVAAPTFGLAGIWTGLFLFMALRLVAGAWRLGTRTGPWKMLWSAPEKPE

SEQ ID NO: 85639 - protein, 429 aa, Arabidopsis thaliana
  peptide (1)..(429): Ceres Seq. ID no. 12681524
  misc_feature (1)..(429): Homolog of NCBI NO: 30687474 NR Description: MATE efflux protein family [Arabidopsis thaliana] unknown protein [Arabidopsis thaliana]
  misc_feature (1)..(418): Homolog of NCBI NO: 7487160 NR Description: hypothetical protein At2g38330 [imported] - thaliana >gi|3395439|gb|AAC28771.1| hypothetical protein
  misc_feature (81)..(410): Homolog of NCBI NO: 25405456 NR Description: hypothetical protein F11M15.20 [imported] - thaliana >gi|4836944|gb|AAD30646.1|AC006085_19 Hypothetical
  misc_feature (1)..(73): Homolog of NCBI NO: 25405456 NR Description: hypothetical protein F11M15.20 [imported] - thaliana >gi|4836944|gb|AAD30646.1|AC006085_19 Hypothetical
  misc_feature (74)..(421): Homolog of NCBI NO: 15231918 NR Description: MATE efflux family protein, putative; protein id: supported by cDNA: gi_15912322, supported by cDNA: gi_15982819, by cDNA: gi_19310968 [Arabidopsis thaliana] protein [Arabidopsis
  misc_feature (1)..(92): Homolog of NCBI NO: 15231918 NR Description: MATE efflux family protein, putative; protein id: supported by cDNA: gi_15912322, supported by cDNA: gi_15982819, by cDNA: gi_19310968 [Arabidopsis thaliana] protein [Arabidopsis
  misc_feature (81)..(369): Homolog of NCBI NO: 19386721 NR Description: P0678F11.10 [Oryza sativa (japonica
  misc_feature (1)..(81): Homolog of NCBI NO: 19386721 NR Description: P0678F11.10 [Oryza sativa (japonica
  misc_feature (11)..(413): Homolog of NCBI NO: 37532300 NR Description: putative membrane protein [Oryza sativa (japonica group)] >gi|18958689|gb|AAL82672.1| putative membrane protein
  misc_feature (1)..(173): Homolog of NCBI NO: 15233839 NR Description: putative protein; protein id: At4g38380.1
MSIALPAALALAADPITSLVDTAFVGHIGSAELAAVGVSVSVFNLVSKLFNVPLLNVTTSFVAEEQAIAAKDDNDSIETSKKVLPSVSTSLVLAAGVGIAEAIALSLGSDFLMDVMAIPFDSPMRIPAEQFLRLRAYGAPPIVVALAAQGAFRVAGNVLNAVLDPILIFVLGFGISGAAAATVISEYLIAFILLWKLNENVVLLSPQIKVGRANQYLKSGGLLIGRTVALLVPFTLATSLAAQNGPTQMAGHQIVLEIWLAVSLLTDALAIAAQSLLATTYSQGEYKQAREVLFGVLQVGLATGTGLAAVLFITFEPFSSLFTTDSEVLKIALSGTLFVAGSQPVNALAFVLDGLYYGVSDFGFAAYSMVIVGFISSLFMLVAAPTFGLAGIWTGLFLFMALRLVAGAWRLGTRTGPWKMLWSAPEKPE

SEQ ID NO: 85640 - DNA, 612 bp, Arabidopsis thaliana
  misc_feature (1)..(612): Ceres Seq. ID no. 12681538
  misc_feature: MA Experiment ID: 108434 Result: Down-regulated in Transcription
  misc_feature: MA Experiment 108434 PARAMETER Experiment Name: At_Root_Tips_cDNA_P Parameter: Tissue Value: Root Tips
  misc_feature: MA Experiment ID: 108464 Result: Down-regulated in Transcription
  misc_feature: MA Experiment 108464 PARAMETER Experiment Name: At_Germinating_Seeds_cDNA_P Parameter: Age (day) Value: 4 vs. 0
  misc_feature: MA Experiment 108464 PARAMETER Experiment Name: At_Germinating_Seeds_cDNA_P Parameter: Tissue Value: Germinating Seeds
  misc_feature: MA Experiment ID: 108473 Result: Up-regulated in Transcription
  misc_feature: MA Experiment 108473 PARAMETER Experiment Name: At_Drought_Flowers_cDNA_P Parameter: Timepoint (hr) Value: 7 d
  misc_feature: MA Experiment 108473 PARAMETER Experiment Name: At_Drought_Flowers_cDNA_P Parameter: Tissue Value: Flower
  misc_feature: MA Experiment 108473 PARAMETER Experiment Name: At_Drought_Flowers_cDNA_P Parameter: Treatment Value: Drought vs. No Drought
  misc_feature: MA Experiment ID: 108489 Result: Up-regulated in Transcription
  misc_feature: MA Experiment ID: 108501 Result: Up-regulated in Transcription
  misc_feature: MA Experiment 108501 PARAMETER Experiment Name: At_ap2_floral_buds_cDNA_P Parameter: Plant Line Value: ap2 (Ler.)
  misc_feature: MA Experiment 108501 PARAMETER Experiment Name: At_ap2_floral_buds_cDNA_P Parameter: Tissue Value: Closed Flower
  misc_feature: MA Experiment ID: 108572 Result: Up-regulated in Transcription
  misc_feature: MA Experiment 108572 PARAMETER Experiment Name: At_Drought_cDNA_P Parameter: Timepoint (hr) Value: 1
  misc_feature: MA Experiment 108572 PARAMETER Experiment Name: At_Drought_cDNA_P Parameter: Tissue Value: Aerial
  misc_feature: MA Experiment 108572 PARAMETER Experiment Name: At_Drought_cDNA_P Parameter: Treatment Value: Drought vs. No Drought
  misc_feature: MA Experiment ID: 108573 Result: Up-regulated in Transcription
  misc_feature: MA Experiment 108573 PARAMETER Experiment Name: At_Drought_cDNA_P Parameter: Timepoint (hr) Value: 6
  misc_feature: MA Experiment 108573 PARAMETER Experiment Name: At_Drought_cDNA_P Parameter: Tissue Value: Aerial
  misc_feature: MA Experiment 108573 PARAMETER Experiment Name: At_Drought_cDNA_P Parameter: Treatment Value: Drought vs. No Drought
  misc_feature: MA Experiment ID: 108595 Result: Up-regulated in Transcription
  misc_feature: MA Experiment 108595 PARAMETER Experiment Name: At_Ler-pi_Ovule_cDNA_P Parameter: Plant Line Value: null
  misc_feature: MA Experiment ID: 108605 Result: Up-regulated in Transcription
  misc_feature: MA Experiment 108605 PARAMETER Experiment Name: At_100uM_ABA_cDNA_P Parameter: Timepoint (hr) Value: 6
  misc_feature: MA Experiment 108605 PARAMETER Experiment Name: At_100uM_ABA_cDNA_P Parameter: Tissue Value: Aerial
  misc_feature: MA Experiment 108605 PARAMETER Experiment Name: At_100uM_ABA_cDNA_P Parameter: Treatment Value: 100uM ABA vs. No Treatment
  misc_feature: MA Experiment ID: 108607 Result: Up-regulated in Transcription
  misc_feature: MA Experiment 108607 PARAMETER Experiment Name: At_100uM_ABA_cDNA_P Parameter: Timepoint (hr) Value: 4
  misc_feature: MA Experiment 108607 PARAMETER Experiment Name: At_100uM_ABA_cDNA_P Parameter: Tissue Value: Aerial
  misc_feature: MA Experiment 108607 PARAMETER Experiment Name: At_100uM_ABA_cDNA_P Parameter: Treatment Value: 100uM ABA vs. No Treatment
  misc_feature: MA Experiment ID: 20000069 Result: Up-regulated in Transcription
  misc_feature: MA Experiment 20000069 PARAMETER Experiment Name: At_100uM_ABA_Mutants_cDNA_P Parameter: Plant Line Value: CS23
  misc_feature: MA Experiment 20000069 PARAMETER Experiment Name: At_100uM_ABA_Mutants_cDNA_P Parameter: Timepoint (hr) Value: 6
  misc_feature: MA Experiment 20000069 PARAMETER Experiment Name: At_100uM_ABA_Mutants_cDNA_P Parameter: Tissue Value: Aerial
  misc_feature: MA Experiment 20000069 PARAMETER Experiment Name: At_100uM_ABA_Mutants_cDNA_P Parameter: Treatment Value: 100uM ABA vs. No Treatment
  misc_feature: MA Experiment ID: 20000070 Result: Up-regulated in Transcription
  misc_feature: MA Experiment 20000070 PARAMETER Experiment Name: At_100uM_ABA_Mutants_cDNA_P Parameter: Plant Line Value: CS24
  misc_feature: MA Experiment 20000070 PARAMETER Experiment Name: At_100uM_ABA_Mutants_cDNA_P Parameter: Timepoint (hr) Value: 6
  misc_feature: MA Experiment 20000070 PARAMETER Experiment Name: At_100uM_ABA_Mutants_cDNA_P Parameter: Tissue Value: Aerial
  misc_feature: MA Experiment 20000070 PARAMETER Experiment Name: At_100uM_ABA_Mutants_cDNA_P Parameter: Treatment Value: 100uM ABA vs. No Treatment
  misc_feature: MA Experiment ID: 20000071 Result: Up-regulated in Transcription
  misc_feature: MA Experiment 20000071 PARAMETER Experiment Name: At_100uM_ABA_Mutants_cDNA_P Parameter: Plant Line Value: CS8104
  misc_feature: MA Experiment 20000071 PARAMETER Experiment Name: At_100uM_ABA_Mutants_cDNA_P Parameter: Timepoint (hr) Value: 6
  misc_feature: MA Experiment 20000071 PARAMETER Experiment Name: At_100uM_ABA_Mutants_cDNA_P Parameter: Tissue Value: Aerial
  misc_feature: MA Experiment 20000071 PARAMETER Experiment Name: At_100uM_ABA_Mutants_cDNA_P Parameter: Treatment Value: 100uM ABA vs. No Treatment
  misc_feature: MA Experiment ID: 20000072 Result: Up-regulated in Transcription
  misc_feature: MA Experiment 20000072 PARAMETER Experiment Name: At_100uM_ABA_Mutants_cDNA_P Parameter: Plant Line Value: CS8105
  misc_feature: MA Experiment 20000072 PARAMETER Experiment Name: At_100uM_ABA_Mutants_cDNA_P Parameter: Timepoint (hr) Value: 6
  misc_feature: MA Experiment 20000072 PARAMETER Experiment Name: At_100uM_ABA_Mutants_cDNA_P Parameter: Tissue Value: Aerial
  misc_feature: MA Experiment 20000072 PARAMETER Experiment Name: At_100uM_ABA_Mutants_cDNA_P Parameter: Treatment Value: 100uM ABA vs. No Treatment
  misc_feature: MA Experiment ID: 20000117 Result: Up-regulated in Transcription
  misc_feature: MA Experiment 20000117 PARAMETER Experiment Name: At_100uM_ABA_Mutants_cDNA_P Parameter: Plant Line Value: Columbia
  misc_feature: MA Experiment 20000117 PARAMETER Experiment Name: At_100uM_ABA_Mutants_cDNA_P Parameter: Timepoint (hr) Value: 6
  misc_feature: MA Experiment 20000117 PARAMETER Experiment Name: At_100uM_ABA_Mutants_cDNA_P Parameter: Tissue Value: Aerial
  misc_feature: MA Experiment 20000117 PARAMETER Experiment Name: At_100uM_ABA_Mutants_cDNA_P Parameter: Treatment Value: 100uM ABA vs. No Treatment
  misc_feature: MA Experiment ID: 20000169 Result: Up-regulated in Transcription
  misc_feature: MA Experiment 20000169 PARAMETER Experiment Name: At_100uM_ABA_P Parameter: Age (day) Value: 14
  misc_feature: MA Experiment 20000169 PARAMETER Experiment Name: At_100uM_ABA_P Parameter: Organism Value: A. thaliana
  misc_feature: MA Experiment 20000169 PARAMETER Experiment Name: At_100uM_ABA_P Parameter: Plant Line Value: WS
  misc_feature: MA Experiment 20000169 PARAMETER Experiment Name: At_100uM_ABA_P Parameter: Timepoint (hr) Value: 6
  misc_feature: MA Experiment 20000169 PARAMETER Experiment Name: At_100uM_ABA_P Parameter: Tissue Value: Aerial
  misc_feature: MA Experiment 20000169 PARAMETER Experiment Name: At_100uM_ABA_P Parameter: Treatment Value: 100uM ABA vs. No Treatment
  misc_feature: MA Experiment ID: 20000184 Result: Up-regulated in Transcription
  misc_feature: MA Experiment 20000184 PARAMETER Experiment Name: At_Shoots__P Parameter: Age (day) Value: 7
  misc_feature: MA Experiment 20000184 PARAMETER Experiment Name: At_Shoots__P Parameter: Tissue Value: Shoots vs. Whole Plant
  misc_feature: MA Experiment ID: 20000185 Result: Down-regulated in Transcription
  misc_feature: MA Experiment 20000185 PARAMETER Experiment Name: At_Roots__P Parameter: Age (day) Value: 7 vs. 21
  misc_feature: MA Experiment 20000185 PARAMETER Experiment Name: At_Roots__P Parameter: Organism Value: A. thaliana
  misc_feature: MA Experiment 20000185 PARAMETER Experiment Name: At_Roots__P Parameter: Tissue Value: Roots vs. Whole Plant
  misc_feature: MA Experiment ID: 20000227 Result: Down-regulated in Transcription
  misc_feature: MA Experiment 20000227 PARAMETER Experiment Name: At_Root-Tips-vs-Tops_P Parameter: Tissue Value: Root Tips vs. Root Tops
  misc_feature: MA Experiment ID: 20000264 Result: Up-regulated in Transcription
  misc_feature: MA Experiment 20000264 PARAMETER Experiment Name: At_Open_Flower_P Parameter: Age (day) Value: 21
  misc_feature: MA Experiment 20000264 PARAMETER Experiment Name: At_Open_Flower_P Parameter: Plant Line Value: WS
  misc_feature: MA Experiment 20000264 PARAMETER Experiment Name: At_Open_Flower_P Parameter: Tissue Value: Open Flower vs. Whole Plant
  misc_feature: MA Experiment ID: 20000267 Result: Up-regulated in Transcription
  misc_feature: MA Experiment 20000267 PARAMETER Experiment Name: At_Drought_P Parameter: Age (day) Value: 7
  misc_feature: MA Experiment 20000267 PARAMETER Experiment Name: At_Drought_P Parameter: Organism Value: A. thaliana
  misc_feature: MA Experiment 20000267 PARAMETER Experiment Name: At_Drought_P Parameter: Plant Line Value: WS
  misc_feature: MA Experiment 20000267 PARAMETER Experiment Name: At_Drought_P Parameter: Timepoint (hr) Value: 6
  misc_feature: MA Experiment 20000267 PARAMETER Experiment Name: At_Drought_P Parameter: Tissue Value: Whole Plant
  misc_feature: MA Experiment 20000267 PARAMETER Experiment Name: At_Drought_P Parameter: Treatment Value: Drought vs. No Drought
  misc_feature: MA Experiment ID: 20000268 Result: Up-regulated in Transcription
  misc_feature: MA Experiment 20000268 PARAMETER Experiment Name: At_100mM_NaCl__P Parameter: Age (day) Value: 14
  misc_feature: MA Experiment 20000268 PARAMETER Experiment Name: At_100mM_NaCl__P Parameter: Organism Value: A. thaliana
  misc_feature: MA Experiment 20000268 PARAMETER Experiment Name: At_100mM_NaCl__P Parameter: Plant Line Value: WS
  misc_feature: MA Experiment 20000268 PARAMETER Experiment Name: At_100mM_NaCl__P Parameter: Timepoint (hr) Value: 6
  misc_feature: MA Experiment 20000268 PARAMETER Experiment Name: At_100mM_NaCl__P Parameter: Tissue Value: Whole Plant
  misc_feature: MA Experiment 20000268 PARAMETER Experiment Name: At_100mM_NaCl__P Parameter: Treatment Value: 100mM NaCl vs. No Treatment
  misc_feature: MA Experiment ID: 20000308 Result: Up-regulated in Transcription
  misc_feature: MA Experiment 20000308 PARAMETER Experiment Name: At_100mM_NaCl__P Parameter: Age (day) Value: 17
  misc_feature: MA Experiment 20000308 PARAMETER Experiment Name: At_100mM_NaCl__P Parameter: Organism Value: A. thaliana
  misc_feature: MA Experiment 20000308 PARAMETER Experiment Name: At_100mM_NaCl__P Parameter: Plant Line Value: WS
  misc_feature: MA Experiment 20000308 PARAMETER Experiment Name: At_100mM_NaCl__P Parameter: Timepoint (hr) Value: 72
  misc_feature: MA Experiment 20000308 PARAMETER Experiment Name: At_100mM_NaCl__P Parameter: Tissue Value: Whole Plant
  misc_feature: MA Experiment 20000308 PARAMETER Experiment Name: At_100mM_NaCl__P Parameter: Treatment Value: 100mM NaCl vs. No Treatment
  misc_feature: MA Experiment ID: 20000436 Result: Up-regulated in Transcription
  misc_feature: MA Experiment 20000436 PARAMETER Experiment Name: At_Drought_P Parameter: Age (day) Value: 7
  misc_feature: MA Experiment 20000436 PARAMETER Experiment Name: At_Drought_P Parameter: Organism Value: A. thaliana
  misc_feature: MA Experiment 20000436 PARAMETER Experiment Name: At_Drought_P Parameter: Plant Line Value: WS
  misc_feature: MA Experiment 20000436 PARAMETER Experiment Name: At_Drought_P Parameter: Timepoint (hr) Value: 12
  misc_feature: MA Experiment 20000436 PARAMETER Experiment Name: At_Drought_P Parameter: Tissue Value: Whole Plant
  misc_feature: MA Experiment 20000436 PARAMETER Experiment Name: At_Drought_P Parameter: Treatment Value: Drought vs. No Drought
  misc_feature: MA Experiment ID: 20000437 Result: Up-regulated in Transcription
  misc_feature: MA Experiment 20000437 PARAMETER Experiment Name: At_Drought_P Parameter: Age (day) Value: 8
  misc_feature: MA Experiment 20000437 PARAMETER Experiment Name: At_Drought_P Parameter: Organism Value: A. thaliana
  misc_feature: MA Experiment 20000437 PARAMETER Experiment Name: At_Drought_P Parameter: Plant Line Value: WS
  misc_feature: MA Experiment 20000437 PARAMETER Experiment Name: At_Drought_P Parameter: Timepoint (hr) Value: 24
  misc_feature: MA Experiment 20000437 PARAMETER Experiment Name: At_Drought_P Parameter: Tissue Value: Whole Plant
  misc_feature: MA Experiment 20000437 PARAMETER Experiment Name: At_Drought_P Parameter: Treatment Value: Drought vs. No Drought
  misc_feature: MA Experiment ID: 20000438 Result: Up-regulated in Transcription
  misc_feature: MA Experiment 20000438 PARAMETER Experiment Name: At_Shoots__P Parameter: Age (day) Value: 14
  misc_feature: MA Experiment 20000438 PARAMETER Experiment Name: At_Shoots__P Parameter: Tissue Value: Shoots vs. Whole Plant
  misc_feature: MA Experiment ID: 20000453 Result: Up-regulated in Transcription
  misc_feature: MA Experiment 20000453 PARAMETER Experiment Name: At_100uM_ABA_P Parameter: Age (day) Value: 15
  misc_feature: MA Experiment 20000453 PARAMETER Experiment Name: At_100uM_ABA_P Parameter: Organism Value: A. thaliana
  misc_feature: MA Experiment 20000453 PARAMETER Experiment Name: At_100uM_ABA_P Parameter: Plant Line Value: WS
  misc_feature: MA Experiment 20000453 PARAMETER Experiment Name: At_100uM_ABA_P Parameter: Timepoint (hr) Value: 24
  misc_feature: MA Experiment 20000453 PARAMETER Experiment Name: At_100uM_ABA_P Parameter: Tissue Value: Aerial
  misc_feature: MA Experiment 20000453 PARAMETER Experiment Name: At_100uM_ABA_P Parameter: Treatment Value: 100uM ABA vs. No Treatment
  misc_feature: MA Experiment ID: 20000455 Result: Up-regulated in Transcription
  misc_feature: MA Experiment 20000455 PARAMETER Experiment Name: At_100uM_ABA_P Parameter: Age (day) Value: 16
  misc_feature: MA Experiment 20000455 PARAMETER Experiment Name: At_100uM_ABA_P Parameter: Organism Value: A. thaliana
  misc_feature: MA Experiment 20000455 PARAMETER Experiment Name: At_100uM_ABA_P Parameter: Plant Line Value: WS
  misc_feature: MA Experiment 20000455 PARAMETER Experiment Name: At_100uM_ABA_P Parameter: Timepoint (hr) Value: 48
  misc_feature: MA Experiment 20000455 PARAMETER Experiment Name: At_100uM_ABA_P Parameter: Tissue Value: Aerial
  misc_feature: MA Experiment 20000455 PARAMETER Experiment Name: At_100uM_ABA_P Parameter: Treatment Value: 100uM ABA vs. No Treatment
  misc_feature: MA Experiment ID: 20000460 Result: Up-regulated in Transcription
  misc_feature: MA Experiment 20000460 PARAMETER Experiment Name: At_10percent_PEG_P Parameter: Age (day) Value: 12
  misc_feature: MA Experiment 20000460 PARAMETER Experiment Name: At_10percent_PEG_P Parameter: Organism Value: A. thaliana
  misc_feature: MA Experiment 20000460 PARAMETER Experiment Name: At_10percent_PEG_P Parameter: Plant Line Value: WS
  misc_feature: MA Experiment 20000460 PARAMETER Experiment Name: At_10percent_PEG_P Parameter: Timepoint (day) Value: 12
  misc_feature: MA Experiment 20000460 PARAMETER Experiment Name: At_10percent_PEG_P Parameter: Tissue Value: Whole Plant
  misc_feature: MA Experiment 20000460 PARAMETER Experiment Name: At_10percent_PEG_P Parameter: Treatment Value: 10percent PEG vs. No Treatment
  misc_feature: MA Experiment ID: 20000506 Result: Up-regulated in Transcription
  misc_feature: MA Experiment 20000506 PARAMETER Experiment Name: At_Wounding_P Parameter: Organism Value: A. thaliana
  misc_feature: MA Experiment 20000506 PARAMETER Experiment Name: At_Wounding_P Parameter: Plant Line Value: WS
  misc_feature: MA Experiment 20000506 PARAMETER Experiment Name: At_Wounding_P Parameter: Timepoint (hr) Value: 6
  misc_feature: MA Experiment 20000506 PARAMETER Experiment Name: At_Wounding_P Parameter: Tissue Value: Aerial
  misc_feature: MA Experiment 20000506 PARAMETER Experiment Name: At_Wounding_P Parameter: Treatment Value: Wounding vs. No Wounding
  misc_feature: MA Experiment ID: 20000573 Result: Down-regulated in Transcription
  misc_feature: MA Experiment 20000573 PARAMETER Experiment Name: At_100uM_ABA_Mutants__P Parameter: Organism Value: A. thaliana
  misc_feature: MA Experiment 20000573 PARAMETER Experiment Name: At_100uM_ABA_Mutants__P Parameter: Plant Line Value: CS22 vs. Ler wt
  misc_feature: MA Experiment 20000573 PARAMETER Experiment Name: At_100uM_ABA_Mutants__P Parameter: Timepoint (hr) Value: N/A
  misc_feature: MA Experiment 20000573 PARAMETER Experiment Name: At_100uM_ABA_Mutants__P Parameter: Tissue Value: Whole Plant
  misc_feature: MA Experiment 20000573 PARAMETER Experiment Name: At_100uM_ABA_Mutants__P Parameter: Treatment Value: None
  misc_feature: MA Experiment ID: 20001450 Result: Up-regulated in Transcription
  misc_feature: MA Experiment 20001450 PARAMETER Experiment Name: At_Far-red-induction_P Parameter: Age (day) Value: 7
  misc_feature: MA Experiment 20001450 PARAMETER Experiment Name: At_Far-red-induction_P Parameter: Light Value: Far-red vs. White
  misc_feature: MA Experiment 20001450 PARAMETER Experiment Name: At_Far-red-induction_P Parameter: Organism Value: A. thaliana
  misc_feature: MA Experiment 20001450 PARAMETER Experiment Name: At_Far-red-induction_P Parameter: Plant Line Value: Columbia
  misc_feature: MA Experiment 20001450 PARAMETER Experiment Name: At_Far-red-induction_P Parameter: Timepoint (hr) Value: 8
  misc_feature: MA Experiment 20001450 PARAMETER Experiment Name: At_Far-red-induction_P Parameter: Tissue Value: Whole Plant
  misc_feature: MA Experiment ID: 20001451 Result: Up-regulated in Transcription
  misc_feature: MA Experiment 20001451 PARAMETER Experiment Name: At_Far-red-induction_P Parameter: Age (day) Value: 7
  misc_feature: MA Experiment 20001451 PARAMETER Experiment Name: At_Far-red-induction_P Parameter: Light Value: Far-red vs. White
  misc_feature: MA Experiment 20001451 PARAMETER Experiment Name: At_Far-red-induction_P Parameter: Organism Value: A. thaliana
  misc_feature: MA Experiment 20001451 PARAMETER Experiment Name: At_Far-red-induction_P Parameter: Plant Line Value: Columbia
  misc_feature: MA Experiment 20001451 PARAMETER Experiment Name: At_Far-red-induction_P Parameter: Timepoint (hr) Value: 24
  misc_feature: MA Experiment 20001451 PARAMETER Experiment Name: At_Far-red-induction_P Parameter: Tissue Value: Whole Plant
  misc_feature: MA Experiment ID: 20001554 Result: Up-regulated in Transcription
  misc_feature: MA Experiment 20001554 PARAMETER Experiment Name: At_Drought_Soil_Dry_P Parameter: Age (day) Value: 21
  misc_feature: MA Experiment 20001554 PARAMETER Experiment Name: At_Drought_Soil_Dry_P Parameter: Organism Value: A. thaliana
  misc_feature: MA Experiment 20001554 PARAMETER Experiment Name: At_Drought_Soil_Dry_P Parameter: Plant Line Value: WS
  misc_feature: MA Experiment 20001554 PARAMETER Experiment Name: At_Drought_Soil_Dry_P Parameter: Post Timepoint (hr) Value: None
  misc_feature: MA Experiment 20001554 PARAMETER Experiment Name: At_Drought_Soil_Dry_P Parameter: Post-Treatment Value: None
  misc_feature: MA Experiment 20001554 PARAMETER Experiment Name: At_Drought_Soil_Dry_P Parameter: Timepoint (day) Value: 7
  misc_feature: MA Experiment 20001554 PARAMETER Experiment Name: At_Drought_Soil_Dry_P Parameter: Treatment Value: Drought vs. No Drought
  misc_feature: MA Experiment ID: 20001555 Result: Up-regulated in Transcription
  misc_feature: MA Experiment 20001555 PARAMETER Experiment Name: At_Drought_Soil_Dry_P Parameter: Age (day) Value: 24
  misc_feature: MA Experiment 20001555 PARAMETER Experiment Name: At_Drought_Soil_Dry_P Parameter: Organism Value: A. thaliana
  misc_feature: MA Experiment 20001555 PARAMETER Experiment Name: At_Drought_Soil_Dry_P Parameter: Plant Line Value: WS
  misc_feature: MA Experiment 20001555 PARAMETER Experiment Name: At_Drought_Soil_Dry_P Parameter: Post Timepoint (hr) Value: None
  misc_feature: MA Experiment 20001555 PARAMETER Experiment Name: At_Drought_Soil_Dry_P Parameter: Post-Treatment Value: None
  misc_feature: MA Experiment 20001555 PARAMETER Experiment Name: At_Drought_Soil_Dry_P Parameter: Timepoint (day) Value: 10
  misc_feature: MA Experiment 20001555 PARAMETER Experiment Name: At_Drought_Soil_Dry_P Parameter: Treatment Value: Drought vs. No Drought
  misc_feature: MA Experiment ID: 20001556 Result: Up-regulated in Transcription
  misc_feature: MA Experiment 20001556 PARAMETER Experiment Name: At_Drought_Soil_Dry_P Parameter: Age (day) Value: 26
  misc_feature: MA Experiment 20001556 PARAMETER Experiment Name: At_Drought_Soil_Dry_P Parameter: Organism Value: A. thaliana
  misc_feature: MA Experiment 20001556 PARAMETER Experiment Name: At_Drought_Soil_Dry_P Parameter: Plant Line Value: WS
  misc_feature: MA Experiment 20001556 PARAMETER Experiment Name: At_Drought_Soil_Dry_P Parameter: Post Timepoint (hr) Value: None
  misc_feature: MA Experiment 20001556 PARAMETER Experiment Name: At_Drought_Soil_Dry_P Parameter: Post-Treatment Value: None
  misc_feature: MA Experiment 20001556 PARAMETER Experiment Name: At_Drought_Soil_Dry_P Parameter: Timepoint (day) Value: 12
  misc_feature: MA Experiment 20001556 PARAMETER Experiment Name: At_Drought_Soil_Dry_P Parameter: Treatment Value: Drought vs. No Drought
  misc_feature: MA Experiment ID: 20001559 Result: Up-regulated in Transcription
  misc_feature: MA Experiment 20001559 PARAMETER Experiment Name: At_Drought_Soil_Dry_P Parameter: Age (day) Value: 28
  misc_feature: MA Experiment 20001559 PARAMETER Experiment Name: At_Drought_Soil_Dry_P Parameter: Organism Value: A. thaliana
  misc_feature: MA Experiment 20001559 PARAMETER Experiment Name: At_Drought_Soil_Dry_P Parameter: Plant Line Value: WS
  misc_feature: MA Experiment 20001559 PARAMETER Experiment Name: At_Drought_Soil_Dry_P Parameter: Post Timepoint (hr) Value: 29
  misc_feature: MA Experiment 20001559 PARAMETER Experiment Name: At_Drought_Soil_Dry_P Parameter: Post-Treatment Value: Re-Water vs. No Drought
  misc_feature: MA Experiment 20001559 PARAMETER Experiment Name: At_Drought_Soil_Dry_P Parameter: Timepoint (day) Value: 14
  misc_feature: MA Experiment 20001559 PARAMETER Experiment Name: At_Drought_Soil_Dry_P Parameter: Treatment Value: Drought vs. No Drought
  misc_feature: MA Experiment ID: 20001560 Result: Up-regulated in Transcription
  misc_feature: MA Experiment 20001560 PARAMETER Experiment Name: At_Drought_Soil_Dry_P Parameter: Age (day) Value: 28
  misc_feature: MA Experiment 20001560 PARAMETER Experiment Name: At_Drought_Soil_Dry_P Parameter: Organism Value: A. thaliana
  misc_feature: MA Experiment 20001560 PARAMETER Experiment Name: At_Drought_Soil_Dry_P Parameter: Plant Line Value: WS
  misc_feature: MA Experiment 20001560 PARAMETER Experiment Name: At_Drought_Soil_Dry_P Parameter: Post Timepoint (hr) Value: None
  misc_feature: MA Experiment 20001560 PARAMETER Experiment Name: At_Drought_Soil_Dry_P Parameter: Post-Treatment Value: None
  misc_feature: MA Experiment 20001560 PARAMETER Experiment Name: At_Drought_Soil_Dry_P Parameter: Timepoint (day) Value: 14
  misc_feature: MA Experiment 20001560 PARAMETER Experiment Name: At_Drought_Soil_Dry_P Parameter: Treatment Value: Drought vs. No Drought
  misc_feature: MA Experiment ID: 20001772 Result: Up-regulated in Transcription
  misc_feature: MA Experiment 20001772 PARAMETER Experiment Name: At_Far-red-enriched-adult_P Parameter: Age (day) Value: 29
  misc_feature: MA Experiment 20001772 PARAMETER Experiment Name: At_Far-red-enriched-adult_P Parameter: Light Value: Far-red enriched vs. White
  misc_feature: MA Experiment 20001772 PARAMETER Experiment Name: At_Far-red-enriched-adult_P Parameter: Organism Value: A. thaliana
  misc_feature: MA Experiment 20001772 PARAMETER Experiment Name: At_Far-red-enriched-adult_P Parameter: Plant Line Value: Columbia
  misc_feature: MA Experiment 20001772 PARAMETER Experiment Name: At_Far-red-enriched-adult_P Parameter: Timepoint (hr) Value: 24
  misc_feature: MA Experiment 20001772 PARAMETER Experiment Name: At_Far-red-enriched-adult_P Parameter: Tissue Value: Aerial
  misc_feature: MA Experiment ID: 20001904 Result: Up-regulated in Transcription
  misc_feature: MA Experiment 20001904 PARAMETER Experiment Name: At_Drought_Reproduction_P Parameter: Age (day) Value: 37
  misc_feature: MA Experiment 20001904 PARAMETER Experiment Name: At_Drought_Reproduction_P Parameter: Organism Value: A. thaliana
  misc_feature: MA Experiment 20001904 PARAMETER Experiment Name: At_Drought_Reproduction_P Parameter: Plant Line Value: WS
  misc_feature: MA Experiment 20001904 PARAMETER Experiment Name: At_Drought_Reproduction_P Parameter: Timepoint (day) Value: 7
  misc_feature: MA Experiment 20001904 PARAMETER Experiment Name: At_Drought_Reproduction_P Parameter: Tissue Value: Rosettes
  misc_feature: MA Experiment 20001904 PARAMETER Experiment Name: At_Drought_Reproduction_P Parameter: Treatment Value: Drought vs. No Drought
  misc_feature: MA Experiment ID: 20001905 Result: Up-regulated in Transcription
  misc_feature: MA Experiment 20001905 PARAMETER Experiment Name: At_Drought_Reproduction_P Parameter: Age (day) Value: 40
  misc_feature: MA Experiment 20001905 PARAMETER Experiment Name: At_Drought_Reproduction_P Parameter: Organism Value: A. thaliana
  misc_feature: MA Experiment 20001905 PARAMETER Experiment Name: At_Drought_Reproduction_P Parameter: Plant Line Value: WS
  misc_feature: MA Experiment 20001905 PARAMETER Experiment Name: At_Drought_Reproduction_P Parameter: Timepoint (day) Value: 10
  misc_feature: MA Experiment 20001905 PARAMETER Experiment Name: At_Drought_Reproduction_P Parameter: Tissue Value: Rosettes
  misc_feature: MA Experiment 20001905 PARAMETER Experiment Name: At_Drought_Reproduction_P Parameter: Treatment Value: Drought vs. No Drought
  misc_feature: MA Experiment ID: 20001908 Result: Up-regulated in Transcription
  misc_feature: MA Experiment 20001908 PARAMETER Experiment Name: At_Drought_Reproduction_P Parameter: Age (day) Value: 40
  misc_feature: MA Experiment 20001908 PARAMETER Experiment Name: At_Drought_Reproduction_P Parameter: Organism Value: A. thaliana
  misc_feature: MA Experiment 20001908 PARAMETER Experiment Name: At_Drought_Reproduction_P Parameter: Plant Line Value: WS
  misc_feature: MA Experiment 20001908 PARAMETER Experiment Name: At_Drought_Reproduction_P Parameter: Timepoint (day) Value: 10
  misc_feature: MA Experiment 20001908 PARAMETER Experiment Name: At_Drought_Reproduction_P Parameter: Tissue Value: Siliques
  misc_feature: MA Experiment 20001908 PARAMETER Experiment Name: At_Drought_Reproduction_P Parameter: Treatment Value: Drought vs. No Drought
  misc_feature: MA Experiment ID: 20001910 Result: Up-regulated in Transcription
  misc_feature: MA Experiment 20001910 PARAMETER Experiment Name: At_Drought_Reproduction_P Parameter: Age (day) Value: 37
  misc_feature: MA Experiment 20001910 PARAMETER Experiment Name: At_Drought_Reproduction_P Parameter: Organism Value: A. thaliana
  misc_feature: MA Experiment 20001910 PARAMETER Experiment Name: At_Drought_Reproduction_P Parameter: Plant Line Value: WS
  misc_feature: MA Experiment 20001910 PARAMETER Experiment Name: At_Drought_Reproduction_P Parameter: Timepoint (day) Value: 7
  misc_feature: MA Experiment 20001910 PARAMETER Experiment Name: At_Drought_Reproduction_P Parameter: Tissue Value: Flowers
  misc_feature: MA Experiment 20001910 PARAMETER Experiment Name: At_Drought_Reproduction_P Parameter: Treatment Value: Drought vs. No Drought
atcatccatcacatctcctcttgcaaaccaacgtaaaacactaactaagagatcaatatggctggagtgatgaagttggcatgcatggtcttggcttgcatgattgtggccggtccaatcacagcgaacgcgcttatgagttgtggcaccgtcaacggcaacctggcagggtgcattgcctacttgacccgaggtgctccacttacccaagggtgctgcaacggcgttactaaccttaaaaacatggccagtacaaccccagaccgtcagcaagcttgccgttgccttcaatctgccgctaaagccgttggtcccggtctcaacactgcccgtgcagctggacttcctagcgcatgcaaagtcaatattccttacaaaatcagcgccagcaccaactgcaacaccgtgaggtgatgagcgacggtcaaatgaagctactagcggatgtttcgaatattatataatcgatgagataatattaaataaagatgttcgaatggctgtactcttttcaatttcctgtctttttttatcgtggcgtttctattatgtgatcgtctgtactatgttcgcaaacaacgttctttgaatttcagacttgaagtttaagtt

SEQ ID NO: 85641 - protein, 118 aa, Arabidopsis thaliana; identical to SEQ ID NO: 30562
  peptide (1)..(118): Ceres Seq. ID no. 12681539
  misc_feature (29)..(114): Pfam Name: Protease inhibitor/seed storage/LTP family Pfam Description: Protease inhibitor/seed storage/LTP family
  misc_feature (1)..(118): Homolog of NCBI NO: 15224898 NR Description: putative nonspecific lipid-transfer protein; id: At2g38530.1, supported by cDNA: 18328., supported by cDNA:
  misc_feature (1)..(118): Homolog of NCBI NO: 2497735 NR Description: NONSPECIFIC LIPID-TRANSFER PROTEIN 1 PRECURSOR
  misc_feature (1)..(118): Homolog of NCBI NO: 2497736 NR Description: NONSPECIFIC LIPID-TRANSFER PROTEIN 2 PRECURSOR
  misc_feature (1)..(118): Homolog of NCBI NO: 2497739 NR Description: NONSPECIFIC LIPID-TRANSFER PROTEIN B PRECURSOR
  misc_feature (1)..(118): Homolog of NCBI NO: 11273805 NR Description: lipid transfer protein [imported] - wild cabbage
  misc_feature (1)..(118): Homolog of NCBI NO: 15224899 NR Description: putative nonspecific lipid-transfer protein; id: At2g38540.1, supported by cDNA: gi_15146309, supported by
  misc_feature (1)..(118): Homolog of NCBI NO: 2497737 NR Description: NONSPECIFIC LIPID-TRANSFER PROTEIN 3 PRECURSOR
  misc_feature (1)..(118): Homolog of NCBI NO: 2497738 NR Description: NONSPECIFIC LIPID-TRANSFER PROTEIN A PRECURSOR
  misc_feature (1)..(118): Homolog of NCBI NO: 5777389 NR Description: non-specific lipid transfer protein [Brassica
  misc_feature (1)..(118): Homolog of NCBI NO: 2497740 NR Description: Nonspecific lipid-transfer protein D precursor

SEQ ID NO: 85642 - protein, 114 aa, Arabidopsis thaliana; identical to SEQ ID NO: 30563
  peptide (1)..(114): Ceres Seq. ID no. 12681540
  misc_feature (25)..(110): Pfam Name: Protease inhibitor/seed storage/LTP family Pfam Description: Protease inhibitor/seed storage/LTP family
  misc_feature (1)..(114): Homolog of NCBI NO: 15224898 NR Description: putative nonspecific lipid-transfer protein; id: At2g38530.1, supported by cDNA: 18328., supported by cDNA:
  misc_feature (1)..(114): Homolog of NCBI NO: 2497735 NR Description: NONSPECIFIC LIPID-TRANSFER PROTEIN 1 PRECURSOR
  misc_feature (1)..(114): Homolog of NCBI NO: 2497736 NR Description: NONSPECIFIC LIPID-TRANSFER PROTEIN 2 PRECURSOR
  misc_feature (1)..(114): Homolog of NCBI NO: 2497739 NR Description: NONSPECIFIC LIPID-TRANSFER PROTEIN B PRECURSOR
  misc_feature (1)..(114): Homolog of NCBI NO: 11273805 NR Description: lipid transfer protein [imported] - wild cabbage
  misc_feature (1)..(114): Homolog of NCBI NO: 15224899 NR Description: putative nonspecific lipid-transfer protein; id: At2g38540.1, supported by cDNA: gi_15146309, supported by
  misc_feature (1)..(114): Homolog of NCBI NO: 2497737 NR Description: NONSPECIFIC LIPID-TRANSFER PROTEIN 3 PRECURSOR
  misc_feature (1)..(114): Homolog of NCBI NO: 2497738 NR Description: NONSPECIFIC LIPID-TRANSFER PROTEIN A PRECURSOR
  misc_feature (1)..(114): Homolog of NCBI NO: 5777389 NR Description: non-specific lipid transfer protein [Brassica
  misc_feature (1)..(114): Homolog of NCBI NO: 2497740 NR Description: Nonspecific lipid-transfer protein D precursor

SEQ ID NO: 85643 - protein, 109 aa, Arabidopsis thaliana; identical to SEQ ID NO: 30564
  peptide (1)..(109): Ceres Seq. ID no. 12681541
  misc_feature (20)..(105): Pfam Name: Protease inhibitor/seed storage/LTP family Pfam Description: Protease inhibitor/seed storage/LTP family
  misc_feature (1)..(109): Homolog of NCBI NO: 15224898 NR Description: putative nonspecific lipid-transfer protein; id: At2g38530.1, supported by cDNA: 18328., supported by cDNA:
  misc_feature (1)..(109): Homolog of NCBI NO: 2497735 NR Description: NONSPECIFIC LIPID-TRANSFER PROTEIN 1 PRECURSOR
  misc_feature (1)..(109): Homolog of NCBI NO: 2497736 NR Description: NONSPECIFIC LIPID-TRANSFER PROTEIN 2 PRECURSOR
  misc_feature (1)..(109): Homolog of NCBI NO: 2497739 NR Description: NONSPECIFIC LIPID-TRANSFER PROTEIN B PRECURSOR
  misc_feature (1)..(109): Homolog of NCBI NO: 11273805 NR Description: lipid transfer protein [imported] - wild cabbage
  misc_feature (1)..(109): Homolog of NCBI NO: 15224899 NR Description: putative nonspecific lipid-transfer protein; id: At2g38540.1, supported by cDNA: gi_15146309, supported by
  misc_feature (1)..(109): Homolog of NCBI NO: 2497737 NR Description: NONSPECIFIC LIPID-TRANSFER PROTEIN 3 PRECURSOR
  misc_feature (1)..(109): Homolog of NCBI NO: 2497738 NR Description: NONSPECIFIC LIPID-TRANSFER PROTEIN A PRECURSOR
  misc_feature (1)..(109): Homolog of NCBI NO: 5777389 NR Description: non-specific lipid transfer protein [Brassica
  misc_feature (1)..(109): Homolog of NCBI NO: 2497740 NR Description: Nonspecific lipid-transfer protein D precursor

SEQ ID NO: 85644 - DNA, 1031 bp, Arabidopsis thaliana
  misc_feature (1)..(1031): Ceres Seq. ID no. 12681550
  misc_feature: MA Experiment ID: 108461 Result: Up-regulated in Transcription
  misc_feature: MA Experiment 108461 PARAMETER Experiment Name: At_Germinating_Seeds_cDNA_P Parameter: Age (day) Value: 1 vs. 0
  misc_feature: MA Experiment 108461 PARAMETER Experiment Name: At_Germinating_Seeds_cDNA_P Parameter: Tissue Value: Germinating Seeds
  misc_feature: MA Experiment ID: 108462 Result: Up-regulated in Transcription
  misc_feature: MA Experiment 108462 PARAMETER Experiment Name: At_Germinating_Seeds_cDNA_P Parameter: Age (day) Value: 2 vs. 0
  misc_feature: MA Experiment 108462 PARAMETER Experiment Name: At_Germinating_Seeds_cDNA_P Parameter: Tissue Value: Germinating Seeds
  misc_feature: MA Experiment ID: 108463 Result: Up-regulated in Transcription
  misc_feature: MA Experiment 108463 PARAMETER Experiment Name: At_Germinating_Seeds_cDNA_P Parameter: Age (day) Value: 3 vs. 0
  misc_feature: MA Experiment 108463 PARAMETER Experiment Name: At_Germinating_Seeds_cDNA_P Parameter: Tissue Value: Germinating Seeds
  misc_feature: MA Experiment ID: 108464 Result: Up-regulated in Transcription
  misc_feature: MA Experiment 108464 PARAMETER Experiment Name: At_Germinating_Seeds_cDNA_P Parameter: Age (day) Value: 4 vs. 0
  misc_feature: MA Experiment 108464 PARAMETER Experiment Name: At_Germinating_Seeds_cDNA_P Parameter: Tissue Value: Germinating Seeds
  misc_feature: MA Experiment ID: 108473 Result: Down-regulated in Transcription
  misc_feature: MA Experiment 108473 PARAMETER Experiment Name: At_Drought_Flowers_cDNA_P Parameter: Timepoint (hr) Value: 7 d
  misc_feature: MA Experiment 108473 PARAMETER Experiment Name: At_Drought_Flowers_cDNA_P Parameter: Tissue Value: Flower
  misc_feature: MA Experiment 108473 PARAMETER Experiment Name: At_Drought_Flowers_cDNA_P Parameter: Treatment Value: Drought vs. No Drought
  misc_feature: MA Experiment ID: 108561 Result: Down-regulated in Transcription
  misc_feature: MA Experiment 108561 PARAMETER Experiment Name: At_100uM_ABA_cDNA_P Parameter: Timepoint (hr) Value: 6
  misc_feature: MA Experiment 108561 PARAMETER Experiment Name: At_100uM_ABA_cDNA_P Parameter: Tissue Value: Aerial
  misc_feature: MA Experiment 108561 PARAMETER Experiment Name: At_100uM_ABA_cDNA_P Parameter: Treatment Value: 100uM ABA vs. No Treatment
  misc_feature: MA Experiment ID: 108572 Result: Down-regulated in Transcription
  misc_feature: MA Experiment 108572 PARAMETER Experiment Name: At_Drought_cDNA_P Parameter: Timepoint (hr) Value: 1
  misc_feature: MA Experiment 108572 PARAMETER Experiment Name: At_Drought_cDNA_P Parameter: Tissue Value: Aerial
  misc_feature: MA Experiment 108572 PARAMETER Experiment Name: At_Drought_cDNA_P Parameter: Treatment Value: Drought vs. No Drought
  misc_feature: MA Experiment ID: 108576 Result: Down-regulated in Transcription
  misc_feature: MA Experiment 108576 PARAMETER Experiment Name: At_42deg_Heat_cDNA_P Parameter: Temperature (deg C) Value: 42 vs. 22
  misc_feature: MA Experiment 108576 PARAMETER Experiment Name: At_42deg_Heat_cDNA_P Parameter: Timepoint (hr) Value: 1
  misc_feature: MA Experiment 108576 PARAMETER Experiment Name: At_42deg_Heat_cDNA_P Parameter: Tissue Value: Aerial
  misc_feature: MA Experiment ID: 108595 Result: Down-regulated in Transcription
  misc_feature: MA Experiment 108595 PARAMETER Experiment Name: At_Ler-pi_Ovule_cDNA_P Parameter: Plant Line Value: null
  misc_feature: MA Experiment ID: 108607 Result: Down-regulated in Transcription
  misc_feature: MA Experiment 108607 PARAMETER Experiment Name: At_100uM_ABA_cDNA_P Parameter: Timepoint (hr) Value: 4
  misc_feature: MA Experiment 108607 PARAMETER Experiment Name: At_100uM_ABA_cDNA_P Parameter: Tissue Value: Aerial
  misc_feature: MA Experiment 108607 PARAMETER Experiment Name: At_100uM_ABA_cDNA_P Parameter: Treatment Value: 100uM ABA vs. No Treatment
  misc_feature: MA Experiment ID: 108608 Result: Down-regulated in Transcription
  misc_feature: MA Experiment 108608 PARAMETER Experiment Name: At_100uM_ABA_cDNA_P Parameter: Timepoint (hr) Value: 1
  misc_feature: MA Experiment 108608 PARAMETER Experiment Name: At_100uM_ABA_cDNA_P Parameter: Tissue Value: Aerial
  misc_feature: MA Experiment 108608 PARAMETER Experiment Name: At_100uM_ABA_cDNA_P Parameter: Treatment Value: 100uM ABA vs. No Treatment
  misc_feature: MA Experiment ID: 108668 Result: Down-regulated in Transcription
  misc_feature: MA Experiment 108668 PARAMETER Experiment Name: At_2mM_SA_cDNA_P Parameter: Plant Line Value: WS
  misc_feature: MA Experiment 108668 PARAMETER Experiment Name: At_2mM_SA_cDNA_P Parameter: Timepoint (hr) Value: 6
  misc_feature: MA Experiment 108668 PARAMETER Experiment Name: At_2mM_SA_cDNA_P Parameter: Treatment Value: 2mM SA vs. No Treatment
  misc_feature: MA Experiment ID: 20000069 Result: Down-regulated in Transcription
  misc_feature: MA Experiment 20000069 PARAMETER Experiment Name: At_100uM_ABA_Mutants_cDNA_P Parameter: Plant Line Value: CS23
  misc_feature: MA Experiment 20000069 PARAMETER Experiment Name: At_100uM_ABA_Mutants_cDNA_P Parameter: Timepoint (hr) Value: 6
  misc_feature: MA Experiment 20000069 PARAMETER Experiment Name: At_100uM_ABA_Mutants_cDNA_P Parameter: Tissue Value: Aerial
  misc_feature: MA Experiment 20000069 PARAMETER Experiment Name: At_100uM_ABA_Mutants_cDNA_P Parameter: Treatment Value: 100uM ABA vs. No Treatment
  misc_feature: MA Experiment ID: 20000070 Result: Down-regulated in Transcription
  misc_feature: MA Experiment 20000070 PARAMETER Experiment Name: At_100uM_ABA_Mutants_cDNA_P Parameter: Plant Line Value: CS24
  misc_feature: MA Experiment 20000070 PARAMETER Experiment Name: At_100uM_ABA_Mutants_cDNA_P Parameter: Timepoint (hr) Value: 6
  misc_feature: MA Experiment 20000070 PARAMETER Experiment Name: At_100uM_ABA_Mutants_cDNA_P Parameter: Tissue Value: Aerial
  misc_feature: MA Experiment 20000070 PARAMETER Experiment Name: At_100uM_ABA_Mutants_cDNA_P Parameter: Treatment Value: 100uM ABA vs. No Treatment
  misc_feature: MA Experiment ID: 20000071 Result: Down-regulated in Transcription
  misc_feature: MA Experiment 20000071 PARAMETER Experiment Name: At_100uM_ABA_Mutants_cDNA_P Parameter: Plant Line Value: CS8104
  misc_feature: MA Experiment 20000071 PARAMETER Experiment Name: At_100uM_ABA_Mutants_cDNA_P Parameter: Timepoint (hr) Value: 6
  misc_feature: MA Experiment 20000071 PARAMETER Experiment Name: At_100uM_ABA_Mutants_cDNA_P Parameter: Tissue Value: Aerial
  misc_feature: MA Experiment 20000071 PARAMETER Experiment Name: At_100uM_ABA_Mutants_cDNA_P Parameter: Treatment Value: 100uM ABA vs. No Treatment
  misc_feature: MA Experiment ID: 20000072 Result: Down-regulated in Transcription
  misc_feature: MA Experiment 20000072 PARAMETER Experiment Name: At_100uM_ABA_Mutants_cDNA_P Parameter: Plant Line Value: CS8105
  misc_feature: MA Experiment 20000072 PARAMETER Experiment Name: At_100uM_ABA_Mutants_cDNA_P Parameter: Timepoint (hr) Value: 6
  misc_feature: MA Experiment 20000072 PARAMETER Experiment Name: At_100uM_ABA_Mutants_cDNA_P Parameter: Tissue Value: Aerial
  misc_feature: MA Experiment 20000072 PARAMETER Experiment Name: At_100uM_ABA_Mutants_cDNA_P Parameter: Treatment Value: 100uM ABA vs. No Treatment
  misc_feature: MA Experiment ID: 20000086 Result: Down-regulated in Transcription
  misc_feature: MA Experiment 20000086 PARAMETER Experiment Name: At_100uM_ABA_Mutants_cDNA_P Parameter: Plant Line Value: CS22
  misc_feature: MA Experiment 20000086 PARAMETER Experiment Name: At_100uM_ABA_Mutants_cDNA_P Parameter: Timepoint (hr) Value: 6
  misc_feature: MA Experiment 20000086 PARAMETER Experiment Name: At_100uM_ABA_Mutants_cDNA_P Parameter: Tissue Value: Aerial
  misc_feature: MA Experiment 20000086 PARAMETER Experiment Name: At_100uM_ABA_Mutants_cDNA_P Parameter: Treatment Value: 100uM ABA vs. No Treatment
  misc_feature: MA Experiment ID: 20000087 Result: Down-regulated in Transcription
  misc_feature: MA Experiment 20000087 PARAMETER Experiment Name: At_100uM_ABA_Mutants_cDNA_P Parameter: Plant Line Value: WS
  misc_feature: MA Experiment 20000087 PARAMETER Experiment Name: At_100uM_ABA_Mutants_cDNA_P Parameter: Timepoint (hr) Value: 6
  misc_feature: MA Experiment 20000087 PARAMETER Experiment Name: At_100uM_ABA_Mutants_cDNA_P Parameter: Tissue Value: Aerial
  misc_feature: MA Experiment 20000087 PARAMETER Experiment Name: At_100uM_ABA_Mutants_cDNA_P Parameter: Treatment Value: 100uM ABA vs. No Treatment
  misc_feature: MA Experiment ID: 20000088 Result: Down-regulated in Transcription
  misc_feature: MA Experiment 20000088 PARAMETER Experiment Name: At_100uM_ABA_Mutants_cDNA_P Parameter: Plant Line Value: Landsberg
  misc_feature: MA Experiment 20000088 PARAMETER Experiment Name: At_100uM_ABA_Mutants_cDNA_P Parameter: Timepoint (hr) Value: 6
  misc_feature: MA Experiment 20000088 PARAMETER Experiment Name: At_100uM_ABA_Mutants_cDNA_P Parameter: Tissue Value: Aerial
  misc_feature: MA Experiment 20000088 PARAMETER Experiment Name: At_100uM_ABA_Mutants_cDNA_P Parameter: Treatment Value: 100uM ABA vs. No Treatment
  misc_feature: MA Experiment ID: 20000090 Result: Down-regulated in Transcription
  misc_feature: MA Experiment ID: 20000112 Result: Down-regulated in Transcription
  misc_feature: MA Experiment 20000112 PARAMETER Experiment Name: At_42deg_Heat_cDNA_P Parameter: Temperature (deg C) Value: 42 vs. 22
  misc_feature: MA Experiment 20000112 PARAMETER Experiment Name: At_42deg_Heat_cDNA_P Parameter: Timepoint (hr) Value: 2
  misc_feature: MA Experiment 20000112 PARAMETER Experiment Name: At_42deg_Heat_cDNA_P Parameter: Tissue Value: Aerial
  misc_feature: MA Experiment ID: 20000117 Result: Down-regulated in Transcription
  misc_feature: MA Experiment 20000117 PARAMETER Experiment Name: At_100uM_ABA_Mutants_cDNA_P Parameter: Plant Line Value: Columbia
  misc_feature: MA Experiment 20000117 PARAMETER Experiment Name: At_100uM_ABA_Mutants_cDNA_P Parameter: Timepoint (hr) Value: 6
  misc_feature: MA Experiment 20000117 PARAMETER Experiment Name: At_100uM_ABA_Mutants_cDNA_P Parameter: Tissue Value: Aerial
  misc_feature: MA Experiment 20000117 PARAMETER Experiment Name: At_100uM_ABA_Mutants_cDNA_P Parameter: Treatment Value: 100uM ABA vs. No Treatment
  misc_feature: MA Experiment ID: 20000144 Result: Down-regulated in Transcription
  misc_feature: MA Experiment 20000144 PARAMETER Experiment Name: At_42deg_Heat_cDNA_P Parameter: Temperature (deg C) Value: 42 vs. 22
  misc_feature: MA Experiment 20000144 PARAMETER Experiment Name: At_42deg_Heat_cDNA_P Parameter: Timepoint (hr) Value: 1
  misc_feature: MA Experiment 20000144 PARAMETER Experiment Name: At_42deg_Heat_cDNA_P Parameter: Tissue Value: Aerial
  misc_feature: MA Experiment ID: 20000166 Result: Down-regulated in Transcription
  misc_feature: MA Experiment 20000166 PARAMETER Experiment Name: At_100uM_ABA_P Parameter: Age (day) Value: 14
  misc_feature: MA Experiment 20000166 PARAMETER Experiment Name: At_100uM_ABA_P Parameter: Organism Value: A. thaliana
  misc_feature: MA Experiment 20000166 PARAMETER Experiment Name: At_100uM_ABA_P Parameter: Plant Line Value: WS
  misc_feature: MA Experiment 20000166 PARAMETER Experiment Name: At_100uM_ABA_P Parameter: Timepoint (hr) Value: 1
  misc_feature: MA Experiment 20000166 PARAMETER Experiment Name: At_100uM_ABA_P Parameter: Tissue Value: Aerial
  misc_feature: MA Experiment 20000166 PARAMETER Experiment Name: At_100uM_ABA_P Parameter: Treatment Value: 100uM ABA vs. No Treatment
  misc_feature: MA Experiment ID: 20000179 Result: Up-regulated in Transcription
  misc_feature: MA Experiment 20000179 PARAMETER Experiment Name: At_Germinating_Seeds_P Parameter: Age (hr) Value: 6 vs. 0
  misc_feature: MA Experiment 20000179 PARAMETER Experiment Name: At_Germinating_Seeds_P Parameter: Tissue Value: Germinating Seeds
  misc_feature: MA Experiment ID: 20000180 Result: Up-regulated in Transcription
  misc_feature: MA Experiment 20000180 PARAMETER Experiment Name: At_Germinating_Seeds_P Parameter: Age (hr) Value: 24 vs. 0
  misc_feature: MA Experiment 20000180 PARAMETER Experiment Name: At_Germinating_Seeds_P Parameter: Tissue Value: Germinating Seeds
  misc_feature: MA Experiment ID: 20000182 Result: Down-regulated in Transcription
  misc_feature: MA Experiment 20000182 PARAMETER Experiment Name: At_2mM_SA_P Parameter: Age (day) Value: 14
  misc_feature: MA Experiment 20000182 PARAMETER Experiment Name: At_2mM_SA_P Parameter: Organism Value: A. thaliana
  misc_feature: MA Experiment 20000182 PARAMETER Experiment Name: At_2mM_SA_P Parameter: Plant Line Value: WS
  misc_feature: MA Experiment 20000182 PARAMETER Experiment Name: At_2mM_SA_P Parameter: Timepoint (hr) Value: 6
  misc_feature: MA Experiment 20000182 PARAMETER Experiment Name: At_2mM_SA_P Parameter: Tissue Value: Aerial
  misc_feature: MA Experiment 20000182 PARAMETER Experiment Name: At_2mM_SA_P Parameter: Treatment Value: 2mM SA vs. No Treatment
  misc_feature: MA Experiment ID: 20000184 Result: Up-regulated in Transcription
  misc_feature: MA Experiment 20000184 PARAMETER Experiment Name: At_Shoots__P Parameter: Age (day) Value: 7
  misc_feature: MA Experiment 20000184 PARAMETER Experiment Name: At_Shoots__P Parameter: Tissue Value: Shoots vs. Whole Plant
  misc_feature: MA Experiment ID: 20000224 Result: Down-regulated in Transcription
  misc_feature: MA Experiment ID: 20000227 Result: Up-regulated in Transcription
  misc_feature: MA Experiment 20000227 PARAMETER Experiment Name: At_Root-Tips-vs-Tops_P Parameter: Tissue Value: Root Tips vs. Root Tops
  misc_feature: MA Experiment ID: 20000234 Result: Down-regulated in Transcription
  misc_feature: MA Experiment 20000234 PARAMETER Experiment Name: At_Siliques_P Parameter: Age (day) Value: 21
  misc_feature: MA Experiment 20000234 PARAMETER Experiment Name: At_Siliques_P Parameter: Organism Value: A. thaliana
  misc_feature: MA Experiment 20000234 PARAMETER Experiment Name: At_Siliques_P Parameter: Plant Line Value: WS
  misc_feature: MA Experiment 20000234 PARAMETER Experiment Name: At_Siliques_P Parameter: Tissue Value: Less Than 5mm Siliques vs. Whole Plant
  misc_feature: MA Experiment ID: 20000264 Result: Down-regulated in Transcription
  misc_feature: MA Experiment 20000264 PARAMETER Experiment Name: At_Open_Flower_P Parameter: Age (day) Value: 21
  misc_feature: MA Experiment 20000264 PARAMETER Experiment Name: At_Open_Flower_P Parameter: Plant Line Value: WS
  misc_feature: MA Experiment 20000264 PARAMETER Experiment Name: At_Open_Flower_P Parameter: Tissue Value: Open Flower vs. Whole Plant
  misc_feature: MA Experiment ID: 20000265 Result: Down-regulated in Transcription
  misc_feature: MA Experiment 20000265 PARAMETER Experiment Name: At_Open_Flower_P Parameter: Age (day) Value: 21
  misc_feature: MA Experiment 20000265 PARAMETER Experiment Name: At_Open_Flower_P Parameter: Plant Line Value: WS
  misc_feature: MA Experiment 20000265 PARAMETER Experiment Name: At_Open_Flower_P Parameter: Tissue Value: Closed Flower vs. Whole Plant
  misc_feature: MA Experiment ID: 20000268 Result: Down-regulated in Transcription
  misc_feature: MA Experiment 20000268 PARAMETER Experiment Name: At_100mM_NaCl__P Parameter: Age (day) Value: 14
  misc_feature: MA Experiment 20000268 PARAMETER Experiment Name: At_100mM_NaCl__P Parameter: Organism Value: A. thaliana
  misc_feature: MA Experiment 20000268 PARAMETER Experiment Name: At_100mM_NaCl__P Parameter: Plant Line Value: WS
  misc_feature: MA Experiment 20000268 PARAMETER Experiment Name: At_100mM_NaCl__P Parameter: Timepoint (hr) Value: 6
  misc_feature: MA Experiment 20000268 PARAMETER Experiment Name: At_100mM_NaCl__P Parameter: Tissue Value: Whole Plant
  misc_feature: MA Experiment 20000268 PARAMETER Experiment Name: At_100mM_NaCl__P Parameter: Treatment Value: 100mM NaCl vs. No Treatment
  misc_feature: MA Experiment ID: 20000286 Result: Down-regulated in Transcription
  misc_feature: MA Experiment 20000286 PARAMETER Experiment Name: At_Open_Flower_P Parameter: Age (day) Value: 21
  misc_feature: MA Experiment 20000286 PARAMETER Experiment Name: At_Open_Flower_P Parameter: Plant Line Value: WS
  misc_feature: MA Experiment 20000286 PARAMETER Experiment Name: At_Open_Flower_P Parameter: Tissue Value: Half Open vs. Whole Plant
  misc_feature: MA Experiment ID: 20000308 Result: Down-regulated in Transcription
  misc_feature: MA Experiment 20000308 PARAMETER Experiment Name: At_100mM_NaCl__P Parameter: Age (day) Value: 17
  misc_feature: MA Experiment 20000308 PARAMETER Experiment Name: At_100mM_NaCl__P Parameter: Organism Value: A. thaliana
  misc_feature: MA Experiment 20000308 PARAMETER Experiment Name: At_100mM_NaCl__P Parameter: Plant Line Value: WS
  misc_feature: MA Experiment 20000308 PARAMETER Experiment Name: At_100mM_NaCl__P Parameter: Timepoint (hr) Value: 72
  misc_feature: MA Experiment 20000308 PARAMETER Experiment Name: At_100mM_NaCl__P Parameter: Tissue Value: Whole Plant
  misc_feature: MA Experiment 20000308 PARAMETER Experiment Name: At_100mM_NaCl__P Parameter: Treatment Value: 100mM NaCl vs. No Treatment
  misc_feature: MA Experiment ID: 20000437 Result: Down-regulated in Transcription
  misc_feature: MA Experiment 20000437 PARAMETER Experiment Name: At_Drought_P Parameter: Age (day) Value: 8
  misc_feature: MA Experiment 20000437 PARAMETER Experiment Name: At_Drought_P Parameter: Organism Value: A. thaliana
  misc_feature: MA Experiment 20000437 PARAMETER Experiment Name: At_Drought_P Parameter: Plant Line Value: WS
  misc_feature: MA Experiment 20000437 PARAMETER Experiment Name: At_Drought_P Parameter: Timepoint (hr) Value: 24
  misc_feature: MA Experiment 20000437 PARAMETER Experiment Name: At_Drought_P Parameter: Tissue Value: Whole Plant
  misc_feature: MA Experiment 20000437 PARAMETER Experiment Name: At_Drought_P Parameter: Treatment Value: Drought vs. No Drought
  misc_feature: MA Experiment ID: 20000441 Result: Up-regulated in Transcription
  misc_feature: MA Experiment 20000441 PARAMETER Experiment Name: At_1uM_BR-BRZ__P Parameter: Tissue Value: Shoot Apices
  misc_feature: MA Experiment 20000441 PARAMETER Experiment Name: At_1uM_BR-BRZ__P Parameter: Treatment Value: 1uM BR vs. No Treatment
  misc_feature: MA Experiment ID: 20000443 Result: Up-regulated in Transcription
  misc_feature: MA Experiment 20000443 PARAMETER Experiment Name: At_1uM_BR-BRZ__P Parameter: Tissue Value: Shoot Apices
  misc_feature: MA Experiment 20000443 PARAMETER Experiment Name: At_1uM_BR-BRZ__P Parameter: Treatment Value: 1uM BRZ vs. No Treatment
  misc_feature: MA Experiment ID: 20000452 Result: Down-regulated in Transcription
  misc_feature: MA Experiment 20000452 PARAMETER Experiment Name: At_CS6879_Shoots-Roots_P Parameter: Age (day) Value: 14
  misc_feature: MA Experiment 20000452 PARAMETER Experiment Name: At_CS6879_Shoots-Roots_P Parameter: Organism Value: A. thaliana
  misc_feature: MA Experiment 20000452 PARAMETER Experiment Name: At_CS6879_Shoots-Roots_P Parameter: Plant Line Value: CS6879 vs. WS
  misc_feature: MA Experiment 20000452 PARAMETER Experiment Name: At_CS6879_Shoots-Roots_P Parameter: Tissue Value: Shoots
  misc_feature: MA Experiment ID: 20000453 Result: Down-regulated in Transcription
  misc_feature: MA Experiment 20000453 PARAMETER Experiment Name: At_100uM_ABA_P Parameter: Age (day) Value: 15
  misc_feature: MA Experiment 20000453 PARAMETER Experiment Name: At_100uM_ABA_P Parameter: Organism Value: A. thaliana
  misc_feature: MA Experiment 20000453 PARAMETER Experiment Name: At_100uM_ABA_P Parameter: Plant Line Value: WS
  misc_feature: MA Experiment 20000453 PARAMETER Experiment Name: At_100uM_ABA_P Parameter: Timepoint (hr) Value: 24
  misc_feature: MA Experiment 20000453 PARAMETER Experiment Name: At_100uM_ABA_P Parameter: Tissue Value: Aerial
  misc_feature: MA Experiment 20000453 PARAMETER Experiment Name: At_100uM_ABA_P Parameter: Treatment Value: 100uM ABA vs. No Treatment
  misc_feature: MA Experiment ID: 20000455 Result: Down-regulated in Transcription
  misc_feature: MA Experiment 20000455 PARAMETER Experiment Name: At_100uM_ABA_P Parameter: Age (day) Value: 16
  misc_feature: MA Experiment 20000455 PARAMETER Experiment Name: At_100uM_ABA_P Parameter: Organism Value: A. thaliana
  misc_feature: MA Experiment 20000455 PARAMETER Experiment Name: At_100uM_ABA_P Parameter: Plant Line Value: WS
  misc_feature: MA Experiment 20000455 PARAMETER Experiment Name: At_100uM_ABA_P Parameter: Timepoint (hr) Value: 48
  misc_feature: MA Experiment 20000455 PARAMETER Experiment Name: At_100uM_ABA_P Parameter: Tissue Value: Aerial
  misc_feature: MA Experiment 20000455 PARAMETER Experiment Name: At_100uM_ABA_P Parameter: Treatment Value: 100uM ABA vs. No Treatment
  misc_feature: MA Experiment ID: 20000606 Result: Up-regulated in Transcription
  misc_feature: MA Experiment 20000606 PARAMETER Experiment Name: At_CS8548_Mutant_P Parameter: Age (day) Value: 14
  misc_feature: MA Experiment 20000606 PARAMETER Experiment Name: At_CS8548_Mutant_P Parameter: Plant Line Value: CS8548 vs. wt
  misc_feature: MA Experiment 20000606 PARAMETER Experiment Name: At_CS8548_Mutant_P Parameter: Tissue Value: Whole Plant
  misc_feature: MA Experiment ID: 20000794 Result: Down-regulated in Transcription
  misc_feature: MA Experiment 20000794 PARAMETER Experiment Name: At_Petals_P Parameter: Age (day) Value: 23-25 days
  misc_feature: MA Experiment 20000794 PARAMETER Experiment Name: At_Petals_P Parameter: Plant Line Value: WS
  misc_feature: MA Experiment 20000794 PARAMETER Experiment Name: At_Petals_P Parameter: Tissue Value: Petals vs. Whole plant
  misc_feature: MA Experiment ID: 20001450 Result: Up-regulated in Transcription
  misc_feature: MA Experiment 20001450 PARAMETER Experiment Name: At_Far-red-induction_P Parameter: Age (day) Value: 7
  misc_feature: MA Experiment 20001450 PARAMETER Experiment Name: At_Far-red-induction_P Parameter: Light Value: Far-red vs. White
  misc_feature: MA Experiment 20001450 PARAMETER Experiment Name: At_Far-red-induction_P Parameter: Organism Value: A. thaliana
  misc_feature: MA Experiment 20001450 PARAMETER Experiment Name: At_Far-red-induction_P Parameter: Plant Line Value: Columbia
  misc_feature: MA Experiment 20001450 PARAMETER Experiment Name: At_Far-red-induction_P Parameter: Timepoint (hr) Value: 8
  misc_feature: MA Experiment 20001450 PARAMETER Experiment Name: At_Far-red-induction_P Parameter: Tissue Value: Whole Plant
  misc_feature: MA Experiment ID: 20001451 Result: Up-regulated in Transcription
  misc_feature: MA Experiment 20001451 PARAMETER Experiment Name: At_Far-red-induction_P Parameter: Age (day) Value: 7
  misc_feature: MA Experiment 20001451 PARAMETER Experiment Name: At_Far-red-induction_P Parameter: Light Value: Far-red vs. White
  misc_feature: MA Experiment 20001451 PARAMETER Experiment Name: At_Far-red-induction_P Parameter: Organism Value: A. thaliana
  misc_feature: MA Experiment 20001451 PARAMETER Experiment Name: At_Far-red-induction_P Parameter: Plant Line Value: Columbia
  misc_feature: MA Experiment 20001451 PARAMETER Experiment Name: At_Far-red-induction_P Parameter: Timepoint (hr) Value: 24
  misc_feature: MA Experiment 20001451 PARAMETER Experiment Name: At_Far-red-induction_P Parameter: Tissue Value: Whole Plant
  misc_feature: MA Experiment ID: 20001554 Result: Down-regulated in Transcription
  misc_feature: MA Experiment 20001554 PARAMETER Experiment Name: At_Drought_Soil_Dry_P Parameter: Age (day) Value: 21
  misc_feature: MA Experiment 20001554 PARAMETER Experiment Name: At_Drought_Soil_Dry_P Parameter: Organism Value: A. thaliana
  misc_feature: MA Experiment 20001554 PARAMETER Experiment Name: At_Drought_Soil_Dry_P Parameter: Plant Line Value: WS
  misc_feature: MA Experiment 20001554 PARAMETER Experiment Name: At_Drought_Soil_Dry_P Parameter: Post Timepoint (hr) Value: None
  misc_feature: MA Experiment 20001554 PARAMETER Experiment Name: At_Drought_Soil_Dry_P Parameter: Post-Treatment Value: None
  misc_feature: MA Experiment 20001554 PARAMETER Experiment Name: At_Drought_Soil_Dry_P Parameter: Timepoint (day) Value: 7
  misc_feature: MA Experiment 20001554 PARAMETER Experiment Name: At_Drought_Soil_Dry_P Parameter: Treatment Value: Drought vs. No Drought
  misc_feature: MA Experiment ID: 20001555 Result: Down-regulated in Transcription
  misc_feature: MA Experiment 20001555 PARAMETER Experiment Name: At_Drought_Soil_Dry_P Parameter: Age (day) Value: 24
  misc_feature: MA Experiment 20001555 PARAMETER Experiment Name: At_Drought_Soil_Dry_P Parameter: Organism Value: A. thaliana
  misc_feature: MA Experiment 20001555 PARAMETER Experiment Name: At_Drought_Soil_Dry_P Parameter: Plant Line Value: WS
  misc_feature: MA Experiment 20001555 PARAMETER Experiment Name: At_Drought_Soil_Dry_P Parameter: Post Timepoint (hr) Value: None
  misc_feature: MA Experiment 20001555 PARAMETER Experiment Name: At_Drought_Soil_Dry_P Parameter: Post-Treatment Value: None
  misc_feature: MA Experiment 20001555 PARAMETER Experiment Name: At_Drought_Soil_Dry_P Parameter: Timepoint (day) Value: 10
  misc_feature: MA Experiment 20001555 PARAMETER Experiment Name: At_Drought_Soil_Dry_P Parameter: Treatment Value: Drought vs. No Drought
  misc_feature: MA Experiment ID: 20001556 Result: Down-regulated in Transcription
  misc_feature: MA Experiment 20001556 PARAMETER Experiment Name: At_Drought_Soil_Dry_P Parameter: Age (day) Value: 26
  misc_feature: MA Experiment 20001556 PARAMETER Experiment Name: At_Drought_Soil_Dry_P Parameter: Organism Value: A. thaliana
  misc_feature: MA Experiment 20001556 PARAMETER Experiment Name: At_Drought_Soil_Dry_P Parameter: Plant Line Value: WS
  misc_feature: MA Experiment 20001556 PARAMETER Experiment Name: At_Drought_Soil_Dry_P Parameter: Post Timepoint (hr) Value: None
  misc_feature: MA Experiment 20001556 PARAMETER Experiment Name: At_Drought_Soil_Dry_P Parameter: Post-Treatment Value: None
  misc_feature: MA Experiment 20001556 PARAMETER Experiment Name: At_Drought_Soil_Dry_P Parameter: Timepoint (day) Value: 12
  misc_feature: MA Experiment 20001556 PARAMETER Experiment Name: At_Drought_Soil_Dry_P Parameter: Treatment Value: Drought vs. No Drought
  misc_feature: MA Experiment ID: 20001557 Result: Up-regulated in Transcription
  misc_feature: MA Experiment 20001557 PARAMETER Experiment Name: At_Drought_Soil_Dry_P Parameter: Age (day) Value: 27
  misc_feature: MA Experiment 20001557 PARAMETER Experiment Name: At_Drought_Soil_Dry_P Parameter: Organism Value: A. thaliana
  misc_feature: MA Experiment 20001557 PARAMETER Experiment Name: At_Drought_Soil_Dry_P Parameter: Plant Line Value: WS
  misc_feature: MA Experiment 20001557 PARAMETER Experiment Name: At_Drought_Soil_Dry_P Parameter: Post Timepoint (hr) Value: 3
  misc_feature: MA Experiment 20001557 PARAMETER Experiment Name: At_Drought_Soil_Dry_P Parameter: Post-Treatment Value: Re-Water vs. No Drought
  misc_feature: MA Experiment 20001557 PARAMETER Experiment Name: At_Drought_Soil_Dry_P Parameter: Timepoint (day) Value: 13
  misc_feature: MA Experiment 20001557 PARAMETER Experiment Name: At_Drought_Soil_Dry_P Parameter: Treatment Value: Drought vs. No Drought
  misc_feature: MA Experiment ID: 20001558 Result: Up-regulated in Transcription
  misc_feature: MA Experiment 20001558 PARAMETER Experiment Name: At_Drought_Soil_Dry_P Parameter: Age (day) Value: 27
  misc_feature: MA Experiment 20001558 PARAMETER Experiment Name: At_Drought_Soil_Dry_P Parameter: Organism Value: A. thaliana
  misc_feature: MA Experiment 20001558 PARAMETER Experiment Name: At_Drought_Soil_Dry_P Parameter: Plant Line Value: WS
  misc_feature: MA Experiment 20001558 PARAMETER Experiment Name: At_Drought_Soil_Dry_P Parameter: Post Timepoint (hr) Value: 6
  misc_feature: MA Experiment 20001558 PARAMETER Experiment Name: At_Drought_Soil_Dry_P Parameter: Post-Treatment Value: Re-Water vs. No Drought
  misc_feature: MA Experiment 20001558 PARAMETER Experiment Name: At_Drought_Soil_Dry_P Parameter: Timepoint (day) Value: 13
  misc_feature: MA Experiment 20001558 PARAMETER Experiment Name: At_Drought_Soil_Dry_P Parameter: Treatment Value: Drought vs. No Drought
  misc_feature: MA Experiment ID: 20001560 Result: Up-regulated in Transcription
  misc_feature: MA Experiment 20001560 PARAMETER Experiment Name: At_Drought_Soil_Dry_P Parameter: Age (day) Value: 28
  misc_feature: MA Experiment 20001560 PARAMETER Experiment Name: At_Drought_Soil_Dry_P Parameter: Organism Value: A. thaliana
  misc_feature: MA Experiment 20001560 PARAMETER Experiment Name: At_Drought_Soil_Dry_P Parameter: Plant Line Value: WS
  misc_feature: MA Experiment 20001560 PARAMETER Experiment Name: At_Drought_Soil_Dry_P Parameter: Post Timepoint (hr) Value: None
  misc_feature: MA Experiment 20001560 PARAMETER Experiment Name: At_Drought_Soil_Dry_P Parameter: Post-Treatment Value: None
  misc_feature: MA Experiment 20001560 PARAMETER Experiment Name: At_Drought_Soil_Dry_P Parameter: Timepoint (day) Value: 14
  misc_feature: MA Experiment 20001560 PARAMETER Experiment Name: At_Drought_Soil_Dry_P Parameter: Treatment Value: Drought vs. No Drought
  misc_feature: MA Experiment ID: 20001757 Result: Up-regulated in Transcription
  misc_feature: MA Experiment 20001757 PARAMETER Experiment Name: At_50mM_NH4NO3_L-to-H_P Parameter: Timepoint (hr) Value: 6
  misc_feature: MA Experiment 20001757 PARAMETER Experiment Name: At_50mM_NH4NO3_L-to-H_P Parameter: Tissue Value: Leaf
  misc_feature: MA Experiment 20001757 PARAMETER Experiment Name: At_50mM_NH4NO3_L-to-H_P Parameter: Treatment Value: 50mM NH4NO3 vs 100mM Mannitol
  misc_feature: MA Experiment ID: 20001768 Result: Down-regulated in Transcription
  misc_feature: MA Experiment 20001768 PARAMETER Experiment Name: At_Far-red-enriched-adult_P Parameter: Age (day) Value: 28
  misc_feature: MA Experiment 20001768 PARAMETER Experiment Name: At_Far-red-enriched-adult_P Parameter: Light Value: Far-red enriched vs. White
  misc_feature: MA Experiment 20001768 PARAMETER Experiment Name: At_Far-red-enriched-adult_P Parameter: Organism Value: A. thaliana
  misc_feature: MA Experiment 20001768 PARAMETER Experiment Name: At_Far-red-enriched-adult_P Parameter: Plant Line Value: Columbia
  misc_feature: MA Experiment 20001768 PARAMETER Experiment Name: At_Far-red-enriched-adult_P Parameter: Timepoint (hr) Value: 1
  misc_feature: MA Experiment 20001768 PARAMETER Experiment Name: At_Far-red-enriched-adult_P Parameter: Tissue Value: Aerial
  misc_feature: MA Experiment ID: 20001904 Result: Down-regulated in Transcription
  misc_feature: MA Experiment 20001904 PARAMETER Experiment Name: At_Drought_Reproduction_P Parameter: Age (day) Value: 37
  misc_feature: MA Experiment 20001904 PARAMETER Experiment Name: At_Drought_Reproduction_P Parameter: Organism Value: A. thaliana
  misc_feature: MA Experiment 20001904 PARAMETER Experiment Name: At_Drought_Reproduction_P Parameter: Plant Line Value: WS
  misc_feature: MA Experiment 20001904 PARAMETER Experiment Name: At_Drought_Reproduction_P Parameter: Timepoint (day) Value: 7
  misc_feature: MA Experiment 20001904 PARAMETER Experiment Name: At_Drought_Reproduction_P Parameter: Tissue Value: Rosettes
  misc_feature: MA Experiment 20001904 PARAMETER Experiment Name: At_Drought_Reproduction_P Parameter: Treatment Value: Drought vs. No Drought
  misc_feature: MA Experiment ID: 20001905 Result: Down-regulated in Transcription
  misc_feature: MA Experiment 20001905 PARAMETER Experiment Name: At_Drought_Reproduction_P Parameter: Age (day) Value: 40
  misc_feature: MA Experiment 20001905 PARAMETER Experiment Name: At_Drought_Reproduction_P Parameter: Organism Value: A. thaliana
  misc_feature: MA Experiment 20001905 PARAMETER Experiment Name: At_Drought_Reproduction_P Parameter: Plant Line Value: WS
  misc_feature: MA Experiment 20001905 PARAMETER Experiment Name: At_Drought_Reproduction_P Parameter: Timepoint (day) Value: 10
  misc_feature: MA Experiment 20001905 PARAMETER Experiment Name: At_Drought_Reproduction_P Parameter: Tissue Value: Rosettes
  misc_feature: MA Experiment 20001905 PARAMETER Experiment Name: At_Drought_Reproduction_P Parameter: Treatment Value: Drought vs. No Drought
  misc_feature: MA Experiment ID: 20001906 Result: Down-regulated in Transcription
  misc_feature: MA Experiment 20001906 PARAMETER Experiment Name: At_Drought_Reproduction_P Parameter: Age (day) Value: 35
  misc_feature: MA Experiment 20001906 PARAMETER Experiment Name: At_Drought_Reproduction_P Parameter: Organism Value: A. thaliana
  misc_feature: MA Experiment 20001906 PARAMETER Experiment Name: At_Drought_Reproduction_P Parameter: Plant Line Value: WS
  misc_feature: MA Experiment 20001906 PARAMETER Experiment Name: At_Drought_Reproduction_P Parameter: Timepoint (day) Value: 5
  misc_feature: MA Experiment 20001906 PARAMETER Experiment Name: At_Drought_Reproduction_P Parameter: Tissue Value: Siliques
  misc_feature: MA Experiment 20001906 PARAMETER Experiment Name: At_Drought_Reproduction_P Parameter: Treatment Value: Drought vs. No Drought
  misc_feature: MA Experiment ID: 20001907 Result: Down-regulated in Transcription
  misc_feature: MA Experiment 20001907 PARAMETER Experiment Name: At_Drought_Reproduction_P Parameter: Age (day) Value: 37
  misc_feature: MA Experiment 20001907 PARAMETER Experiment Name: At_Drought_Reproduction_P Parameter: Organism Value: A. thaliana
  misc_feature: MA Experiment 20001907 PARAMETER Experiment Name: At_Drought_Reproduction_P Parameter: Plant Line Value: WS
  misc_feature: MA Experiment 20001907 PARAMETER Experiment Name: At_Drought_Reproduction_P Parameter: Timepoint (day) Value: 7
  misc_feature: MA Experiment 20001907 PARAMETER Experiment Name: At_Drought_Reproduction_P Parameter: Tissue Value: Siliques
  misc_feature: MA Experiment 20001907 PARAMETER Experiment Name: At_Drought_Reproduction_P Parameter: Treatment Value: Drought vs. No Drought
  misc_feature: MA Experiment ID: 20001908 Result: Down-regulated in Transcription
  misc_feature: MA Experiment 20001908 PARAMETER Experiment Name: At_Drought_Reproduction_P Parameter: Age (day) Value: 40
  misc_feature: MA Experiment 20001908 PARAMETER Experiment Name: At_Drought_Reproduction_P Parameter: Organism Value: A. thaliana
  misc_feature: MA Experiment 20001908 PARAMETER Experiment Name: At_Drought_Reproduction_P Parameter: Plant Line Value: WS
  misc_feature: MA Experiment 20001908 PARAMETER Experiment Name: At_Drought_Reproduction_P Parameter: Timepoint (day) Value: 10
  misc_feature: MA Experiment 20001908 PARAMETER Experiment Name: At_Drought_Reproduction_P Parameter: Tissue Value: Siliques
  misc_feature: MA Experiment 20001908 PARAMETER Experiment Name: At_Drought_Reproduction_P Parameter: Treatment Value: Drought vs. No Drought
gatatatctctagtctagacattatttgtctacaaacgttttgtattgacttggccatctcattccaacaagatacaactcatcactccaaacattcaacttccatataaaccattcccttccgatctcactttccaaatcactcttcacactttaactaagcaaaccaataatggctaccactcgtctaactctagctcctctcctcctcatcgcagccgtactactcgcaaccaaggcaacggctcagccggcagcccccgctccagagcctgctggtcccatcaacctcactgcgatcctcgaaaaaggtggtcaattcactactttcatccatcttctaaacatcactcaagtcggtagtcaagtgaacattcaagtcaatagttcatccgaaggtatgacggtgttcgcaccaacagacaatgcttttcaaaaccttaaacccggaaccctaaaccagttaagccctgacgatcaagttaaactcattctctaccacgttagccccaaatattacagtatggatgatctcctctccgtgagtaacccggttaggactcaagcttctggccgagacaacggtgtttacgggcttaacttcaccggccaaacaaaccaaatcaatgtctctactggttatgtggagacacgtattagcaattcgttgaggcaacaacgtcctctcgcagtttatgttgtcgacatggttttgttgcccggtgagatgttcggagagcacaagctttcgccgattgctcctgcccctaaatctaaatccggtggggttaccgatgactccggctccactaagaaggcagcgtcaccgtcggataagtcaggctccggtgagaagaaagtcggactagggtttggtcttggacttattgtcttatgtttgaaatttctcttttgaaaatttaatagcaaagatttgttttgctttctattgattttatcctgcgatgtgaggtataaatatgaaatttgttgattaagttccgtgaaataaaatgtgagatttttaataa

SEQ ID NO: 85645 - protein, 247 aa, Arabidopsis thaliana
  peptide (1)..(247): Ceres Seq. ID no. 12681551
  misc_feature (42)..(183): Pfam Name: Fasciclin domain Pfam Description: Fasciclin domain
  misc_feature (1)..(247): Homolog of NCBI NO: 18379157 NR Description: fasciclin-like arabinogalactan-protein (FLA9); id: At1g03870.1, supported by cDNA: 39763., supported by cDNA: [Arabidopsis thaliana] >gi|25350180|pir||D86169 hypothetical
  misc_feature (1)..(247): Homolog of NCBI NO: 24417458 NR Description: unknown [Arabidopsis thaliana]
  misc_feature (1)..(246): Homolog of NCBI NO: 15241423 NR Description: fasciclin-like arabinogalactan-protein, putative protein id: At5g44130.1, supported by cDNA: gi_16648846, by cDNA: gi_20466118 [Arabidopsis thaliana]
  misc_feature (25)..(247): Homolog of NCBI NO: 18399381 NR Description: fasciclin-like arabinogalactan-protein (FLA6); id: At2g20520.1, supported by cDNA: gi_13377779 [Arabidopsis
  misc_feature (27)..(247): Homolog of NCBI NO: 25350183 NR Description: probable surface protein [imported] - Arabidopsis
  misc_feature (11)..(243): Homolog of NCBI NO: 34910950 NR Description: putative arabinogalactan-like protein [Oryza
  misc_feature (1)..(236): Homolog of NCBI NO: 15242651 NR Description: fasciclin-like arabinogalactan-protein (FLA11); id: At5g03170.1, supported by cDNA: 14950., supported by cDNA:
  misc_feature (1)..(236): Homolog of NCBI NO: 21553523 NR Description: arabinogalactan protein-like [Arabidopsis
  misc_feature (1)..(226): Homolog of NCBI NO: 2129473 NR Description: arabinogalactan-like protein - loblolly pine
  misc_feature (12)..(243): Homolog of NCBI NO: 30841338 NR Description: arabinogalactan protein [Gossypium hirsutum]
MATTRLTLAPLLLIAAVLLATKATAQPAAPAPEPAGPINLTAILEKGGQFTTFIHLLNITQVGSQVNIQVNSSSEGMTVFAPTDNAFQNLKPGTLNQLSPDDQVKLILYHVSPKYYSMDDLLSVSNPVRTQASGRDNGVYGLNFTGQTNQINVSTGYVETRISNSLRQQRPLAVYVVDMVLLPGEMFGEHKLSPIAPAPKSKSGGVTDDSGSTKKAASPSDKSGSGEKKVGLGFGLGLIVLCLKFLF

SEQ ID NO: 85646 - protein, 171 aa, Arabidopsis thaliana; identical to SEQ ID NO: 25079
  peptide (1)..(171): Ceres Seq. ID no. 12681552
  misc_feature (1)..(107): Pfam Name: Fasciclin domain Pfam Description: Fasciclin domain
  misc_feature (1)..(171): Homolog of NCBI NO: 18379157 NR Description: fasciclin-like arabinogalactan-protein (FLA9); id: At1g03870.1, supported by cDNA: 39763., supported by cDNA: [Arabidopsis thaliana] >gi|25350180|pir||D86169 hypothetical
  misc_feature (1)..(171): Homolog of NCBI NO: 24417458 NR Description: unknown [Arabidopsis thaliana]
  misc_feature (1)..(170): Homolog of NCBI NO: 15241423 NR Description: fasciclin-like arabinogalactan-protein, putative protein id: At5g44130.1, supported by cDNA: gi_16648846, by cDNA: gi_20466118 [Arabidopsis thaliana]
  misc_feature (1)..(171): Homolog of NCBI NO: 18399381 NR Description: fasciclin-like arabinogalactan-protein (FLA6); id: At2g20520.1, supported by cDNA: gi_13377779 [Arabidopsis
  misc_feature (1)..(171): Homolog of NCBI NO: 25350183 NR Description: probable surface protein [imported] - Arabidopsis
  misc_feature (1)..(167): Homolog of NCBI NO: 34910950 NR Description: putative arabinogalactan-like protein [Oryza
  misc_feature (1)..(160): Homolog of NCBI NO: 15242651 NR Description: fasciclin-like arabinogalactan-protein (FLA11); id: At5g03170.1, supported by cDNA: 14950., supported by cDNA:
  misc_feature (1)..(160): Homolog of NCBI NO: 21553523 NR Description: arabinogalactan protein-like [Arabidopsis
  misc_feature (1)..(150): Homolog of NCBI NO: 2129473 NR Description: arabinogalactan-like protein - loblolly pine
  misc_feature (1)..(167): Homolog of NCBI NO: 30841338 NR Description: arabinogalactan protein [Gossypium hirsutum]

SEQ ID NO: 85647 - protein, 130 aa, Arabidopsis thaliana; identical to SEQ ID NO: 25080
  peptide (1)..(130): Ceres Seq. ID no. 12681553
  misc_feature (1)..(66): Pfam Name: Fasciclin domain Pfam Description: Fasciclin domain
  misc_feature (1)..(130): Homolog of NCBI NO: 18379157 NR Description: fasciclin-like arabinogalactan-protein (FLA9); id: At1g03870.1, supported by cDNA: 39763., supported by cDNA: [Arabidopsis thaliana] >gi|25350180|pir||D86169 hypothetical
  misc_feature (1)..(130): Homolog of NCBI NO: 24417458 NR Description: unknown [Arabidopsis thaliana]
  misc_feature (1)..(129): Homolog of NCBI NO: 15241423 NR Description: fasciclin-like arabinogalactan-protein, putative protein id: At5g44130.1, supported by cDNA: gi_16648846, by cDNA: gi_20466118 [Arabidopsis thaliana]
  misc_feature (1)..(130): Homolog of NCBI NO: 18399381 NR Description: fasciclin-like arabinogalactan-protein (FLA6); id: At2g20520.1, supported by cDNA: gi_13377779 [Arabidopsis
  misc_feature (1)..(130): Homolog of NCBI NO: 25350183 NR Description: probable surface protein [imported] - Arabidopsis
  misc_feature (1)..(126): Homolog of NCBI NO: 34910950 NR Description: putative arabinogalactan-like protein [Oryza
  misc_feature (1)..(119): Homolog of NCBI NO: 15242651 NR Description: fasciclin-like arabinogalactan-protein (FLA11); id: At5g03170.1, supported by cDNA: 14950., supported by cDNA:
  misc_feature (1)..(119): Homolog of NCBI NO: 21553523 NR Description: arabinogalactan protein-like [Arabidopsis
  misc_feature (1)..(109): Homolog of NCBI NO: 2129473 NR Description: arabinogalactan-like protein - loblolly pine
  misc_feature (1)..(126): Homolog of NCBI NO: 30841338 NR Description: arabinogalactan protein [Gossypium hirsutum]

SEQ ID NO: 85648 - DNA, 1380 bp, Arabidopsis thaliana
  misc_feature (1)..(1380): Ceres Seq. ID no. 12681615
  misc_feature: MA Experiment ID: 20000173 Result: Down-regulated in Transcription
  misc_feature: MA Experiment 20000173 PARAMETER Experiment Name: At_42deg_Heat_P Parameter: Age (day) Value: 14
  misc_feature: MA Experiment 20000173 PARAMETER Experiment Name: At_42deg_Heat_P Parameter: Organism Value: A. thaliana
  misc_feature: MA Experiment 20000173 PARAMETER Experiment Name: At_42deg_Heat_P Parameter: Plant Line Value: WS
  misc_feature: MA Experiment 20000173 PARAMETER Experiment Name: At_42deg_Heat_P Parameter: Temperature (deg C) Value: 42 vs. 22
  misc_feature: MA Experiment 20000173 PARAMETER Experiment Name: At_42deg_Heat_P Parameter: Timepoint (hr) Value: 6
  misc_feature: MA Experiment 20000173 PARAMETER Experiment Name: At_42deg_Heat_P Parameter: Tissue Value: Aerial
  misc_feature: MA Experiment ID: 20000184 Result: Down-regulated in Transcription
  misc_feature: MA Experiment 20000184 PARAMETER Experiment Name: At_Shoots__P Parameter: Age (day) Value: 7
  misc_feature: MA Experiment 20000184 PARAMETER Experiment Name: At_Shoots__P Parameter: Tissue Value: Shoots vs. Whole Plant
  misc_feature: MA Experiment ID: 20000227 Result: Down-regulated in Transcription
  misc_feature: MA Experiment 20000227 PARAMETER Experiment Name: At_Root-Tips-vs-Tops_P Parameter: Tissue Value: Root Tips vs. Root Tops
  misc_feature: MA Experiment ID: 20001451 Result: Down-regulated in Transcription
  misc_feature: MA Experiment 20001451 PARAMETER Experiment Name: At_Far-red-induction_P Parameter: Age (day) Value: 7
  misc_feature: MA Experiment 20001451 PARAMETER Experiment Name: At_Far-red-induction_P Parameter: Light Value: Far-red vs. White
  misc_feature: MA Experiment 20001451 PARAMETER Experiment Name: At_Far-red-induction_P Parameter: Organism Value: A. thaliana
  misc_feature: MA Experiment 20001451 PARAMETER Experiment Name: At_Far-red-induction_P Parameter: Plant Line Value: Columbia
  misc_feature: MA Experiment 20001451 PARAMETER Experiment Name: At_Far-red-induction_P Parameter: Timepoint (hr) Value: 24
  misc_feature: MA Experiment 20001451 PARAMETER Experiment Name: At_Far-red-induction_P Parameter: Tissue Value: Whole Plant
atggatcgtgtggttggtggtaagttcaagctcggacgaaagcttggaagtggctcatttggtgaaattttcctaggagtgaatgtacaaactggagaagaagtggctgttaagcttgaacctctccgagctaggcatcctcagcttcattacgagtcaaagctttatatgcttctccaaggaggaactggtattcctcacctcaaatggtttggtgttgagggtgaattcaactgtatggtgatcgaccttctcggtcctagtatggaagaatttttcaactattgcagtcgatccttctctcttaagacagttctaatgctcgcagatcaaatgataaatagagtggagtatatgcatgttaaaggcttccttcatcgtgatattaagccagataactttttgatgggtcttggacgcaaagcaaaccaggtgtacatcattgactatgggcttgccaagaagtatagagatcttcaaacacacaagcatattccatacagggaaaacaagaaccttactggaacagctcgatatgcaagtgttaacacccatcttggaattggtgagtctttttttatcgcttctcatattttccctagccttccttggcaaggccttcgtgcaggtaccaaaaagcagaagtatgacaagatcagtgaaaagaaaagactaacaccagtggaggtcctctgtaaaaactttccacctgagttcacatcgtattttctctatgtgcgttcactacggtttgaagacaaaccagattattcatacctaaagaggcttttcagagacctatttatccgagaaggttatcagtttgactatgtatttgattggacaatattgaggtatccacagttcggctccagttccagctcgaattccaaaccaagaccaactttaagaccagctatgaatattccagtaccatctgccgacaaagcggaaaagcctccaattggacaggacagccgtgagaggttctcaggtgttttcgaggcatacaccagaagaaatggctcaggaaccggcgttcaagctgatcagtctagtagaccaagaacctcagagaatgttcttgcatccaaggacacgcaaaaccaggagagaccaaactctttatctaggaacctgagttcgtcaagaaaagcaattgctgggtcaagtgttcgagccacttcctcagctgatttcacagagaatcgattaagcagactcatcccaaacaatgatcggtcttctacaactctgaggacccagttcgctccttcgtcctcctcagtagccacaaaagctgcaccaacgagagccgctcgtgacattaccctccagagccttgagctcctcagtattgggaacagcaagaggaagtga

SEQ ID NO: 85649 - protein, 459 aa, Arabidopsis thaliana
  peptide (1)..(459): Ceres Seq. ID no. 12681616
  misc_feature (1)..(459): Homolog of NCBI NO: 25287643 NR Description: protein F19P19.10 [imported] - Arabidopsis
  misc_feature (1)..(459): Homolog of NCBI NO: 15219733 NR Description: putative casein kinase I; protein id: At1g04440.1
  misc_feature (1)..(459): Homolog of NCBI NO: 27754653 NR Description: putative casein kinase I [Arabidopsis thaliana]
  misc_feature (1)..(452): Homolog of NCBI NO: 15239840 NR Description: casein kinase I; protein id: At5g43320.1, by cDNA: gi_13430689, supported by cDNA: gi_14532893 [Arabidopsis >gi|8843885|dbj|BAA97411.1| casein kinase I [Arabidopsis
  misc_feature (1)..(459): Homolog of NCBI NO: 15236471 NR Description: casein kinase I; protein id: At4g14340.1, by cDNA: gi_15450524, supported by cDNA: gi_16974430, supported cDNA: gi_9965744 [Arabidopsis thaliana] >gi|7488072|pir||C71405
  misc_feature (1)..(412): Homolog of NCBI NO: 15229427 NR Description: putative casein kinase I; protein id: supported by cDNA: gi_15809823, supported by cDNA: gi_18377818 thaliana] >gi|11994319|dbj|BAB02278.1| casein kinase [Arabidopsis
  misc_feature (1)..(453): Homolog of NCBI NO: 30678728 NR Description: protein kinase (ADK1) [Arabidopsis thaliana]
  misc_feature (1)..(412): Homolog of NCBI NO: 15240091 NR Description: casein kinase I; protein id: At5g44100.1, by cDNA: gi_18087639 [Arabidopsis thaliana]
  misc_feature (1)..(412): Homolog of NCBI NO: 18087640 NR Description: AT5g44100/MLN1_2 [Arabidopsis thaliana]
  misc_feature (26)..(412): Homolog of NCBI NO: 1197461 NR Description: casein kinase I [Arabidopsis thaliana]
MDRVVGGKFKLGRKLGSGSFGEIFLGVNVQTGEEVAVKLEPLRARHPQLHYESKLYMLLQGGTGIPHLKWFGVEGEFNCMVIDLLGPSMEEFFNYCSRSFSLKTVLMLADQMINRVEYMHVKGFLHRDIKPDNFLMGLGRKANQVYIIDYGLAKKYRDLQTHKHIPYRENKNLTGTARYASVNTHLGIGESFFIASHIFPSLPWQGLRAGTKKQKYDKISEKKRLTPVEVLCKNFPPEFTSYFLYVRSLRFEDKPDYSYLKRLFRDLFIREGYQFDYVFDWTILRYPQFGSSSSSNSKPRPTLRPAMNIPVPSADKAEKPPIGQDSRERFSGVFEAYTRRNGSGTGVQADQSSRPRTSENVLASKDTQNQERPNSLSRNLSSSRKAIAGSSVRATSSADFTENRLSRLIPNNDRSSTTLRTQFAPSSSSVATKAAPTRAARDITLQSLELLSIGNSKRK

SEQ ID NO: 85650 - protein, 403 aa, Arabidopsis thaliana
  peptide (1)..(403): Ceres Seq. ID no. 12681617
  misc_feature (1)..(403): Homolog of NCBI NO: 25287643 NR Description: protein F19P19.10 [imported] - Arabidopsis
  misc_feature (1)..(403): Homolog of NCBI NO: 15219733 NR Description: putative casein kinase I; protein id: At1g04440.1
  misc_feature (1)..(403): Homolog of NCBI NO: 27754653 NR Description: putative casein kinase I [Arabidopsis thaliana]
  misc_feature (1)..(396): Homolog of NCBI NO: 15239840 NR Description: casein kinase I; protein id: At5g43320.1, by cDNA: gi_13430689, supported by cDNA: gi_14532893 [Arabidopsis >gi|8843885|dbj|BAA97411.1| casein kinase I [Arabidopsis
  misc_feature (1)..(403): Homolog of NCBI NO: 15236471 NR Description: casein kinase I; protein id: At4g14340.1, by cDNA: gi_15450524, supported by cDNA: gi_16974430, supported cDNA: gi_9965744 [Arabidopsis thaliana] >gi|7488072|pir||C71405
  misc_feature (1)..(356): Homolog of NCBI NO: 15229427 NR Description: putative casein kinase I; protein id: supported by cDNA: gi_15809823, supported by cDNA: gi_18377818 thaliana] >gi|11994319|dbj|BAB02278.1| casein kinase [Arabidopsis
  misc_feature (1)..(397): Homolog of NCBI NO: 30678728 NR Description: protein kinase (ADK1) [Arabidopsis thaliana]
  misc_feature (1)..(356): Homolog of NCBI NO: 15240091 NR Description: casein kinase I; protein id: At5g44100.1, by cDNA: gi_18087639 [Arabidopsis thaliana]
  misc_feature (1)..(356): Homolog of NCBI NO: 18087640 NR Description: AT5g44100/MLN1_2 [Arabidopsis thaliana]
  misc_feature (1)..(356): Homolog of NCBI NO: 1197461 NR Description: casein kinase I [Arabidopsis thaliana]
MLLQGGTGIPHLKWFGVEGEFNCMVIDLLGPSMEEFFNYCSRSFSLKTVLMLADQMINRVEYMHVKGFLHRDIKPDNFLMGLGRKANQVYIIDYGLAKKYRDLQTHKHIPYRENKNLTGTARYASVNTHLGIGESFFIASHIFPSLPWQGLRAGTKKQKYDKISEKKRLTPVEVLCKNFPPEFTSYFLYVRSLRFEDKPDYSYLKRLFRDLFIREGYQFDYVFDWTILRYPQFGSSSSSNSKPRPTLRPAMNIPVPSADKAEKPPIGQDSRERFSGVFEAYTRRNGSGTGVQADQSSRPRTSENVLASKDTQNQERPNSLSRNLSSSRKAIAGSSVRATSSADFTENRLSRLIPNNDRSSTTLRTQFAPSSSSVATKAAPTRAARDITLQSLELLSIGNSKRK

SEQ ID NO: 85651 - protein, 380 aa, Arabidopsis thaliana
  peptide (1)..(380): Ceres Seq. ID no. 12681618
  misc_feature (1)..(380): Homolog of NCBI NO: 25287643 NR Description: protein F19P19.10 [imported] - Arabidopsis
  misc_feature (1)..(380): Homolog of NCBI NO: 15219733 NR Description: putative casein kinase I; protein id: At1g04440.1
  misc_feature (1)..(380): Homolog of NCBI NO: 27754653 NR Description: putative casein kinase I [Arabidopsis thaliana]
  misc_feature (1)..(373): Homolog of NCBI NO: 15239840 NR Description: casein kinase I; protein id: At5g43320.1, by cDNA: gi_13430689, supported by cDNA: gi_14532893 [Arabidopsis >gi|8843885|dbj|BAA97411.1| casein kinase I [Arabidopsis
  misc_feature (1)..(380): Homolog of NCBI NO: 15236471 NR Description: casein kinase I; protein id: At4g14340.1, by cDNA: gi_15450524, supported by cDNA: gi_16974430, supported cDNA: gi_9965744 [Arabidopsis thaliana] >gi|7488072|pir||C71405
  misc_feature (1)..(333): Homolog of NCBI NO: 15229427 NR Description: putative casein kinase I; protein id: supported by cDNA: gi_15809823, supported by cDNA: gi_18377818 thaliana] >gi|11994319|dbj|BAB02278.1| casein kinase [Arabidopsis
  misc_feature (1)..(374): Homolog of NCBI NO: 30678728 NR Description: protein kinase (ADK1) [Arabidopsis thaliana]
  misc_feature (1)..(333): Homolog of NCBI NO: 15240091 NR Description: casein kinase I; protein id: At5g44100.1, by cDNA: gi_18087639 [Arabidopsis thaliana]
  misc_feature (1)..(333): Homolog of NCBI NO: 18087640 NR Description: AT5g44100/MLN1_2 [Arabidopsis thaliana]
  misc_feature (1)..(333): Homolog of NCBI NO: 1197461 NR Description: casein kinase I [Arabidopsis thaliana]
MVIDLLGPSMEEFFNYCSRSFSLKTVLMLADQMINRVEYMHVKGFLHRDIKPDNFLMGLGRKANQVYIIDYGLAKKYRDLQTHKHIPYRENKNLTGTARYASVNTHLGIGESFFIASHIFPSLPWQGLRAGTKKQKYDKISEKKRLTPVEVLCKNFPPEFTSYFLYVRSLRFEDKPDYSYLKRLFRDLFIREGYQFDYVFDWTILRYPQFGSSSSSNSKPRPTLRPAMNIPVPSADKAEKPPIGQDSRERFSGVFEAYTRRNGSGTGVQADQSSRPRTSENVLASKDTQNQERPNSLSRNLSSSRKAIAGSSVRATSSADFTENRLSRLIPNNDRSSTTLRTQFAPSSSSVATKAAPTRAARDITLQSLELLSIGNSKRK

SEQ ID NO: 85652 - DNA, 1155 bp, Arabidopsis thaliana
  misc_feature (1)..(1155): Ceres Seq. ID no. 12681669
gttttgttctttcatagtcttctagatctgtagtttttttccgcgaccgcccaaaaaattctctgatcagacggtcgattggatcggagatttaaggtaaagaaaaaatggcgcaacaatcgttgatctacagtttcgtagctcgcggcacggtgatcctcgttgagttcactgatttcaaaggtaatttcacctcaatcgctgctcagtgcctccagaagcttccgtcttcgaacaacaagttcacctacaactgcgacggtcataccttcaattaccttgtcgaagatggattcacctattgtgttgttgcggttgattctgctgggaggcaaattcccatgtcctttttggaaagagtaaaagaagattttaacaagcgatatggtggtggaaaggctgcaactgctcaagcaaacagcttgaataaggagtttggctctaaactgaaagagcatatgcagtattgcatggatcatcctgatgagattagcaagcttgctaaggtgaaggcgcaagtgtcagaagttaagggtgtaatgatggaaaacattgagaaggttcttgaccgtggtgagaaaattgagcttttggtggacaaaaccgaaaatcttcgctcacaggcacaagatttcagaacaacaggaacgcagatgagaagaaagatgtggcttcagaacatgaagataaaactcatagtgctcgccatcattatcgcactgattctcatcatcgtgctctcagtttgccatgggtttaagtgttaagcccagaaaattcaaaacttctgagatctttctcactcggtacatcgtagtgccttctcttttattgttcgatcttcaatctaatgtttctgcttgaattggttttgtatagatagacatatatgtatgctactcatttgctatattgcttgcatctgatgacattgatcccttgcgaaccagtcagtacttgacaagagatccgaaactattaaatgattttgttgactgaagattgcattgtggtggtgatgataaaaatttgagattgtattgacgattatacggcgtgatgtgtgctggttactttaaatttagataagagtagtgccctctctatatcgttactagggatggtagtacatatatatacgtacgtcatattccg

SEQ ID NO: 85653 - protein, 219 aa, Arabidopsis thaliana; identical to SEQ ID NO: 23487
  peptide (1)..(219): Ceres Seq. ID no. 12681670
  misc_feature (1)..(219): Homolog of NCBI NO: 15220943 NR Description: synaptobrevin 7B, putative; protein id:
  misc_feature (1)..(219): Homolog of NCBI NO: 15225796 NR Description: putative synaptobrevin; protein id: At2g33120.1, by cDNA: 2443., supported by cDNA: gi_16930420, supported by
  misc_feature (1)..(219): Homolog of NCBI NO: 600710 NR Description: formerly called HAT24; synaptobrevin-related
  misc_feature (1)..(219): Homolog of NCBI NO: 27805753 NR Description: Vesicle-associated membrane protein 725
  misc_feature (1)..(219): Homolog of NCBI NO: 30685375 NR Description: synaptobrevin -related [Arabidopsis thaliana] putative synaptobrevin [Arabidopsis thaliana]
  misc_feature (1)..(219): Homolog of NCBI NO: 15220315 NR Description: synaptobrevin 7B, putative; protein id:
  misc_feature (1)..(219): Homolog of NCBI NO: 29150380 NR Description: synaptobrevin-like protein [Oryza sativa
  misc_feature (1)..(219): Homolog of NCBI NO: 27805765 NR Description: Putative vesicle-associated membrane protein 726
  misc_feature (1)..(194): Homolog of NCBI NO: 33347409 NR Description: synptobrevin-related protein [Pyrus pyrifolia]
  misc_feature (1)..(219): Homolog of NCBI NO: 30685571 NR Description: synaptobrevin -related [Arabidopsis thaliana]

SEQ ID NO: 85654 - protein, 141 aa, Arabidopsis thaliana; identical to SEQ ID NO: 23488
  peptide (1)..(141): Ceres Seq. ID no. 12681671
  misc_feature (1)..(141): Homolog of NCBI NO: 15220943 NR Description: synaptobrevin 7B, putative; protein id:
  misc_feature (1)..(141): Homolog of NCBI NO: 15225796 NR Description: putative synaptobrevin; protein id: At2g33120.1, by cDNA: 2443., supported by cDNA: gi_16930420, supported by
  misc_feature (1)..(141): Homolog of NCBI NO: 600710 NR Description: formerly called HAT24; synaptobrevin-related
  misc_feature (1)..(141): Homolog of NCBI NO: 27805753 NR Description: Vesicle-associated membrane protein 725
  misc_feature (1)..(141): Homolog of NCBI NO: 30685375 NR Description: synaptobrevin -related [Arabidopsis thaliana] putative synaptobrevin [Arabidopsis thaliana]
  misc_feature (1)..(141): Homolog of NCBI NO: 15220315 NR Description: synaptobrevin 7B, putative; protein id:
  misc_feature (1)..(141): Homolog of NCBI NO: 29150380 NR Description: synaptobrevin-like protein [Oryza sativa
  misc_feature (1)..(141): Homolog of NCBI NO: 27805765 NR Description: Putative vesicle-associated membrane protein 726
  misc_feature (1)..(116): Homolog of NCBI NO: 33347409 NR Description: synptobrevin-related protein [Pyrus pyrifolia]
  misc_feature (1)..(141): Homolog of NCBI NO: 30685571 NR Description: synaptobrevin -related [Arabidopsis thaliana]

SEQ ID NO: 85655 - DNA, 1332 bp, Arabidopsis thaliana
  misc_feature (1)..(1332): Ceres Seq. ID no. 12681693
  misc_feature: MA Experiment ID: 20000179 Result: Down-regulated in Transcription
  misc_feature: MA Experiment 20000179 PARAMETER Experiment Name: At_Germinating_Seeds_P Parameter: Age (hr) Value: 6 vs. 0
  misc_feature: MA Experiment 20000179 PARAMETER Experiment Name: At_Germinating_Seeds_P Parameter: Tissue Value: Germinating Seeds
  misc_feature: MA Experiment ID: 20000180 Result: Down-regulated in Transcription
  misc_feature: MA Experiment 20000180 PARAMETER Experiment Name: At_Germinating_Seeds_P Parameter: Age (hr) Value: 24 vs. 0
  misc_feature: MA Experiment 20000180 PARAMETER Experiment Name: At_Germinating_Seeds_P Parameter: Tissue Value: Germinating Seeds
  misc_feature: MA Experiment ID: 20001557 Result: Up-regulated in Transcription
  misc_feature: MA Experiment 20001557 PARAMETER Experiment Name: At_Drought_Soil_Dry_P Parameter: Age (day) Value: 27
  misc_feature: MA Experiment 20001557 PARAMETER Experiment Name: At_Drought_Soil_Dry_P Parameter: Organism Value: A. thaliana
  misc_feature: MA Experiment 20001557 PARAMETER Experiment Name: At_Drought_Soil_Dry_P Parameter: Plant Line Value: WS
  misc_feature: MA Experiment 20001557 PARAMETER Experiment Name: At_Drought_Soil_Dry_P Parameter: Post Timepoint (hr) Value: 3
  misc_feature: MA Experiment 20001557 PARAMETER Experiment Name: At_Drought_Soil_Dry_P Parameter: Post-Treatment Value: Re-Water vs. No Drought
  misc_feature: MA Experiment 20001557 PARAMETER Experiment Name: At_Drought_Soil_Dry_P Parameter: Timepoint (day) Value: 13
  misc_feature: MA Experiment 20001557 PARAMETER Experiment Name: At_Drought_Soil_Dry_P Parameter: Treatment Value: Drought vs. No Drought
  misc_feature: MA Experiment ID: 20001757 Result: Up-regulated in Transcription
  misc_feature: MA Experiment 20001757 PARAMETER Experiment Name: At_50mM_NH4NO3_L-to-H_P Parameter: Timepoint (hr) Value: 6
  misc_feature: MA Experiment 20001757 PARAMETER Experiment Name: At_50mM_NH4NO3_L-to-H_P Parameter: Tissue Value: Leaf
  misc_feature: MA Experiment 20001757 PARAMETER Experiment Name: At_50mM_NH4NO3_L-to-H_P Parameter: Treatment Value: 50mM NH4NO3 vs 100mM Mannitol
atgataactggatacagcacgccaagtgcacatgttctaatgagctctcgggcattcaagtcatcatcatatagagctgcagcaggacagactcaacattatcttgctcgaagttcattgcctgtcgtaaagaactcgtggggatcaccaccttcacctttcaatgagcttccgagagtgtcaagaggcatgtgtgcctctgtcatatctctcagcctcgtcttctctgcttctgaatggagaacaaggttccatgtagtgatgggtatgctgcttgaaatcgcactccaggttatagggaccgttagcaagtggatgcctcttggagtctattggggtaagtttgggatgcatttctggactgctgttgcgtttgcttatctgtttaccgtccttgaaagcatacggtgtgcacttgcggactacaatatgcttgaggaaacaaaaagagtagccgagtctgctctgagaaggagaagtcaattatgcaaaaatcattattcttataagttaccctatcttcttaagagccttcaaagtgctgcttatagccgcagaactaagctatggtatctccctagtggaatgttaaagagggaaaataatcagtccagatacgataataggagcaagtgtatctcgtggacaatagagtggcggtttcactctacagatgtcattcttgttgaccatgggttagtattactctctagggctgaaaatcatatttgtttattgagacatgtgggtgcaaaggctcctttcaaggagctggacatcaaagctcctttgaggaaacagcttgccaaagttgttatattagagtacccggtgatccatgtatatctaccttcacagagctatgaatttaaagttatcaaagactttaacacgacacctaatcctaatgattcgttatacgatggtcatggatgcacaaatggtataaccttccgagaagaagaaatagaagaagacgacattgactcctttgagccagaggttcttggtcttatgaaacaaatgaactataacccgtgtctgcgagtctcagagaaaagcaaggcagagggcgttggtaccaacaactcaaatcctcaggttgataccacagaacaagaagatgccggtaacatggagcttgaatttgagcaagggttaatagacacatactcagatctttttgcggagatgaacccaggtgactatttcaactttgaatgtgaatttgcaaaggggttggattcggatgataattgcaatctccaaaatttagatactgatttcatcgctgatggactagatttagaagaaggggaaatcgtcgaatga

SEQ ID NO: 85656 - protein, 443 aa, Arabidopsis thaliana
  peptide (1)..(443): Ceres Seq. ID no. 12681694
  misc_feature (1)..(443): Homolog of NCBI NO: 25406822 NR Description: hypothetical protein [imported] - Arabidopsis >gi|7211996|gb|AAF40467.1|AC004809_25 #ESTs gb|N96604, gb|T75857 and gb|H77171 come from this gene. [Arabidopsis
  misc_feature (250)..(443): Homolog of NCBI NO: 15220356 NR Description: unknown protein; protein id: At1g04940.1
  misc_feature (1)..(83): Homolog of NCBI NO: 15220356 NR Description: unknown protein; protein id: At1g04940.1
  misc_feature (79)..(140): Homolog of NCBI NO: 15220356 NR Description: unknown protein; protein id: At1g04940.1
  misc_feature (1)..(72): Homolog of NCBI NO: 26449432 NR Description: unknown protein [Arabidopsis thaliana]
  misc_feature (79)..(140): Homolog of NCBI NO: 26449432 NR Description: unknown protein [Arabidopsis thaliana]
  misc_feature (74)..(140): Homolog of NCBI NO: 6984128 NR Description: Tic20-like protein [Euphorbia esula]
  misc_feature (57)..(155): Homolog of NCBI NO: 3769673 NR Description: Tic20 [Pisum sativum]
  misc_feature (83)..(140): Homolog of NCBI NO: 15236283 NR Description: putative chloroplast protein import component; id: At4g03320.1, supported by cDNA: 111207., supported by cDNA:
  misc_feature (83)..(140): Homolog of NCBI NO: 34899836 NR Description: putative Tic20 protein [Oryza sativa (japonica
MITGYSTPSAHVLMSSRAFKSSSYRAAAGQTQHYLARSSLPVVKNSWGSPPSPFNELPRVSRGMCASVISLSLVFSASEWRTRFHVVMGMLLEIALQVIGTVSKWMPLGVYWGKFGMHFWTAVAFAYLFTVLESIRCALADYNMLEETKRVAESALRRRSQLCKNHYSYKLPYLLKSLQSAAYSRRTKLWYLPSGMLKRENNQSRYDNRSKCISWTIEWRFHSTDVILVDHGLVLLSRAENHICLLRHVGAKAPFKELDIKAPLRKQLAKVVILEYPVIHVYLPSQSYEFKVIKDFNTTPNPNDSLYDGHGCTNGITFREEEIEEDDIDSFEPEVLGLMKQMNYNPCLRVSEKSKAEGVGTNNSNPQVDTTEQEDAGNMELEFEQGLIDTYSDLFAEMNPGDYFNFECEFAKGLDSDDNCNLQNLDTDFIADGLDLEEGEIVE

SEQ ID NO: 85657 - protein, 430 aa, Arabidopsis thaliana
  peptide (1)..(430): Ceres Seq. ID no. 12681695
  misc_feature (1)..(430): Homolog of NCBI NO: 25406822 NR Description: hypothetical protein [imported] - Arabidopsis >gi|7211996|gb|AAF40467.1|AC004809_25 #ESTs gb|N96604, gb|T75857 and gb|H77171 come from this gene. [Arabidopsis
  misc_feature (237)..(430): Homolog of NCBI NO: 15220356 NR Description: unknown protein; protein id: At1g04940.1
  misc_feature (1)..(70): Homolog of NCBI NO: 15220356 NR Description: unknown protein; protein id: At1g04940.1
  misc_feature (66)..(127): Homolog of NCBI NO: 15220356 NR Description: unknown protein; protein id: At1g04940.1
  misc_feature (1)..(59): Homolog of NCBI NO: 26449432 NR Description: unknown protein [Arabidopsis thaliana]
  misc_feature (66)..(127): Homolog of NCBI NO: 26449432 NR Description: unknown protein [Arabidopsis thaliana]
  misc_feature (61)..(127): Homolog of NCBI NO: 6984128 NR Description: Tic20-like protein [Euphorbia esula]
  misc_feature (44)..(142): Homolog of NCBI NO: 3769673 NR Description: Tic20 [Pisum sativum]
  misc_feature (70)..(127): Homolog of NCBI NO: 15236283 NR Description: putative chloroplast protein import component; id: At4g03320.1, supported by cDNA: 111207., supported by cDNA:
  misc_feature (70)..(127): Homolog of NCBI NO: 34899836 NR Description: putative Tic20 protein [Oryza sativa (japonica
MSSRAFKSSSYRAAAGQTQHYLARSSLPVVKNSWGSPPSPFNELPRVSRGMCASVISLSLVFSASEWRTRFHVVMGMLLEIALQVIGTVSKWMPLGVYWGKFGMHFWTAVAFAYLFTVLESIRCALADYNMLEETKRVAESALRRRSQLCKNHYSYKLPYLLKSLQSAAYSRRTKLWYLPSGMLKRENNQSRYDNRSKCISWTIEWRFHSTDVILVDHGLVLLSRAENHICLLRHVGAKAPFKELDIKAPLRKQLAKVVILEYPVIHVYLPSQSYEFKVIKDFNTTPNPNDSLYDGHGCTNGITFREEEIEEDDIDSFEPEVLGLMKQMNYNPCLRVSEKSKAEGVGTNNSNPQVDTTEQEDAGNMELEFEQGLIDTYSDLFAEMNPGDYFNFECEFAKGLDSDDNCNLQNLDTDFIADGLDLEEGEIVE

SEQ ID NO: 85658 - protein, 380 aa, Arabidopsis thaliana
  peptide (1)..(380): Ceres Seq. ID no. 12681696
  misc_feature (1)..(380): Homolog of NCBI NO: 25406822 NR Description: hypothetical protein [imported] - Arabidopsis >gi|7211996|gb|AAF40467.1|AC004809_25 #ESTs gb|N96604, gb|T75857 and gb|H77171 come from this gene. [Arabidopsis
  misc_feature (187)..(380): Homolog of NCBI NO: 15220356 NR Description: unknown protein; protein id: At1g04940.1
  misc_feature (1)..(20): Homolog of NCBI NO: 15220356 NR Description: unknown protein; protein id: At1g04940.1
  misc_feature (16)..(77): Homolog of NCBI NO: 15220356 NR Description: unknown protein; protein id: At1g04940.1
  misc_feature (16)..(77): Homolog of NCBI NO: 26449432 NR Description: unknown protein [Arabidopsis thaliana]
  misc_feature (11)..(77): Homolog of NCBI NO: 6984128 NR Description: Tic20-like protein [Euphorbia esula]
  misc_feature (1)..(92): Homolog of NCBI NO: 3769673 NR Description: Tic20 [Pisum sativum]
  misc_feature (20)..(77): Homolog of NCBI NO: 15236283 NR Description: putative chloroplast protein import component; id: At4g03320.1, supported by cDNA: 111207., supported by cDNA:
  misc_feature (20)..(77): Homolog of NCBI NO: 34899836 NR Description: putative Tic20 protein [Oryza sativa (japonica
  misc_feature (20)..(77): Homolog of NCBI NO: 34393290 NR Description: putative Tic20 protein [Oryza sativa (japonica
MCASVISLSLVFSASEWRTRFHVVMGMLLEIALQVIGTVSKWMPLGVYWGKFGMHFWTAVAFAYLFTVLESIRCALADYNMLEETKRVAESALRRRSQLCKNHYSYKLPYLLKSLQSAAYSRRTKLWYLPSGMLKRENNQSRYDNRSKCISWTIEWRFHSTDVILVDHGLVLLSRAENHICLLRHVGAKAPFKELDIKAPLRKQLAKVVILEYPVIHVYLPSQSYEFKVIKDFNTTPNPNDSLYDGHGCTNGITFREEEIEEDDIDSFEPEVLGLMKQMNYNPCLRVSEKSKAEGVGTNNSNPQVDTTEQEDAGNMELEFEQGLIDTYSDLFAEMNPGDYFNFECEFAKGLDSDDNCNLQNLDTDFIADGLDLEEGEIVE

SEQ ID NO: 85659 - DNA, 1002 bp, Arabidopsis thaliana
  misc_feature (1)..(1002): Ceres Seq. ID no. 12681715
  misc_feature: MA Experiment ID: 108434 Result: Down-regulated in Transcription
  misc_feature: MA Experiment 108434 PARAMETER Experiment Name: At_Root_Tips_cDNA_P Parameter: Tissue Value: Root Tips
  misc_feature: MA Experiment ID: 108435 Result: Down-regulated in Transcription
  misc_feature: MA Experiment 108435 PARAMETER Experiment Name: At_stm_Mutants_cDNA_P Parameter: Plant Line Value: wt Landsburg vs stm
  misc_feature: MA Experiment 108435 PARAMETER Experiment Name: At_stm_Mutants_cDNA_P Parameter: Tissue Value: Shoot Apical Meristem Region
  misc_feature: MA Experiment ID: 108461 Result: Up-regulated in Transcription
  misc_feature: MA Experiment 108461 PARAMETER Experiment Name: At_Germinating_Seeds_cDNA_P Parameter: Age (day) Value: 1 vs. 0
  misc_feature: MA Experiment 108461 PARAMETER Experiment Name: At_Germinating_Seeds_cDNA_P Parameter: Tissue Value: Germinating Seeds
  misc_feature: MA Experiment ID: 108462 Result: Up-regulated in Transcription
  misc_feature: MA Experiment 108462 PARAMETER Experiment Name: At_Germinating_Seeds_cDNA_P Parameter: Age (day) Value: 2 vs. 0
  misc_feature: MA Experiment 108462 PARAMETER Experiment Name: At_Germinating_Seeds_cDNA_P Parameter: Tissue Value: Germinating Seeds
  misc_feature: MA Experiment ID: 108463 Result: Up-regulated in Transcription
  misc_feature: MA Experiment 108463 PARAMETER Experiment Name: At_Germinating_Seeds_cDNA_P Parameter: Age (day) Value: 3 vs. 0
  misc_feature: MA Experiment 108463 PARAMETER Experiment Name: At_Germinating_Seeds_cDNA_P Parameter: Tissue Value: Germinating Seeds
  misc_feature: MA Experiment ID: 108464 Result: Up-regulated in Transcription
  misc_feature: MA Experiment 108464 PARAMETER Experiment Name: At_Germinating_Seeds_cDNA_P Parameter: Age (day) Value: 4 vs. 0
  misc_feature: MA Experiment 108464 PARAMETER Experiment Name: At_Germinating_Seeds_cDNA_P Parameter: Tissue Value: Germinating Seeds
  misc_feature: MA Experiment ID: 108469 Result: Up-regulated in Transcription
  misc_feature: MA Experiment ID: 108488 Result: Down-regulated in Transcription
  misc_feature: MA Experiment ID: 108573 Result: Down-regulated in Transcription
  misc_feature: MA Experiment 108573 PARAMETER Experiment Name: At_Drought_cDNA_P Parameter: Timepoint (hr) Value: 6
  misc_feature: MA Experiment 108573 PARAMETER Experiment Name: At_Drought_cDNA_P Parameter: Tissue Value: Aerial
  misc_feature: MA Experiment 108573 PARAMETER Experiment Name: At_Drought_cDNA_P Parameter: Treatment Value: Drought vs. No Drought
  misc_feature: MA Experiment ID: 108577 Result: Down-regulated in Transcription
  misc_feature: MA Experiment 108577 PARAMETER Experiment Name: At_42deg_Heat_cDNA_P Parameter: Temperature (deg C) Value: 42 vs. 22
  misc_feature: MA Experiment 108577 PARAMETER Experiment Name: At_42deg_Heat_cDNA_P Parameter: Timepoint (hr) Value: 6
  misc_feature: MA Experiment 108577 PARAMETER Experiment Name: At_42deg_Heat_cDNA_P Parameter: Tissue Value: Aerial
  misc_feature: MA Experiment ID: 108594 Result: Down-regulated in Transcription
  misc_feature: MA Experiment 108594 PARAMETER Experiment Name: At_Ler-rhl_Root_cDNA_P Parameter: Plant Line Value: null
  misc_feature: MA Experiment ID: 108595 Result: Down-regulated in Transcription
  misc_feature: MA Experiment 108595 PARAMETER Experiment Name: At_Ler-pi_Ovule_cDNA_P Parameter: Plant Line Value: null
  misc_feature: MA Experiment ID: 108668 Result: Up-regulated in Transcription
  misc_feature: MA Experiment 108668 PARAMETER Experiment Name: At_2mM_SA_cDNA_P Parameter: Plant Line Value: WS
  misc_feature: MA Experiment 108668 PARAMETER Experiment Name: At_2mM_SA_cDNA_P Parameter: Timepoint (hr) Value: 6
  misc_feature: MA Experiment 108668 PARAMETER Experiment Name: At_2mM_SA_cDNA_P Parameter: Treatment Value: 2mM SA vs. No Treatment
  misc_feature: MA Experiment ID: 20000088 Result: Up-regulated in Transcription
  misc_feature: MA Experiment 20000088 PARAMETER Experiment Name: At_100uM_ABA_Mutants_cDNA_P Parameter: Plant Line Value: Landsberg
  misc_feature: MA Experiment 20000088 PARAMETER Experiment Name: At_100uM_ABA_Mutants_cDNA_P Parameter: Timepoint (hr) Value: 6
  misc_feature: MA Experiment 20000088 PARAMETER Experiment Name: At_100uM_ABA_Mutants_cDNA_P Parameter: Tissue Value: Aerial
  misc_feature: MA Experiment 20000088 PARAMETER Experiment Name: At_100uM_ABA_Mutants_cDNA_P Parameter: Treatment Value: 100uM ABA vs. No Treatment
  misc_feature: MA Experiment ID: 20000113 Result: Down-regulated in Transcription
  misc_feature: MA Experiment 20000113 PARAMETER Experiment Name: At_42deg_Heat_cDNA_P Parameter: Temperature (deg C) Value: 42 vs. 22
  misc_feature: MA Experiment 20000113 PARAMETER Experiment Name: At_42deg_Heat_cDNA_P Parameter: Timepoint (hr) Value: 8
  misc_feature: MA Experiment 20000113 PARAMETER Experiment Name: At_42deg_Heat_cDNA_P Parameter: Tissue Value: Aerial
  misc_feature: MA Experiment ID: 20000173 Result: Down-regulated in Transcription
  misc_feature: MA Experiment 20000173 PARAMETER Experiment Name: At_42deg_Heat_P Parameter: Age (day) Value: 14
  misc_feature: MA Experiment 20000173 PARAMETER Experiment Name: At_42deg_Heat_P Parameter: Organism Value: A. thaliana
  misc_feature: MA Experiment 20000173 PARAMETER Experiment Name: At_42deg_Heat_P Parameter: Plant Line Value: WS
  misc_feature: MA Experiment 20000173 PARAMETER Experiment Name: At_42deg_Heat_P Parameter: Temperature (deg C) Value: 42 vs. 22
  misc_feature: MA Experiment 20000173 PARAMETER Experiment Name: At_42deg_Heat_P Parameter: Timepoint (hr) Value: 6
  misc_feature: MA Experiment 20000173 PARAMETER Experiment Name: At_42deg_Heat_P Parameter: Tissue Value: Aerial
  misc_feature: MA Experiment ID: 20000179 Result: Down-regulated in Transcription
  misc_feature: MA Experiment 20000179 PARAMETER Experiment Name: At_Germinating_Seeds_P Parameter: Age (hr) Value: 6 vs. 0
  misc_feature: MA Experiment 20000179 PARAMETER Experiment Name: At_Germinating_Seeds_P Parameter: Tissue Value: Germinating Seeds
  misc_feature: MA Experiment ID: 20000180 Result: Up-regulated in Transcription
  misc_feature: MA Experiment 20000180 PARAMETER Experiment Name: At_Germinating_Seeds_P Parameter: Age (hr) Value: 24 vs. 0
  misc_feature: MA Experiment 20000180 PARAMETER Experiment Name: At_Germinating_Seeds_P Parameter: Tissue Value: Germinating Seeds
  misc_feature: MA Experiment ID: 20000182 Result: Up-regulated in Transcription
  misc_feature: MA Experiment 20000182 PARAMETER Experiment Name: At_2mM_SA_P Parameter: Age (day) Value: 14
  misc_feature: MA Experiment 20000182 PARAMETER Experiment Name: At_2mM_SA_P Parameter: Organism Value: A. thaliana
  misc_feature: MA Experiment 20000182 PARAMETER Experiment Name: At_2mM_SA_P Parameter: Plant Line Value: WS
  misc_feature: MA Experiment 20000182 PARAMETER Experiment Name: At_2mM_SA_P Parameter: Timepoint (hr) Value: 6
  misc_feature: MA Experiment 20000182 PARAMETER Experiment Name: At_2mM_SA_P Parameter: Tissue Value: Aerial
  misc_feature: MA Experiment 20000182 PARAMETER Experiment Name: At_2mM_SA_P Parameter: Treatment Value: 2mM SA vs. No Treatment
  misc_feature: MA Experiment ID: 20000184 Result: Up-regulated in Transcription
  misc_feature: MA Experiment 20000184 PARAMETER Experiment Name: At_Shoots__P Parameter: Age (day) Value: 7
  misc_feature: MA Experiment 20000184 PARAMETER Experiment Name: At_Shoots__P Parameter: Tissue Value: Shoots vs. Whole Plant
  misc_feature: MA Experiment ID: 20000234 Result: Down-regulated in Transcription
  misc_feature: MA Experiment 20000234 PARAMETER Experiment Name: At_Siliques_P Parameter: Age (day) Value: 21
  misc_feature: MA Experiment 20000234 PARAMETER Experiment Name: At_Siliques_P Parameter: Organism Value: A. thaliana
  misc_feature: MA Experiment 20000234 PARAMETER Experiment Name: At_Siliques_P Parameter: Plant Line Value: WS
  misc_feature: MA Experiment 20000234 PARAMETER Experiment Name: At_Siliques_P Parameter: Tissue Value: Less Than 5mm Siliques vs. Whole Plant
  misc_feature: MA Experiment ID: 20000264 Result: Down-regulated in Transcription
  misc_feature: MA Experiment 20000264 PARAMETER Experiment Name: At_Open_Flower_P Parameter: Age (day) Value: 21
  misc_feature: MA Experiment 20000264 PARAMETER Experiment Name: At_Open_Flower_P Parameter: Plant Line Value: WS
  misc_feature: MA Experiment 20000264 PARAMETER Experiment Name: At_Open_Flower_P Parameter: Tissue Value: Open Flower vs. Whole Plant
  misc_feature: MA Experiment ID: 20000265 Result: Down-regulated in Transcription
  misc_feature: MA Experiment 20000265 PARAMETER Experiment Name: At_Open_Flower_P Parameter: Age (day) Value: 21
  misc_feature: MA Experiment 20000265 PARAMETER Experiment Name: At_Open_Flower_P Parameter: Plant Line Value: WS
  misc_feature: MA Experiment 20000265 PARAMETER Experiment Name: At_Open_Flower_P Parameter: Tissue Value: Closed Flower vs. Whole Plant
  misc_feature: MA Experiment ID: 20000286 Result: Down-regulated in Transcription
  misc_feature: MA Experiment 20000286 PARAMETER Experiment Name: At_Open_Flower_P Parameter: Age (day) Value: 21
  misc_feature: MA Experiment 20000286 PARAMETER Experiment Name: At_Open_Flower_P Parameter: Plant Line Value: WS
  misc_feature: MA Experiment 20000286 PARAMETER Experiment Name: At_Open_Flower_P Parameter: Tissue Value: Half Open vs. Whole Plant
  misc_feature: MA Experiment ID: 20000436 Result: Down-regulated in Transcription
  misc_feature: MA Experiment 20000436 PARAMETER Experiment Name: At_Drought_P Parameter: Age (day) Value: 7
  misc_feature: MA Experiment 20000436 PARAMETER Experiment Name: At_Drought_P Parameter: Organism Value: A. thaliana
  misc_feature: MA Experiment 20000436 PARAMETER Experiment Name: At_Drought_P Parameter: Plant Line Value: WS
  misc_feature: MA Experiment 20000436 PARAMETER Experiment Name: At_Drought_P Parameter: Timepoint (hr) Value: 12
  misc_feature: MA Experiment 20000436 PARAMETER Experiment Name: At_Drought_P Parameter: Tissue Value: Whole Plant
  misc_feature: MA Experiment 20000436 PARAMETER Experiment Name: At_Drought_P Parameter: Treatment Value: Drought vs. No Drought
  misc_feature: MA Experiment ID: 20000437 Result: Down-regulated in Transcription
  misc_feature: MA Experiment 20000437 PARAMETER Experiment Name: At_Drought_P Parameter: Age (day) Value: 8
  misc_feature: MA Experiment 20000437 PARAMETER Experiment Name: At_Drought_P Parameter: Organism Value: A. thaliana
  misc_feature: MA Experiment 20000437 PARAMETER Experiment Name: At_Drought_P Parameter: Plant Line Value: WS
  misc_feature: MA Experiment 20000437 PARAMETER Experiment Name: At_Drought_P Parameter: Timepoint (hr) Value: 24
  misc_feature: MA Experiment 20000437 PARAMETER Experiment Name: At_Drought_P Parameter: Tissue Value: Whole Plant
  misc_feature: MA Experiment 20000437 PARAMETER Experiment Name: At_Drought_P Parameter: Treatment Value: Drought vs. No Drought
  misc_feature: MA Experiment ID: 20000438 Result: Up-regulated in Transcription
  misc_feature: MA Experiment 20000438 PARAMETER Experiment Name: At_Shoots__P Parameter: Age (day) Value: 14
  misc_feature: MA Experiment 20000438 PARAMETER Experiment Name: At_Shoots__P Parameter: Tissue Value: Shoots vs. Whole Plant
  misc_feature: MA Experiment ID: 20000439 Result: Down-regulated in Transcription
  misc_feature: MA Experiment 20000439 PARAMETER Experiment Name: At_Roots__P Parameter: Age (day) Value: 14 vs. 21
  misc_feature: MA Experiment 20000439 PARAMETER Experiment Name: At_Roots__P Parameter: Organism Value: A. thaliana
  misc_feature: MA Experiment 20000439 PARAMETER Experiment Name: At_Roots__P Parameter: Tissue Value: Roots vs. Whole Plant
  misc_feature: MA Experiment ID: 20000441 Result: Up-regulated in Transcription
  misc_feature: MA Experiment 20000441 PARAMETER Experiment Name: At_1uM_BR-BRZ__P Parameter: Tissue Value: Shoot Apices
  misc_feature: MA Experiment 20000441 PARAMETER Experiment Name: At_1uM_BR-BRZ__P Parameter: Treatment Value: 1uM BR vs. No Treatment
  misc_feature: MA Experiment ID: 20000527 Result: Down-regulated in Transcription
  misc_feature: MA Experiment 20000527 PARAMETER Experiment Name: At_10percent_PEG_P Parameter: Age (day) Value: 20
  misc_feature: MA Experiment 20000527 PARAMETER Experiment Name: At_10percent_PEG_P Parameter: Organism Value: A. thaliana
  misc_feature: MA Experiment 20000527 PARAMETER Experiment Name: At_10percent_PEG_P Parameter: Plant Line Value: WS
  misc_feature: MA Experiment 20000527 PARAMETER Experiment Name: At_10percent_PEG_P Parameter: Timepoint (day) Value: 20
  misc_feature: MA Experiment 20000527 PARAMETER Experiment Name: At_10percent_PEG_P Parameter: Tissue Value: Whole Plant
  misc_feature: MA Experiment 20000527 PARAMETER Experiment Name: At_10percent_PEG_P Parameter: Treatment Value: 10percent PEG vs. No Treatment
  misc_feature: MA Experiment ID: 20001248 Result: Up-regulated in Transcription
  misc_feature: MA Experiment 20001248 PARAMETER Experiment Name: At_Far-red-induction_P Parameter: Age (day) Value: 7
  misc_feature: MA Experiment 20001248 PARAMETER Experiment Name: At_Far-red-induction_P Parameter: Light Value: Far-red vs. White
  misc_feature: MA Experiment 20001248 PARAMETER Experiment Name: At_Far-red-induction_P Parameter: Organism Value: A. thaliana
  misc_feature: MA Experiment 20001248 PARAMETER Experiment Name: At_Far-red-induction_P Parameter: Plant Line Value: Columbia
  misc_feature: MA Experiment 20001248 PARAMETER Experiment Name: At_Far-red-induction_P Parameter: Timepoint (hr) Value: 4
  misc_feature: MA Experiment 20001248 PARAMETER Experiment Name: At_Far-red-induction_P Parameter: Tissue Value: Whole Plant
  misc_feature: MA Experiment ID: 20001554 Result: Down-regulated in Transcription
  misc_feature: MA Experiment 20001554 PARAMETER Experiment Name: At_Drought_Soil_Dry_P Parameter: Age (day) Value: 21
  misc_feature: MA Experiment 20001554 PARAMETER Experiment Name: At_Drought_Soil_Dry_P Parameter: Organism Value: A. thaliana
  misc_feature: MA Experiment 20001554 PARAMETER Experiment Name: At_Drought_Soil_Dry_P Parameter: Plant Line Value: WS
  misc_feature: MA Experiment 20001554 PARAMETER Experiment Name: At_Drought_Soil_Dry_P Parameter: Post Timepoint (hr) Value: None
  misc_feature: MA Experiment 20001554 PARAMETER Experiment Name: At_Drought_Soil_Dry_P Parameter: Post-Treatment Value: None
  misc_feature: MA Experiment 20001554 PARAMETER Experiment Name: At_Drought_Soil_Dry_P Parameter: Timepoint (day) Value: 7
  misc_feature: MA Experiment 20001554 PARAMETER Experiment Name: At_Drought_Soil_Dry_P Parameter: Treatment Value: Drought vs. No Drought
  misc_feature: MA Experiment ID: 20001555 Result: Down-regulated in Transcription
  misc_feature: MA Experiment 20001555 PARAMETER Experiment Name: At_Drought_Soil_Dry_P Parameter: Age (day) Value: 24
  misc_feature: MA Experiment 20001555 PARAMETER Experiment Name: At_Drought_Soil_Dry_P Parameter: Organism Value: A. thaliana
  misc_feature: MA Experiment 20001555 PARAMETER Experiment Name: At_Drought_Soil_Dry_P Parameter: Plant Line Value: WS
  misc_feature: MA Experiment 20001555 PARAMETER Experiment Name: At_Drought_Soil_Dry_P Parameter: Post Timepoint (hr) Value: None
  misc_feature: MA Experiment 20001555 PARAMETER Experiment Name: At_Drought_Soil_Dry_P Parameter: Post-Treatment Value: None
  misc_feature: MA Experiment 20001555 PARAMETER Experiment Name: At_Drought_Soil_Dry_P Parameter: Timepoint (day) Value: 10
  misc_feature: MA Experiment 20001555 PARAMETER Experiment Name: At_Drought_Soil_Dry_P Parameter: Treatment Value: Drought vs. No Drought
  misc_feature: MA Experiment ID: 20001557 Result: Up-regulated in Transcription
  misc_feature: MA Experiment 20001557 PARAMETER Experiment Name: At_Drought_Soil_Dry_P Parameter: Age (day) Value: 27
  misc_feature: MA Experiment 20001557 PARAMETER Experiment Name: At_Drought_Soil_Dry_P Parameter: Organism Value: A. thaliana
  misc_feature: MA Experiment 20001557 PARAMETER Experiment Name: At_Drought_Soil_Dry_P Parameter: Plant Line Value: WS
  misc_feature: MA Experiment 20001557 PARAMETER Experiment Name: At_Drought_Soil_Dry_P Parameter: Post Timepoint (hr) Value: 3
  misc_feature: MA Experiment 20001557 PARAMETER Experiment Name: At_Drought_Soil_Dry_P Parameter: Post-Treatment Value: Re-Water vs. No Drought
  misc_feature: MA Experiment 20001557 PARAMETER Experiment Name: At_Drought_Soil_Dry_P Parameter: Timepoint (day) Value: 13
  misc_feature: MA Experiment 20001557 PARAMETER Experiment Name: At_Drought_Soil_Dry_P Parameter: Treatment Value: Drought vs. No Drought
  misc_feature: MA Experiment ID: 20001905 Result: Up-regulated in Transcription
  misc_feature: MA Experiment 20001905 PARAMETER Experiment Name: At_Drought_Reproduction_P Parameter: Age (day) Value: 40
  misc_feature: MA Experiment 20001905 PARAMETER Experiment Name: At_Drought_Reproduction_P Parameter: Organism Value: A. thaliana
  misc_feature: MA Experiment 20001905 PARAMETER Experiment Name: At_Drought_Reproduction_P Parameter: Plant Line Value: WS
  misc_feature: MA Experiment 20001905 PARAMETER Experiment Name: At_Drought_Reproduction_P Parameter: Timepoint (day) Value: 10
  misc_feature: MA Experiment 20001905 PARAMETER Experiment Name: At_Drought_Reproduction_P Parameter: Tissue Value: Rosettes
  misc_feature: MA Experiment 20001905 PARAMETER Experiment Name: At_Drought_Reproduction_P Parameter: Treatment Value: Drought vs. No Drought
  misc_feature: MA Experiment ID: 20001911 Result: Down-regulated in Transcription
  misc_feature: MA Experiment 20001911 PARAMETER Experiment Name: At_Drought_Reproduction_P Parameter: Age (day) Value: 40
  misc_feature: MA Experiment 20001911 PARAMETER Experiment Name: At_Drought_Reproduction_P Parameter: Organism Value: A. thaliana
  misc_feature: MA Experiment 20001911 PARAMETER Experiment Name: At_Drought_Reproduction_P Parameter: Plant Line Value: WS
  misc_feature: MA Experiment 20001911 PARAMETER Experiment Name: At_Drought_Reproduction_P Parameter: Timepoint (day) Value: 10
  misc_feature: MA Experiment 20001911 PARAMETER Experiment Name: At_Drought_Reproduction_P Parameter: Tissue Value: Flowers
  misc_feature: MA Experiment 20001911 PARAMETER Experiment Name: At_Drought_Reproduction_P Parameter: Treatment Value: Drought vs. No Drought
atggagagtttcccgatcatcaatctcgagaagcttaatggagaagagagagcaatcactatggagaagatcaaagacgcttgtgaaaactggggcttctttgagtgtgtgaaccatgggatttcactcgagcttttggacaaagtggagaagatgaccaaggaacattacaagaagtgcatggaagagagattcaaggaatcgattaagaacagaggtcttgactctcttcgctctgaagtcaacgacgttgactgggaatccactttctacctcaagcaccttcccgtctctaatatctccgatgtccctgatctcgacgacgattacagaacgttaatgaaagacttcgccggaaagatagagaagttgtcggaggagctactggatctgctgtgcgagaatctcggtttagagaagggttatttaaaaaaggtgttttacgggtcgaaaagaccgacttttggaaccaaagtcagcaattatccaccttgtcctaatccggacctagtcaagggtctccgagcccacaccgacgccggcggcatcatcctcctcttccaagacgacaaagtcagtggacttcagcttcttaaagacggcgagtgggtcgatgttcctccggttaagcattcaatcgtcgttaatctcggcgatcaacttgaggtgataaccaatgggaagtacaagagtgtggaacatagagtgctatctcagacagacggagaaggaagaatgtcgatcgcatcattctataatccgggaagcgactctgttatttttccggcgccggagctgatcggaaaagaagcagagaaggagaagaaagagaactatccgagatttgtgtttgaagattacatgaaactctactctgctgtcaagtttcaggccaaggaaccaaggtttgaagccatgaaagctatggagacaactgtggccaacaatgttggaccattggccactgcgtgaatgatatgtaactggttaataaatatatat

SEQ ID NO: 85660 - protein, 323 aa, Arabidopsis thaliana; identical to SEQ ID NO: 25991
  peptide (1)..(323): Ceres Seq. ID no. 12681716
  misc_feature (153)..(254): Pfam Name: 2OG-Fe(II) oxygenase superfamily Pfam Description: 2OG-Fe(II) oxygenase superfamily
  misc_feature (1)..(323): Homolog of NCBI NO: 15220386 NR Description: 1-aminocyclopropane-1-carboxylate oxidase; id: At1g05010.1, supported by cDNA: gi_13877784 [Arabidopsis
  misc_feature (1)..(323): Homolog of NCBI NO: 541861 NR Description: ethylene-forming enzyme - Arabidopsis thaliana
  misc_feature (1)..(323): Homolog of NCBI NO: 13877785 NR Description: putative 1-aminocyclopropane-1-carboxylate
  misc_feature (1)..(323): Homolog of NCBI NO: 27447954 NR Description: putative 1-aminocyclopropane-1-carboxylate
  misc_feature (1)..(323): Homolog of NCBI NO: 7576446 NR Description: 1-aminocyclopropane-1-carboxylate oxidase
  misc_feature (1)..(322): Homolog of NCBI NO: 14573463 NR Description: 1-aminocyclopropane-1-carboxylate oxidase
  misc_feature (1)..(322): Homolog of NCBI NO: 398994 NR Description: 1-aminocyclopropane-1-carboxylate oxidase (ACC
  misc_feature (1)..(323): Homolog of NCBI NO: 584711 NR Description: 1-aminocyclopropane-1-carboxylate oxidase 3 (ACC
  misc_feature (1)..(323): Homolog of NCBI NO: 532530 NR Description: 1-aminocyclopropane-1-carboxylate oxidase
  misc_feature (1)..(323): Homolog of NCBI NO: 1085595 NR Description: 1-aminocyclopropane-1-carboxylate oxidase

SEQ ID NO: 85661 - protein, 303 aa, Arabidopsis thaliana; identical to SEQ ID NO: 25992
  peptide (1)..(303): Ceres Seq. ID no. 12681717
  misc_feature (133)..(234): Pfam Name: 2OG-Fe(II) oxygenase superfamily Pfam Description: 2OG-Fe(II) oxygenase superfamily
  misc_feature (1)..(303): Homolog of NCBI NO: 15220386 NR Description: 1-aminocyclopropane-1-carboxylate oxidase; id: At1g05010.1, supported by cDNA: gi_13877784 [Arabidopsis
  misc_feature (1)..(303): Homolog of NCBI NO: 541861 NR Description: ethylene-forming enzyme - Arabidopsis thaliana
  misc_feature (1)..(303): Homolog of NCBI NO: 13877785 NR Description: putative 1-aminocyclopropane-1-carboxylate
  misc_feature (1)..(303): Homolog of NCBI NO: 27447954 NR Description: putative 1-aminocyclopropane-1-carboxylate
  misc_feature (1)..(303): Homolog of NCBI NO: 7576446 NR Description: 1-aminocyclopropane-1-carboxylate oxidase
  misc_feature (1)..(302): Homolog of NCBI NO: 14573463 NR Description: 1-aminocyclopropane-1-carboxylate oxidase
  misc_feature (1)..(302): Homolog of NCBI NO: 398994 NR Description: 1-aminocyclopropane-1-carboxylate oxidase (ACC
  misc_feature (1)..(303): Homolog of NCBI NO: 584711 NR Description: 1-aminocyclopropane-1-carboxylate oxidase 3 (ACC
  misc_feature (1)..(303): Homolog of NCBI NO: 532530 NR Description: 1-aminocyclopropane-1-carboxylate oxidase
  misc_feature (1)..(303): Homolog of NCBI NO: 1085595 NR Description: 1-aminocyclopropane-1-carboxylate oxidase

SEQ ID NO: 85662 - protein, 272 aa, Arabidopsis thaliana
  peptide (1)..(272): Ceres Seq. ID no. 12681718
  misc_feature (102)..(203): Pfam Name: 2OG-Fe(II) oxygenase superfamily Pfam Description: 2OG-Fe(II) oxygenase superfamily
  misc_feature (1)..(272): Homolog of NCBI NO: 15220386 NR Description: 1-aminocyclopropane-1-carboxylate oxidase; id: At1g05010.1, supported by cDNA: gi_13877784 [Arabidopsis
  misc_feature (1)..(272): Homolog of NCBI NO: 541861 NR Description: ethylene-forming enzyme - Arabidopsis thaliana
  misc_feature (1)..(272): Homolog of NCBI NO: 13877785 NR Description: putative 1-aminocyclopropane-1-carboxylate
  misc_feature (1)..(272): Homolog of NCBI NO: 27447954 NR Description: putative 1-aminocyclopropane-1-carboxylate
  misc_feature (1)..(272): Homolog of NCBI NO: 7576446 NR Description: 1-aminocyclopropane-1-carboxylate oxidase
  misc_feature (1)..(271): Homolog of NCBI NO: 14573463 NR Description: 1-aminocyclopropane-1-carboxylate oxidase
  misc_feature (1)..(271): Homolog of NCBI NO: 398994 NR Description: 1-aminocyclopropane-1-carboxylate oxidase (ACC
  misc_feature (1)..(272): Homolog of NCBI NO: 584711 NR Description: 1-aminocyclopropane-1-carboxylate oxidase 3 (ACC
  misc_feature (1)..(272): Homolog of NCBI NO: 532530 NR Description: 1-aminocyclopropane-1-carboxylate oxidase
  misc_feature (1)..(272): Homolog of NCBI NO: 1085595 NR Description: 1-aminocyclopropane-1-carboxylate oxidase
MTKEHYKKCMEERFKESIKNRGLDSLRSEVNDVDWESTFYLKHLPVSNISDVPDLDDDYRTLMKDFAGKIEKLSEELLDLLCENLGLEKGYLKKVFYGSKRPTFGTKVSNYPPCPNPDLVKGLRAHTDAGGIILLFQDDKVSGLQLLKDGEWVDVPPVKHSIVVNLGDQLEVITNGKYKSVEHRVLSQTDGEGRMSIASFYNPGSDSVIFPAPELIGKEAEKEKKENYPRFVFEDYMKLYSAVKFQAKEPRFEAMKAMETTVANNVGPLATA

SEQ ID NO: 85663 - DNA, 984 bp, Arabidopsis thaliana
  misc_feature (1)..(984): Ceres Seq. ID no. 12681747
  misc_feature: MA Experiment ID: 20000355 Result: Down-regulated in Transcription
  misc_feature: MA Experiment 20000355 PARAMETER Experiment Name: At_Siliques_Sub_P Parameter: Age (day) Value: 21
  misc_feature: MA Experiment 20000355 PARAMETER Experiment Name: At_Siliques_Sub_P Parameter: Organism Value: A. thaliana
  misc_feature: MA Experiment 20000355 PARAMETER Experiment Name: At_Siliques_Sub_P Parameter: Plant Line Value: WS
  misc_feature: MA Experiment 20000355 PARAMETER Experiment Name: At_Siliques_Sub_P Parameter: Tissue Value: Less Than 5mm Siliques vs. Whole Plant
  misc_feature: MA Experiment ID: 20000440 Result: Down-regulated in Transcription
  misc_feature: MA Experiment 20000440 PARAMETER Experiment Name: At_Closed-Flower__Sub_P Parameter: Tissue Value: Closed Flower vs. Whole Plant
atgagaatcacacaaaacgtcaagctcttactcttcttcttcttcttcatctccttcctcttcatcgccgtatccgccggcgagtctaaatgcgagtgttcacacgaagacgacgaggcaaacaaagccggagcaaaaaaatacaagatcgccgcaattccttccgttctggccgccggagttatcggcgttatgtttccgttactaggcaagttcttcccgtcgcttaaaccggagacgactttcttcttcgtgacgaaagccttcgccgccggcgtaatcctcgcaacggggtttatgcatgtgttgcctgaaggttacgagaagctgacgtcaccgtgtctgaaaggagaagcctgggagtttccgttcacaggctttatcgcgatggtcgctgcgattttgactctttccgttgactcttttgccacgtcgtatttccataaagcgcattttaaaacgtctaagaggattggtgacggtgaggaacaagacgttcagcttcaccggactcgagttgttgcacaggtgttggaagtgggaataatagtacattcagtggtaataggaatatcactgggagcatcacaaagtccagacactgccaaagctctctttgctgctttaatgtttcatcaatgcttcgagggtcttggtcttggtggttgcatcgcccagggaaatttcaattgtatgtcaattacaataatgtcgatctttttctctgtaacgacgccggtaggaatcgcggttggaatggcaatttcaagctcttatgatgattcgagtccaacggctctgatcgtacagggagtccttaacgctgcatctgcaggcatcctcatctatatgtctctagtggactttctcgcagcagattttatgcaccctaagatgcagtctaacactagacttcaaatcatggctcatatctctcttcttgttggagcaggggttatgtcacttttagctaaatgggcttaa

SEQ ID NO: 85664 - protein, 327 aa, Arabidopsis thaliana
  peptide (1)..(327): Ceres Seq. ID no. 12681748
  misc_feature (46)..(324): Pfam Name: ZIP Zinc transporter Pfam Description: ZIP Zinc transporter
  misc_feature (4)..(327): Homolog of NCBI NO: 15225219 NR Description: putative Fe(II) transporter; protein id: supported by cDNA: gi_3252869 [Arabidopsis thaliana]
  misc_feature (4)..(327): Homolog of NCBI NO: 25347109 NR Description: zinc transporter ZIP3 [validated] - Arabidopsis >gi|3252870|gb|AAC24199.1| putative zinc transporter [Arabidopsis
MRITQNVKLLLFFFFFISFLFIAVSAGESKCECSHEDDEANKAGAKKYKIAAIPSVLAAGVIGVMFPLLGKFFPSLKPETTFFFVTKAFAAGVILATGFMHVLPEGYEKLTSPCLKGEAWEFPFTGFIAMVAAILTLSVDSFATSYFHKAHFKTSKRIGDGEEQDVQLHRTRVVAQVLEVGIIVHSVVIGISLGASQSPDTAKALFAALMFHQCFEGLGLGGCIAQGNFNCMSITIMSIFFSVTTPVGIAVGMAISSSYDDSSPTALIVQGVLNAASAGILIYMSLVDFLAADFMHPKMQSNTRLQIMAHISLLVGAGVMSLLAKWA

SEQ ID NO: 85665 - protein, 263 aa, Arabidopsis thaliana
  peptide (1)..(263): Ceres Seq. ID no. 12681749
  misc_feature (1)..(260): Pfam Name: ZIP Zinc transporter Pfam Description: ZIP Zinc transporter
  misc_feature (1)..(263): Homolog of NCBI NO: 15225219 NR Description: putative Fe(II) transporter; protein id: supported by cDNA: gi_3252869 [Arabidopsis thaliana]
  misc_feature (1)..(263): Homolog of NCBI NO: 25347109 NR Description: zinc transporter ZIP3 [validated] - Arabidopsis >gi|3252870|gb|AAC24199.1| putative zinc transporter [Arabidopsis
MFPLLGKFFPSLKPETTFFFVTKAFAAGVILATGFMHVLPEGYEKLTSPCLKGEAWEFPFTGFIAMVAAILTLSVDSFATSYFHKAHFKTSKRIGDGEEQDVQLHRTRVVAQVLEVGIIVHSVVIGISLGASQSPDTAKALFAALMFHQCFEGLGLGGCIAQGNFNCMSITIMSIFFSVTTPVGIAVGMAISSSYDDSSPTALIVQGVLNAASAGILIYMSLVDFLAADFMHPKMQSNTRLQIMAHISLLVGAGVMSLLAKWA

SEQ ID NO: 85666 - protein, 228 aa, Arabidopsis thaliana
  peptide (1)..(228): Ceres Seq. ID no. 12681750
  misc_feature (1)..(225): Pfam Name: ZIP Zinc transporter Pfam Description: ZIP Zinc transporter
  misc_feature (1)..(228): Homolog of NCBI NO: 15225219 NR Description: putative Fe(II) transporter; protein id: supported by cDNA: gi_3252869 [Arabidopsis thaliana]
  misc_feature (1)..(228): Homolog of NCBI NO: 25347109 NR Description: zinc transporter ZIP3 [validated] - Arabidopsis >gi|3252870|gb|AAC24199.1| putative zinc transporter [Arabidopsis
MHVLPEGYEKLTSPCLKGEAWEFPFTGFIAMVAAILTLSVDSFATSYFHKAHFKTSKRIGDGEEQDVQLHRTRVVAQVLEVGIIVHSVVIGISLGASQSPDTAKALFAALMFHQCFEGLGLGGCIAQGNFNCMSITIMSIFFSVTTPVGIAVGMAISSSYDDSSPTALIVQGVLNAASAGILIYMSLVDFLAADFMHPKMQSNTRLQIMAHISLLVGAGVMSLLAKWA

SEQ ID NO: 85667 - DNA, 1014 bp, Arabidopsis thaliana
  misc_feature (1)..(1014): Ceres Seq. ID no. 12681800
  misc_feature: MA Experiment ID: 108461 Result: Up-regulated in Transcription
  misc_feature: MA Experiment 108461 PARAMETER Experiment Name: At_Germinating_Seeds_cDNA_P Parameter: Age (day) Value: 1 vs. 0
  misc_feature: MA Experiment 108461 PARAMETER Experiment Name: At_Germinating_Seeds_cDNA_P Parameter: Tissue Value: Germinating Seeds
  misc_feature: MA Experiment ID: 108488 Result: Down-regulated in Transcription
  misc_feature: MA Experiment ID: 108561 Result: Up-regulated in Transcription
  misc_feature: MA Experiment 108561 PARAMETER Experiment Name: At_100uM_ABA_cDNA_P Parameter: Timepoint (hr) Value: 6
  misc_feature: MA Experiment 108561 PARAMETER Experiment Name: At_100uM_ABA_cDNA_P Parameter: Tissue Value: Aerial
  misc_feature: MA Experiment 108561 PARAMETER Experiment Name: At_100uM_ABA_cDNA_P Parameter: Treatment Value: 100uM ABA vs. No Treatment
  misc_feature: MA Experiment ID: 108572 Result: Up-regulated in Transcription
  misc_feature: MA Experiment 108572 PARAMETER Experiment Name: At_Drought_cDNA_P Parameter: Timepoint (hr) Value: 1
  misc_feature: MA Experiment 108572 PARAMETER Experiment Name: At_Drought_cDNA_P Parameter: Tissue Value: Aerial
  misc_feature: MA Experiment 108572 PARAMETER Experiment Name: At_Drought_cDNA_P Parameter: Treatment Value: Drought vs. No Drought
  misc_feature: MA Experiment ID: 108573 Result: Up-regulated in Transcription
  misc_feature: MA Experiment 108573 PARAMETER Experiment Name: At_Drought_cDNA_P Parameter: Timepoint (hr) Value: 6
  misc_feature: MA Experiment 108573 PARAMETER Experiment Name: At_Drought_cDNA_P Parameter: Tissue Value: Aerial
  misc_feature: MA Experiment 108573 PARAMETER Experiment Name: At_Drought_cDNA_P Parameter: Treatment Value: Drought vs. No Drought
  misc_feature: MA Experiment ID: 108605 Result: Up-regulated in Transcription
  misc_feature: MA Experiment 108605 PARAMETER Experiment Name: At_100uM_ABA_cDNA_P Parameter: Timepoint (hr) Value: 6
  misc_feature: MA Experiment 108605 PARAMETER Experiment Name: At_100uM_ABA_cDNA_P Parameter: Tissue Value: Aerial
  misc_feature: MA Experiment 108605 PARAMETER Experiment Name: At_100uM_ABA_cDNA_P Parameter: Treatment Value: 100uM ABA vs. No Treatment
  misc_feature: MA Experiment ID: 108607 Result: Up-regulated in Transcription
  misc_feature: MA Experiment 108607 PARAMETER Experiment Name: At_100uM_ABA_cDNA_P Parameter: Timepoint (hr) Value: 4
  misc_feature: MA Experiment 108607 PARAMETER Experiment Name: At_100uM_ABA_cDNA_P Parameter: Tissue Value: Aerial
  misc_feature: MA Experiment 108607 PARAMETER Experiment Name: At_100uM_ABA_cDNA_P Parameter: Treatment Value: 100uM ABA vs. No Treatment
  misc_feature: MA Experiment ID: 20000070 Result: Up-regulated in Transcription
  misc_feature: MA Experiment 20000070 PARAMETER Experiment Name: At_100uM_ABA_Mutants_cDNA_P Parameter: Plant Line Value: CS24
  misc_feature: MA Experiment 20000070 PARAMETER Experiment Name: At_100uM_ABA_Mutants_cDNA_P Parameter: Timepoint (hr) Value: 6
  misc_feature: MA Experiment 20000070 PARAMETER Experiment Name: At_100uM_ABA_Mutants_cDNA_P Parameter: Tissue Value: Aerial
  misc_feature: MA Experiment 20000070 PARAMETER Experiment Name: At_100uM_ABA_Mutants_cDNA_P Parameter: Treatment Value: 100uM ABA vs. No Treatment
  misc_feature: MA Experiment ID: 20000072 Result: Up-regulated in Transcription
  misc_feature: MA Experiment 20000072 PARAMETER Experiment Name: At_100uM_ABA_Mutants_cDNA_P Parameter: Plant Line Value: CS8105
  misc_feature: MA Experiment 20000072 PARAMETER Experiment Name: At_100uM_ABA_Mutants_cDNA_P Parameter: Timepoint (hr) Value: 6
  misc_feature: MA Experiment 20000072 PARAMETER Experiment Name: At_100uM_ABA_Mutants_cDNA_P Parameter: Tissue Value: Aerial
  misc_feature: MA Experiment 20000072 PARAMETER Experiment Name: At_100uM_ABA_Mutants_cDNA_P Parameter: Treatment Value: 100uM ABA vs. No Treatment
  misc_feature: MA Experiment ID: 20000086 Result: Up-regulated in Transcription
  misc_feature: MA Experiment 20000086 PARAMETER Experiment Name: At_100uM_ABA_Mutants_cDNA_P Parameter: Plant Line Value: CS22
  misc_feature: MA Experiment 20000086 PARAMETER Experiment Name: At_100uM_ABA_Mutants_cDNA_P Parameter: Timepoint (hr) Value: 6
  misc_feature: MA Experiment 20000086 PARAMETER Experiment Name: At_100uM_ABA_Mutants_cDNA_P Parameter: Tissue Value: Aerial
  misc_feature: MA Experiment 20000086 PARAMETER Experiment Name: At_100uM_ABA_Mutants_cDNA_P Parameter: Treatment Value: 100uM ABA vs. No Treatment
  misc_feature: MA Experiment ID: 20000087 Result: Up-regulated in Transcription
  misc_feature: MA Experiment 20000087 PARAMETER Experiment Name: At_100uM_ABA_Mutants_cDNA_P Parameter: Plant Line Value: WS
  misc_feature: MA Experiment 20000087 PARAMETER Experiment Name: At_100uM_ABA_Mutants_cDNA_P Parameter: Timepoint (hr) Value: 6
  misc_feature: MA Experiment 20000087 PARAMETER Experiment Name: At_100uM_ABA_Mutants_cDNA_P Parameter: Tissue Value: Aerial
  misc_feature: MA Experiment 20000087 PARAMETER Experiment Name: At_100uM_ABA_Mutants_cDNA_P Parameter: Treatment Value: 100uM ABA vs. No Treatment
  misc_feature: MA Experiment ID: 20000111 Result: Down-regulated in Transcription
  misc_feature: MA Experiment 20000111 PARAMETER Experiment Name: At_42deg_Heat_cDNA_P Parameter: Temperature (deg C) Value: 42 vs. 22
  misc_feature: MA Experiment 20000111 PARAMETER Experiment Name: At_42deg_Heat_cDNA_P Parameter: Timepoint (hr) Value: 6
  misc_feature: MA Experiment 20000111 PARAMETER Experiment Name: At_42deg_Heat_cDNA_P Parameter: Tissue Value: Aerial
atggcgataggagaccgcaagaagattatcatcgatactgatcctggaatcgagagctatcatgagtttattctcactggatttgatgatgttgtagatgatgcaatggcgatattcgtagctttaaattcacctgaagttgatgtcattggcctcactactatctttggaaacgtgtataccactctcgccactcgaaacgccttgcatttgttggaggttgcgggtaggaccgatattccggtggctgaaggaacacataaaaccttcttgaacgatacgaagcttcgaatagctgactttgttcatggaaaagatgggcttggcaaccaaaacttccctccacctaaaggaaaaccaattgaaaagtctggacctgagtttttagttgaacaagcaaagctttgccctggtgaaatcacggttgttgctttgggaccactaacaaatctcgcgttggctgttcagcttgatccagagttttcgaaaaatgtcggacaaattgttcttcttggtggagcatttgcagtaaacggaaatgtaaatccagcttcggaagctaatatttttggcgatcccgaagctgcagatattgtgttcacatgtggggccgatataattgctgtgggaatcaatgtgacccatcaagttattatgacagctgatgacaaggacaaactagcatcatcgaaggggaaattagctcaatatctctgtaaaatccttgatgtgtactatgattatcatctcacggcttacgaaatcaaaggtgtgtaccttcatgatcctgcgacgatccttgcggctttccttccttctctattcacttatacagaaggagttgctagagtgcagacaagtggtatcactaggggactcactttactgtacaacaatcttaagaggtttgaggaagcgaacgagtggtcagacaaaccaacggtaaaagtggcagtgacggttgatgctcctgcagtcgtgaagctcataatggataggcttatggagtcttaa

SEQ ID NO: 85668 - protein, 337 aa, Arabidopsis thaliana
  peptide (1)..(337): Ceres Seq. ID no. 12681801
  misc_feature (1)..(220): Homolog of NCBI NO: 25321071 NR Description: hypothetical protein [imported] - Arabidopsis >gi|4836912|gb|AAD30614.1|AC007153_6 Hypothetical protein
  misc_feature (221)..(337): Homolog of NCBI NO: 25321071 NR Description: hypothetical protein [imported] - Arabidopsis >gi|4836912|gb|AAD30614.1|AC007153_6 Hypothetical protein
  misc_feature (1)..(337): Homolog of NCBI NO: 18390550 NR Description: expressed protein; protein id: At1g05620.1, by cDNA: 39571. [Arabidopsis thaliana] unknown [Arabidopsis thaliana] >gi|25083300|gb|AAN72060.1|
  misc_feature (6)..(334): Homolog of NCBI NO: 30089728 NR Description: putative inosine-uridine preferring nucleoside
  misc_feature (3)..(336): Homolog of NCBI NO: 18404099 NR Description: expressed protein; protein id: At2g36310.1, by cDNA: 2576., supported by cDNA: gi_15809829, supported by gi_17978870 [Arabidopsis thaliana] >gi|15809830|gb|AAL06843.1|
  misc_feature (36)..(259): Homolog of NCBI NO: 25321061 NR Description: hypothetical protein At2g36310 [imported] -
  misc_feature (255)..(303): Homolog of NCBI NO: 25321061 NR Description: hypothetical protein At2g36310 [imported] -
  misc_feature (4)..(330): Homolog of NCBI NO: 15888904 NR Description: AGR_C_2923p [Agrobacterium tumefaciens]
  misc_feature (4)..(330): Homolog of NCBI NO: 17935486 NR Description: inosine-uridine preferring nucleoside hydrolase
  misc_feature (19)..(329): Homolog of NCBI NO: 22984963 NR Description: hypothetical protein [Burkholderia fungorum]
MAIGDRKKIIIDTDPGIESYHEFILTGFDDVVDDAMAIFVALNSPEVDVIGLTTIFGNVYTTLATRNALHLLEVAGRTDIPVAEGTHKTFLNDTKLRIADFVHGKDGLGNQNFPPPKGKPIEKSGPEFLVEQAKLCPGEITVVALGPLTNLALAVQLDPEFSKNVGQIVLLGGAFAVNGNVNPASEANIFGDPEAADIVFTCGADIIAVGINVTHQVIMTADDKDKLASSKGKLAQYLCKILDVYYDYHLTAYEIKGVYLHDPATILAAFLPSLFTYTEGVARVQTSGITRGLTLLYNNLKRFEEANEWSDKPTVKVAVTVDAPAVVKLIMDRLMES

SEQ ID NO: 85669 - protein, 302 aa, Arabidopsis thaliana; identical to SEQ ID NO: 25008
  peptide (1)..(302): Ceres Seq. ID no. 12681802
  misc_feature (1)..(185): Homolog of NCBI NO: 25321071 NR Description: hypothetical protein [imported] - Arabidopsis >gi|4836912|gb|AAD30614.1|AC007153_6 Hypothetical protein
  misc_feature (186)..(302): Homolog of NCBI NO: 25321071 NR Description: hypothetical protein [imported] - Arabidopsis >gi|4836912|gb|AAD30614.1|AC007153_6 Hypothetical protein
  misc_feature (1)..(302): Homolog of NCBI NO: 18390550 NR Description: expressed protein; protein id: At1g05620.1, by cDNA: 39571. [Arabidopsis thaliana] unknown [Arabidopsis thaliana] >gi|25083300|gb|AAN72060.1|
  misc_feature (1)..(299): Homolog of NCBI NO: 30089728 NR Description: putative inosine-uridine preferring nucleoside
  misc_feature (1)..(301): Homolog of NCBI NO: 18404099 NR Description: expressed protein; protein id: At2g36310.1, by cDNA: 2576., supported by cDNA: gi_15809829, supported by gi_17978870 [Arabidopsis thaliana] >gi|15809830|gb|AAL06843.1|
  misc_feature (1)..(224): Homolog of NCBI NO: 25321061 NR Description: hypothetical protein At2g36310 [imported] -
  misc_feature (220)..(268): Homolog of NCBI NO: 25321061 NR Description: hypothetical protein At2g36310 [imported] -
  misc_feature (1)..(295): Homolog of NCBI NO: 15888904 NR Description: AGR_C_2923p [Agrobacterium tumefaciens]
  misc_feature (1)..(295): Homolog of NCBI NO: 17935486 NR Description: inosine-uridine preferring nucleoside hydrolase
  misc_feature (1)..(294): Homolog of NCBI NO: 22984963 NR Description: hypothetical protein [Burkholderia fungorum]

SEQ ID NO: 85670 - DNA, 1362 bp, Arabidopsis thaliana
  misc_feature (1)..(1362): Ceres Seq. ID no. 12681815
  misc_feature: MA Experiment ID: 20000306 Result: Down-regulated in Transcription
  misc_feature: MA Experiment 20000306 PARAMETER Experiment Name: At_Germinating_Seeds_Sub_P Parameter: Age (hr) Value: 6 vs. 0
  misc_feature: MA Experiment 20000306 PARAMETER Experiment Name: At_Germinating_Seeds_Sub_P Parameter: Organism Value: A. thaliana
  misc_feature: MA Experiment 20000306 PARAMETER Experiment Name: At_Germinating_Seeds_Sub_P Parameter: Plant Line Value: WS
  misc_feature: MA Experiment 20000306 PARAMETER Experiment Name: At_Germinating_Seeds_Sub_P Parameter: Tissue Value: Germinating Seeds
  misc_feature: MA Experiment ID: 20000307 Result: Down-regulated in Transcription
  misc_feature: MA Experiment 20000307 PARAMETER Experiment Name: At_Germinating_Seeds_Sub_P Parameter: Age (hr) Value: 24 vs. 0
  misc_feature: MA Experiment 20000307 PARAMETER Experiment Name: At_Germinating_Seeds_Sub_P Parameter: Organism Value: A. thaliana
  misc_feature: MA Experiment 20000307 PARAMETER Experiment Name: At_Germinating_Seeds_Sub_P Parameter: Plant Line Value: WS
  misc_feature: MA Experiment 20000307 PARAMETER Experiment Name: At_Germinating_Seeds_Sub_P Parameter: Tissue Value: Germinating Seeds
  misc_feature: MA Experiment ID: 20000315 Result: Down-regulated in Transcription
  misc_feature: MA Experiment 20000315 PARAMETER Experiment Name: At_14day_Shoots-Roots_Sub_P Parameter: Age (day) Value: 14
  misc_feature: MA Experiment 20000315 PARAMETER Experiment Name: At_14day_Shoots-Roots_Sub_P Parameter: Organism Value: A. thaliana
  misc_feature: MA Experiment 20000315 PARAMETER Experiment Name: At_14day_Shoots-Roots_Sub_P Parameter: Plant Line Value: WS
  misc_feature: MA Experiment 20000315 PARAMETER Experiment Name: At_14day_Shoots-Roots_Sub_P Parameter: Tissue Value: Shoots vs. Whole Plant
  misc_feature: MA Experiment ID: 20000346 Result: Up-regulated in Transcription
  misc_feature: MA Experiment 20000346 PARAMETER Experiment Name: At_2mM_SA_Sub_P Parameter: Age (day) Value: 14
  misc_feature: MA Experiment 20000346 PARAMETER Experiment Name: At_2mM_SA_Sub_P Parameter: Organism Value: A. thaliana
  misc_feature: MA Experiment 20000346 PARAMETER Experiment Name: At_2mM_SA_Sub_P Parameter: Plant Line Value: WS
  misc_feature: MA Experiment 20000346 PARAMETER Experiment Name: At_2mM_SA_Sub_P Parameter: Timepoint (hr) Value: 1
  misc_feature: MA Experiment 20000346 PARAMETER Experiment Name: At_2mM_SA_Sub_P Parameter: Tissue Value: Aerial
  misc_feature: MA Experiment 20000346 PARAMETER Experiment Name: At_2mM_SA_Sub_P Parameter: Treatment Value: 2mM SA vs. No Treatment
  misc_feature: MA Experiment ID: 20000347 Result: Up-regulated in Transcription
  misc_feature: MA Experiment 20000347 PARAMETER Experiment Name: At_2mM_SA_Sub_P Parameter: Age (day) Value: 14
  misc_feature: MA Experiment 20000347 PARAMETER Experiment Name: At_2mM_SA_Sub_P Parameter: Organism Value: A. thaliana
  misc_feature: MA Experiment 20000347 PARAMETER Experiment Name: At_2mM_SA_Sub_P Parameter: Plant Line Value: WS
  misc_feature: MA Experiment 20000347 PARAMETER Experiment Name: At_2mM_SA_Sub_P Parameter: Timepoint (hr) Value: 6
  misc_feature: MA Experiment 20000347 PARAMETER Experiment Name: At_2mM_SA_Sub_P Parameter: Tissue Value: Aerial
  misc_feature: MA Experiment 20000347 PARAMETER Experiment Name: At_2mM_SA_Sub_P Parameter: Treatment Value: 2mM SA vs. No Treatment
atgagagaaggatctcatgttattgttttgcctttcccagcacaaggccacataactccaatgtcccaattctgtaaacgcttagcctcaaaaagtcttaagatcactcttgtcctcgtctccgacaagccctctccgccgtacaaaacagagcacgacacaatcactgtcgtccccatctccaatggtttccaagaaggccaggaacgatcagaagacctagatgagtacatggaaagagtagaatccagcatcaaaaaccgcttaccgaagttgatagaagacatgaaactatcgggaaatcctcctagggctcttgtgtacgactccaccatgccgtggcttctggatgtagctcatagttatggtttgagcggtgccgtgtttttcacgcagccttggcttgtctcagctatttactatcatgtattcaagggctcgttctctgtaccgtctacaaagtatggtcactcgacgttagcatctttcccttcgttaccgattctgaatgcgaatgatttgccgtctttcctctgtgaatcttcctcttacccatatattctaaggactgtgatcgatcagctctcaaacattgatcgagttgatatagttttgtgcaacactttcgataaattggaagaaaagttgctgaaatggattaaaagcgtgtggcctgtcctgaacataggaccaactgttccatcaatgtatttagataagcgactggctgaagacaaaaactacggattcagcctcttcggtgcgaaaatcgctgaatgcatggagtggctcaactcaaagcagcctagttcagttgtttatgtatcatttgggagcttggtggttctaaaaaaagatcaactgatagaactagcggcgggtctgaaacagagcggacatttctttttgtgggttgtgagagagacggagagaagaaaacttccagaaaactatatagaggaaattggtgagaaaggactgaccgtgagctggagtccacaacttgaagttcttacacataaatcgatcggttgtttcgtgacacattgtggatggaactcgacgttagagggattgagtttgggagttccaatgattggtatgcctcattgggcagatcagcctacaaatgctaagttcatggaggatgtgtggaaagttggagttagggttaaagcagacagtgatgggttcgtgagaagagaagagtttgtgagacgtgtggaagaagttatggaggcagagcaaggtaaagagattagaaagaatgctgagaaatggaaagtgttggctcaagaggctgtttctgaaggaggtagttctgataagaacatcaatgagtttgtttctatgttttgttga

SEQ ID NO: 85671 - protein, 453 aa, Arabidopsis thaliana
  peptide (1)..(453): Ceres Seq. ID no. 12681816
  misc_feature (1)..(416): Homolog of NCBI NO: 15221232 NR Description: putative indole-3-acetate protein id: At1g05670.1 [Arabidopsis thaliana]
  misc_feature (1)..(453): Homolog of NCBI NO: 15221233 NR Description: putative indole-3-acetate protein id: At1g05680.1 [Arabidopsis thaliana]
  misc_feature (6)..(451): Homolog of NCBI NO: 15225138 NR Description: UDP-glycosyltransferase family; protein id: supported by cDNA: gi_15810476 [Arabidopsis thaliana]
  misc_feature (5)..(450): Homolog of NCBI NO: 21536917 NR Description: putative glucosyltransferase [Arabidopsis
  misc_feature (5)..(450): Homolog of NCBI NO: 15225134 NR Description: putative glucosyltransferase; protein id: supported by cDNA: 114997. [Arabidopsis thaliana]
  misc_feature (5)..(450): Homolog of NCBI NO: 7385017 NR Description: UDP-glucose:salicylic acid glucosyltransferase
  misc_feature (6)..(450): Homolog of NCBI NO: 15224368 NR Description: putative glucosyltransferase; protein id: supported by cDNA: 34407., supported by cDNA: gi_17064813
  misc_feature (6)..(450): Homolog of NCBI NO: 15224372 NR Description: putative glucosyltransferase; protein id: [Arabidopsis thaliana] >gi|25286795|pir||B84871 probable
  misc_feature (6)..(453): Homolog of NCBI NO: 33114570 NR Description: glucosyltransferase 2 [Crocus sativus]
  misc_feature (6)..(449): Homolog of NCBI NO: 15824451 NR Description: thiohydroximate S-glucosyltransferase [Brassica
MREGSHVIVLPFPAQGHITPMSQFCKRLASKSLKITLVLVSDKPSPPYKTEHDTITVVPISNGFQEGQERSEDLDEYMERVESSIKNRLPKLIEDMKLSGNPPRALVYDSTMPWLLDVAHSYGLSGAVFFTQPWLVSAIYYHVFKGSFSVPSTKYGHSTLASFPSLPILNANDLPSFLCESSSYPYILRTVIDQLSNIDRVDIVLCNTFDKLEEKLLKWIKSVWPVLNIGPTVPSMYLDKRLAEDKNYGFSLFGAKIAECMEWLNSKQPSSVVYVSFGSLVVLKKDQLIELAAGLKQSGHFFLWVVRETERRKLPENYIEEIGEKGLTVSWSPQLEVLTHKSIGCFVTHCGWNSTLEGLSLGVPMIGMPHWADQPTNAKFMEDVWKVGVRVKADSDGFVRREEFVRRVEEVMEAEQGKEIRKNAEKWKVLAQEAVSEGGSSDKNINEFVSMFC

SEQ ID NO: 85672 - protein, 433 aa, Arabidopsis thaliana
  peptide (1)..(433): Ceres Seq. ID no. 12681817
  misc_feature (1)..(396): Homolog of NCBI NO: 15221232 NR Description: putative indole-3-acetate protein id: At1g05670.1 [Arabidopsis thaliana]
  misc_feature (1)..(433): Homolog of NCBI NO: 15221233 NR Description: putative indole-3-acetate protein id: At1g05680.1 [Arabidopsis thaliana]
  misc_feature (1)..(431): Homolog of NCBI NO: 15225138 NR Description: UDP-glycosyltransferase family; protein id: supported by cDNA: gi_15810476 [Arabidopsis thaliana]
  misc_feature (1)..(430): Homolog of NCBI NO: 21536917 NR Description: putative glucosyltransferase [Arabidopsis
  misc_feature (1)..(430): Homolog of NCBI NO: 15225134 NR Description: putative glucosyltransferase; protein id: supported by cDNA: 114997. [Arabidopsis thaliana]
  misc_feature (1)..(430): Homolog of NCBI NO: 7385017 NR Description: UDP-glucose:salicylic acid glucosyltransferase
  misc_feature (1)..(430): Homolog of NCBI NO: 15224368 NR Description: putative glucosyltransferase; protein id: supported by cDNA: 34407., supported by cDNA: gi_17064813
  misc_feature (1)..(430): Homolog of NCBI NO: 15224372 NR Description: putative glucosyltransferase; protein id: [Arabidopsis thaliana] >gi|25286795|pir||B84871 probable
  misc_feature (1)..(433): Homolog of NCBI NO: 33114570 NR Description: glucosyltransferase 2 [Crocus sativus]
  misc_feature (1)..(429): Homolog of NCBI NO: 15824451 NR Description: thiohydroximate S-glucosyltransferase [Brassica
MSQFCKRLASKSLKITLVLVSDKPSPPYKTEHDTITVVPISNGFQEGQERSEDLDEYMERVESSIKNRLPKLIEDMKLSGNPPRALVYDSTMPWLLDVAHSYGLSGAVFFTQPWLVSAIYYHVFKGSFSVPSTKYGHSTLASFPSLPILNANDLPSFLCESSSYPYILRTVIDQLSNIDRVDIVLCNTFDKLEEKLLKWIKSVWPVLNIGPTVPSMYLDKRLAEDKNYGFSLFGAKIAECMEWLNSKQPSSVVYVSFGSLVVLKKDQLIELAAGLKQSGHFFLWVVRETERRKLPENYIEEIGEKGLTVSWSPQLEVLTHKSIGCFVTHCGWNSTLEGLSLGVPMIGMPHWADQPTNAKFMEDVWKVGVRVKADSDGFVRREEFVRRVEEVMEAEQGKEIRKNAEKWKVLAQEAVSEGGSSDKNINEFVSMFC

SEQ ID NO: 85673 - protein, 376 aa, Arabidopsis thaliana
  peptide (1)..(376): Ceres Seq. ID no. 12681818
  misc_feature (1)..(339): Homolog of NCBI NO: 15221232 NR Description: putative indole-3-acetate protein id: At1g05670.1 [Arabidopsis thaliana]
  misc_feature (1)..(376): Homolog of NCBI NO: 15221233 NR Description: putative indole-3-acetate protein id: At1g05680.1 [Arabidopsis thaliana]
  misc_feature (1)..(374): Homolog of NCBI NO: 15225138 NR Description: UDP-glycosyltransferase family; protein id: supported by cDNA: gi_15810476 [Arabidopsis thaliana]
  misc_feature (1)..(373): Homolog of NCBI NO: 21536917 NR Description: putative glucosyltransferase [Arabidopsis
  misc_feature (1)..(373): Homolog of NCBI NO: 15225134 NR Description: putative glucosyltransferase; protein id: supported by cDNA: 114997. [Arabidopsis thaliana]
  misc_feature (1)..(373): Homolog of NCBI NO: 7385017 NR Description: UDP-glucose:salicylic acid glucosyltransferase
  misc_feature (1)..(373): Homolog of NCBI NO: 15224368 NR Description: putative glucosyltransferase; protein id: supported by cDNA: 34407., supported by cDNA: gi_17064813
  misc_feature (1)..(373): Homolog of NCBI NO: 15224372 NR Description: putative glucosyltransferase; protein id: [Arabidopsis thaliana] >gi|25286795|pir||B84871 probable
  misc_feature (1)..(376): Homolog of NCBI NO: 33114570 NR Description: glucosyltransferase 2 [Crocus sativus]
  misc_feature (1)..(372): Homolog of NCBI NO: 15824451 NR Description: thiohydroximate S-glucosyltransferase [Brassica
MERVESSIKNRLPKLIEDMKLSGNPPRALVYDSTMPWLLDVAHSYGLSGAVFFTQPWLVSAIYYHVFKGSFSVPSTKYGHSTLASFPSLPILNANDLPSFLCESSSYPYILRTVIDQLSNIDRVDIVLCNTFDKLEEKLLKWIKSVWPVLNIGPTVPSMYLDKRLAEDKNYGFSLFGAKIAECMEWLNSKQPSSVVYVSFGSLVVLKKDQLIELAAGLKQSGHFFLWVVRETERRKLPENYIEEIGEKGLTVSWSPQLEVLTHKSIGCFVTHCGWNSTLEGLSLGVPMIGMPHWADQPTNAKFMEDVWKVGVRVKADSDGFVRREEFVRRVEEVMEAEQGKEIRKNAEKWKVLAQEAVSEGGSSDKNINEFVSMFC

SEQ ID NO: 85674 - DNA, 3339 bp, Arabidopsis thaliana
  misc_feature (1)..(3339): Ceres Seq. ID no. 12681880
  misc_feature: MA Experiment ID: 20000184 Result: Down-regulated in Transcription
  misc_feature: MA Experiment 20000184 PARAMETER Experiment Name: At_Shoots__P Parameter: Age (day) Value: 7
  misc_feature: MA Experiment 20000184 PARAMETER Experiment Name: At_Shoots__P Parameter: Tissue Value: Shoots vs. Whole Plant
  misc_feature: MA Experiment ID: 20000495 Result: Down-regulated in Transcription
  misc_feature: MA Experiment 20000495 PARAMETER Experiment Name: At_Guard_Cells_P Parameter: Harvest Date Value: 8/2/2002
  misc_feature: MA Experiment 20000495 PARAMETER Experiment Name: At_Guard_Cells_P Parameter: Organism Value: A. thaliana
  misc_feature: MA Experiment 20000495 PARAMETER Experiment Name: At_Guard_Cells_P Parameter: Tissue Value: Guard Cells vs. Leaves
atgacgatgatgtccgacctttcacttgatttagtcgaagagatattgtgtagggttccgataacttctcttaaagcagtgagatctagttgcaaactatggaacgttctttccaagaaccggattttatgtaaaacagaagctagaaatcagtttttagggttcacgataatgaatcataggctttattccatgagattcaatctccatggaatcggcctcaatgaaaacagtgaagagttcattgatccatctataaagccaataggtaatttacttaatcaagtcgagatatctaaagtgttttattgcgaaggtttattgttatgcgtcacaaggaaccactcaagcaagctcgtagtttggaacccgtatttgggagaaattcgttggatcaaaactaggaatgattaccacataggcgttacatatgctctcgggtacgacaacaacaagaaccacatgatcttgaggtttttttctgaacaaggctactacgagatttacgacatgaactcttctgactcatgggattgtttttatggcattcccaacaaggggttaaaatgttatcagcccggcgcgtcgttaaatggaaatgcttattttttgactgagggaagagaagtaatggaagggtatgattgcttactcggttttgattttacaacaaagaaatttggaccacttctttctttgtcgttttcgcatgattttatagagactgggagactatcttgtgttaaaggagagaaacttgcggtcttatatcagcgctgctatacctatgagatggaggtatgggtgacaactaagatagagccgaatgcggtgtcatggagcaaattcttagcagttgaaatggaaccactcactagtctaaagtttaacgatgattctggcagtttcttcattgacgaagagaagaaaatcgtcgtggtttttgatatagacgaatctgaacgcaacaatacggcttacatcattggagattatggatgcttgaaagaagttgatcttgatgaagttgtgaacccacaagaatctgtggaggtcggagaccgcatttattctttttcaccatttgtgtgctcttgctcttatgttccaagtttagtgaaatttaaagaagatgcagaacatgaaaggaaagataagaagaggaagagtaagaggaagcgaaccaacaaggatggatatgattttatactgtgttttgattttacaaccgagagatttggacagattcttcctctgccgtttaaacattcttttagggatacttggactctatcttctgttaaagaagagaaacttgcagtcgcagtgttatactggaaaaatacatgtgtgatgatagagatatggatgacaattaagattgatcctaatgtcgagtcgtggagcaaattcttaagagttgataggaaaccatgcattgatcttcgctttgatgatcgtaatgacagttttttcattgacgaagagaagaaagttgtcgtgttttttagttcagacaaagttaaaacctctacggcttacgtcattggagataatagatatttgagaacagtggatcttgaaaaagctgcaaactcccaagaatctgtggaggtcggagaacgcgtgtattgtttttcgccgcttgtgtgctcttgctcttattatgttccaagtttggtgaaaatcaaccacaatgcaggacgcaaaaggaaagagaagaagacgaagcgcaaaagtaaagacaagcagatgaaactaagcaacaaggaacctggattttgctttccacaatgctatgtattaattagttccaacacttggtaccgtgatgtagatggagagccaatagtggactttgatgattttgggaatgatcgcgagccatctacagagccacttcaggattttgatgaagatctggctgatgatattggagattgggatggtgaaggatcacaaacgcctgtttatgataatgataaagtagctaaaccaaggaagagattggtgaagaaatcttctagtgaacgtgtgactattgatgttccggaattgattgatgaggatgtggatgatgctgagtttgatgagtttatgggaggaagaggtggtggtagtactgattatgatgataaggttggtaggaagaggaagaaggagaaagagagaagtagtagtggtagtgggaaggagaagaggcataagtttccgaatcgtggcgaaaggaagtcagaagagattgatgagatgtggaaatctattgctcataacccagagaatgatgaagaaggtgttaggactatggatgatgataatttcattgacgatactggtttggatccttctgagaggtatggaggtgacgctggagaccgttctccaactcattatcctcaggcagaagagggtgaggatgaagatgaggtaaataaccttttcaaaatggggaagaaaaagaaaaagactgaaagaaatcctgcggaaattgcgcttttggttgagaatgtgatggctgagcttgaggttactgctgaggaagatgcagaacttaatagacaggggaagcctgctatcaacaagcttaagaaactttcgcttcttaccgatgtacttggaaagaagcagcttcaaacagaattcctggaccatggagttttaaccctgttgaagaattggcttgagcctcttccagatggaagcttgccaaatataaacatccgtgcagctattctaagagttcttactgattttccgattgacttggaccagtatgatagaagggagcaattgaaaaagagtgggcttggaaaggtcattatgttcttatcaaagtccgacgaggaaactaattccaacagacgacttgctaaggatttggttgataaatggtctcgtccaattttcaacaagagtactaggtttgaggacatgagaaatctcgatgaagatagggttccctatagaagaccaccagtgaagaacttctcttcttgttctactggggatagacctagcaacaaagcgacaatggagtccagagatggtgactttgacttggaaattcgggaacgtaaaactggtctgacttcgggtcagagttcaaggggagacaggcaaatgacgatgaggccggaagcaaccccattggactttttgatccgtcctcaatccaagattgatccagatgagatcatagcccgtgcaaaacaggtttctcaggaccagcgtcgggtcaagatgaacaagaaacttcagcagctaaaaggaacaaagaagaagcggctacaagctacgaaagtgagcgttgaaggtcggggtatgatcaagtacctctag

SEQ ID NO: 85675 - protein, 1112 aa, Arabidopsis thaliana
  peptide (1)..(1112): Ceres Seq. ID no. 12681881
  misc_feature (832)..(1108): Pfam Name: IWS1 C-terminus Pfam Description: IWS1 C-terminus
  misc_feature (700)..(1112): Homolog of NCBI NO: 15222574 NR Description: unknown protein; protein id: At1g32130.1
  misc_feature (642)..(1112): Homolog of NCBI NO: 34895776 NR Description: P0434B04.3 [Oryza sativa (japonica
  misc_feature (1)..(322): Homolog of NCBI NO: 15229154 NR Description: putative protein; protein id: At3g49510.1
  misc_feature (401)..(563): Homolog of NCBI NO: 15229154 NR Description: putative protein; protein id: At3g49510.1
  misc_feature (1)..(390): Homolog of NCBI NO: 9757758 NR Description: gb|AAD48970.1~gene_id:MUF9.19~similar to unknown
  misc_feature (1)..(412): Homolog of NCBI NO: 11994200 NR Description: emb|CAB78723.1~gene_id:MPN9.13~similar to unknown
  misc_feature (1)..(397): Homolog of NCBI NO: 15230979 NR Description: hypothetical protein; protein id: At3g19890.1
  misc_feature (1)..(398): Homolog of NCBI NO: 15230977 NR Description: hypothetical protein; protein id: At3g19880.1 thaliana] >gi|11994199|dbj|BAB01302.1|
  misc_feature (1)..(333): Homolog of NCBI NO: 15239364 NR Description: putative protein; protein id: At5g60560.1
  misc_feature (1)..(399): Homolog of NCBI NO: 18412792 NR Description: see GB:AC003952; protein id: At4g05080.1
MTMMSDLSLDLVEEILCRVPITSLKAVRSSCKLWNVLSKNRILCKTEARNQFLGFTIMNHRLYSMRFNLHGIGLNENSEEFIDPSIKPIGNLLNQVEISKVFYCEGLLLCVTRNHSSKLVVWNPYLGEIRWIKTRNDYHIGVTYALGYDNNKNHMILRFFSEQGYYEIYDMNSSDSWDCFYGIPNKGLKCYQPGASLNGNAYFLTEGREVMEGYDCLLGFDFTTKKFGPLLSLSFSHDFIETGRLSCVKGEKLAVLYQRCYTYEMEVWVTTKIEPNAVSWSKFLAVEMEPLTSLKFNDDSGSFFIDEEKKIVVVFDIDESERNNTAYIIGDYGCLKEVDLDEVVNPQESVEVGDRIYSFSPFVCSCSYVPSLVKFKEDAEHERKDKKRKSKRKRTNKDGYDFILCFDFTTERFGQILPLPFKHSFRDTWTLSSVKEEKLAVAVLYWKNTCVMIEIWMTIKIDPNVESWSKFLRVDRKPCIDLRFDDRNDSFFIDEEKKVVVFFSSDKVKTSTAYVIGDNRYLRTVDLEKAANSQESVEVGERVYCFSPLVCSCSYYVPSLVKINHNAGRKRKEKKTKRKSKDKQMKLSNKEPGFCFPQCYVLISSNTWYRDVDGEPIVDFDDFGNDREPSTEPLQDFDEDLADDIGDWDGEGSQTPVYDNDKVAKPRKRLVKKSSSERVTIDVPELIDEDVDDAEFDEFMGGRGGGSTDYDDKVGRKRKKEKERSSSGSGKEKRHKFPNRGERKSEEIDEMWKSIAHNPENDEEGVRTMDDDNFIDDTGLDPSERYGGDAGDRSPTHYPQAEEGEDEDEVNNLFKMGKKKKKTERNPAEIALLVENVMAELEVTAEEDAELNRQGKPAINKLKKLSLLTDVLGKKQLQTEFLDHGVLTLLKNWLEPLPDGSLPNINIRAAILRVLTDFPIDLDQYDRREQLKKSGLGKVIMFLSKSDEETNSNRRLAKDLVDKWSRPIFNKSTRFEDMRNLDEDRVPYRRPPVKNFSSCSTGDRPSNKATMESRDGDFDLEIRERKTGLTSGQSSRGDRQMTMRPEATPLDFLIRPQSKIDPDEIIARAKQVSQDQRRVKMNKKLQQLKGTKKKRLQATKVSVEGRGMIKYL

SEQ ID NO: 85676 - protein, 1110 aa, Arabidopsis thaliana
  peptide (1)..(1110): Ceres Seq. ID no. 12681882
  misc_feature (830)..(1106): Pfam Name: IWS1 C-terminus Pfam Description: IWS1 C-terminus
  misc_feature (698)..(1110): Homolog of NCBI NO: 15222574 NR Description: unknown protein; protein id: At1g32130.1
  misc_feature (640)..(1110): Homolog of NCBI NO: 34895776 NR Description: P0434B04.3 [Oryza sativa (japonica
  misc_feature (1)..(320): Homolog of NCBI NO: 15229154 NR Description: putative protein; protein id: At3g49510.1
  misc_feature (399)..(561): Homolog of NCBI NO: 15229154 NR Description: putative protein; protein id: At3g49510.1
  misc_feature (1)..(388): Homolog of NCBI NO: 9757758 NR Description: gb|AAD48970.1~gene_id:MUF9.19~similar to unknown
  misc_feature (1)..(410): Homolog of NCBI NO: 11994200 NR Description: emb|CAB78723.1~gene_id:MPN9.13~similar to unknown
  misc_feature (1)..(395): Homolog of NCBI NO: 15230979 NR Description: hypothetical protein; protein id: At3g19890.1
  misc_feature (1)..(396): Homolog of NCBI NO: 15230977 NR Description: hypothetical protein; protein id: At3g19880.1 thaliana] >gi|11994199|dbj|BAB01302.1|
  misc_feature (1)..(331): Homolog of NCBI NO: 15239364 NR Description: putative protein; protein id: At5g60560.1
  misc_feature (1)..(397): Homolog of NCBI NO: 18412792 NR Description: see GB:AC003952; protein id: At4g05080.1
MMSDLSLDLVEEILCRVPITSLKAVRSSCKLWNVLSKNRILCKTEARNQFLGFTIMNHRLYSMRFNLHGIGLNENSEEFIDPSIKPIGNLLNQVEISKVFYCEGLLLCVTRNHSSKLVVWNPYLGEIRWIKTRNDYHIGVTYALGYDNNKNHMILRFFSEQGYYEIYDMNSSDSWDCFYGIPNKGLKCYQPGASLNGNAYFLTEGREVMEGYDCLLGFDFTTKKFGPLLSLSFSHDFIETGRLSCVKGEKLAVLYQRCYTYEMEVWVTTKIEPNAVSWSKFLAVEMEPLTSLKFNDDSGSFFIDEEKKIVVVFDIDESERNNTAYIIGDYGCLKEVDLDEVVNPQESVEVGDRIYSFSPFVCSCSYVPSLVKFKEDAEHERKDKKRKSKRKRTNKDGYDFILCFDFTTERFGQILPLPFKHSFRDTWTLSSVKEEKLAVAVLYWKNTCVMIEIWMTIKIDPNVESWSKFLRVDRKPCIDLRFDDRNDSFFIDEEKKVVVFFSSDKVKTSTAYVIGDNRYLRTVDLEKAANSQESVEVGERVYCFSPLVCSCSYYVPSLVKINHNAGRKRKEKKTKRKSKDKQMKLSNKEPGFCFPQCYVLISSNTWYRDVDGEPIVDFDDFGNDREPSTEPLQDFDEDLADDIGDWDGEGSQTPVYDNDKVAKPRKRLVKKSSSERVTIDVPELIDEDVDDAEFDEFMGGRGGGSTDYDDKVGRKRKKEKERSSSGSGKEKRHKFPNRGERKSEEIDEMWKSIAHNPENDEEGVRTMDDDNFIDDTGLDPSERYGGDAGDRSPTHYPQAEEGEDEDEVNNLFKMGKKKKKTERNPAEIALLVENVMAELEVTAEEDAELNRQGKPAINKLKKLSLLTDVLGKKQLQTEFLDHGVLTLLKNWLEPLPDGSLPNINIRAAILRVLTDFPIDLDQYDRREQLKKSGLGKVIMFLSKSDEETNSNRRLAKDLVDKWSRPIFNKSTRFEDMRNLDEDRVPYRRPPVKNFSSCSTGDRPSNKATMESRDGDFDLEIRERKTGLTSGQSSRGDRQMTMRPEATPLDFLIRPQSKIDPDEIIARAKQVSQDQRRVKMNKKLQQLKGTKKKRLQATKVSVEGRGMIKYL

SEQ ID NO: 85677 - protein, 1109 aa, Arabidopsis thaliana
  peptide (1)..(1109): Ceres Seq. ID no. 12681883
  misc_feature (829)..(1105): Pfam Name: IWS1 C-terminus Pfam Description: IWS1 C-terminus
  misc_feature (697)..(1109): Homolog of NCBI NO: 15222574 NR Description: unknown protein; protein id: At1g32130.1
  misc_feature (639)..(1109): Homolog of NCBI NO: 34895776 NR Description: P0434B04.3 [Oryza sativa (japonica
  misc_feature (1)..(319): Homolog of NCBI NO: 15229154 NR Description: putative protein; protein id: At3g49510.1
  misc_feature (398)..(560): Homolog of NCBI NO: 15229154 NR Description: putative protein; protein id: At3g49510.1
  misc_feature (1)..(387): Homolog of NCBI NO: 9757758 NR Description: gb|AAD48970.1~gene_id:MUF9.19~similar to unknown
  misc_feature (1)..(409): Homolog of NCBI NO: 11994200 NR Description: emb|CAB78723.1~gene_id:MPN9.13~similar to unknown
  misc_feature (1)..(394): Homolog of NCBI NO: 15230979 NR Description: hypothetical protein; protein id: At3g19890.1
  misc_feature (1)..(395): Homolog of NCBI NO: 15230977 NR Description: hypothetical protein; protein id: At3g19880.1 thaliana] >gi|11994199|dbj|BAB01302.1|
  misc_feature (1)..(330): Homolog of NCBI NO: 15239364 NR Description: putative protein; protein id: At5g60560.1
  misc_feature (1)..(396): Homolog of NCBI NO: 18412792 NR Description: see GB:AC003952; protein id: At4g05080.1
MSDLSLDLVEEILCRVPITSLKAVRSSCKLWNVLSKNRILCKTEARNQFLGFTIMNHRLYSMRFNLHGIGLNENSEEFIDPSIKPIGNLLNQVEISKVFYCEGLLLCVTRNHSSKLVVWNPYLGEIRWIKTRNDYHIGVTYALGYDNNKNHMILRFFSEQGYYEIYDMNSSDSWDCFYGIPNKGLKCYQPGASLNGNAYFLTEGREVMEGYDCLLGFDFTTKKFGPLLSLSFSHDFIETGRLSCVKGEKLAVLYQRCYTYEMEVWVTTKIEPNAVSWSKFLAVEMEPLTSLKFNDDSGSFFIDEEKKIVVVFDIDESERNNTAYIIGDYGCLKEVDLDEVVNPQESVEVGDRIYSFSPFVCSCSYVPSLVKFKEDAEHERKDKKRKSKRKRTNKDGYDFILCFDFTTERFGQILPLPFKHSFRDTWTLSSVKEEKLAVAVLYWKNTCVMIEIWMTIKIDPNVESWSKFLRVDRKPCIDLRFDDRNDSFFIDEEKKVVVFFSSDKVKTSTAYVIGDNRYLRTVDLEKAANSQESVEVGERVYCFSPLVCSCSYYVPSLVKINHNAGRKRKEKKTKRKSKDKQMKLSNKEPGFCFPQCYVLISSNTWYRDVDGEPIVDFDDFGNDREPSTEPLQDFDEDLADDIGDWDGEGSQTPVYDNDKVAKPRKRLVKKSSSERVTIDVPELIDEDVDDAEFDEFMGGRGGGSTDYDDKVGRKRKKEKERSSSGSGKEKRHKFPNRGERKSEEIDEMWKSIAHNPENDEEGVRTMDDDNFIDDTGLDPSERYGGDAGDRSPTHYPQAEEGEDEDEVNNLFKMGKKKKKTERNPAEIALLVENVMAELEVTAEEDAELNRQGKPAINKLKKLSLLTDVLGKKQLQTEFLDHGVLTLLKNWLEPLPDGSLPNINIRAAILRVLTDFPIDLDQYDRREQLKKSGLGKVIMFLSKSDEETNSNRRLAKDLVDKWSRPIFNKSTRFEDMRNLDEDRVPYRRPPVKNFSSCSTGDRPSNKATMESRDGDFDLEIRERKTGLTSGQSSRGDRQMTMRPEATPLDFLIRPQSKIDPDEIIARAKQVSQDQRRVKMNKKLQQLKGTKKKRLQATKVSVEGRGMIKYL

SEQ ID NO: 85678 - DNA, 1212 bp, Arabidopsis thaliana
  misc_feature (1)..(1212): Ceres Seq. ID no. 12681884
  misc_feature: MA Experiment ID: 20000173 Result: Down-regulated in Transcription
  misc_feature: MA Experiment 20000173 PARAMETER Experiment Name: At_42deg_Heat_P Parameter: Age (day) Value: 14
  misc_feature: MA Experiment 20000173 PARAMETER Experiment Name: At_42deg_Heat_P Parameter: Organism Value: A. thaliana
  misc_feature: MA Experiment 20000173 PARAMETER Experiment Name: At_42deg_Heat_P Parameter: Plant Line Value: WS
  misc_feature: MA Experiment 20000173 PARAMETER Experiment Name: At_42deg_Heat_P Parameter: Temperature (deg C) Value: 42 vs. 22
  misc_feature: MA Experiment 20000173 PARAMETER Experiment Name: At_42deg_Heat_P Parameter: Timepoint (hr) Value: 6
  misc_feature: MA Experiment 20000173 PARAMETER Experiment Name: At_42deg_Heat_P Parameter: Tissue Value: Aerial
  misc_feature: MA Experiment ID: 20000184 Result: Down-regulated in Transcription
  misc_feature: MA Experiment 20000184 PARAMETER Experiment Name: At_Shoots__P Parameter: Age (day) Value: 7
  misc_feature: MA Experiment 20000184 PARAMETER Experiment Name: At_Shoots__P Parameter: Tissue Value: Shoots vs. Whole Plant
atgggtagcagtgagatggaaaaatcaggtaaagagaaagaacctaagactacaccgccttcgacttcttcatctgctcctgctactgttgtttcacaggaaccttcttctgctgtgagtgctggagtggctgttactcaagattggtctggcttccaggcttattctcctatgccgcctcatggttatgtagcatcaagtcctcaacctcatccttatatgtggggcgttcagcatatgatgccgccttatggaacaccgcctcatccgtatgttacgatgtatcctccaggtggcatgtatgctcatccttcattacctccgtttctgttaacatgttccgtgctgcaacaggggtcttatccatatagtccctatgcaatgccttctcctaatggaatggctgaagcttctggtaatactggaagtgttattgagggtgatggtaaaccatctgatgggaaggaaaaattgccaatcaaaagatcaaaaggaagcttgggaagtttgaatatgattataggaaagaacaatgaagctggaaaaaactcaggagcatcagctaatggagcttgttctaaaaggcatgtgacttcatattttgctgagagcggttctgatggatcaagtgacggaagtgatgcaaattcacaaaacgactctggctctagacacaacgggaaggatggtgaaacagcttcagagagtggtggttctgctcatggaccaccccgtaatggaagtaatctaccagtgaaccagaccgtcgctatcatgccagtgtcggctacaggtgttccaggcccaccaacaaatctaaatatcggaatggattattggagcggtcatgggaatgtttctggagcagttcctggagttgtagtagatggttcccaatcacagccatggttacaggatgagagagagattaagcgacagagacggaagcaatccaatagggaatctgctcgtagatccaggttgcgtaaacaggcggagtgtgatgagctagcacaacgagcagaggttttgaatggagagaactcaagtcttagagcagaaattaacaagcttaaaagccaatatgaagagcttcttgctgaaaatagctctctcaagaataagttctcgtcagccccgtcactggaaggtggagacttggacaagaacgagcaagaaccacagagaagtacacgtcaggatgttgcgtag

SEQ ID NO: 85679 - protein, 403 aa, Arabidopsis thaliana
  peptide (1)..(403): Ceres Seq. ID no. 12681885
  misc_feature (307)..(371): Pfam Name: bZIP transcription factor Pfam Description: bZIP transcription factor
  misc_feature (1)..(403): Homolog of NCBI NO: 15222576 NR Description: G-Box binding protein, putative; protein id:
  misc_feature (1)..(403): Homolog of NCBI NO: 28393494 NR Description: putative G-Box binding protein [Arabidopsis
  misc_feature (1)..(394): Homolog of NCBI NO: 30686443 NR Description: G-box binding bZIP transcription factor -related
  misc_feature (1)..(375): Homolog of NCBI NO: 25344493 NR Description: hypothetical protein At2g35530 [imported] -
  misc_feature (1)..(403): Homolog of NCBI NO: 5381313 NR Description: G-Box binding protein 2 [Catharanthus roseus]
  misc_feature (1)..(392): Homolog of NCBI NO: 13775109 NR Description: bZIP transcription factor 3 [Phaseolus vulgaris]
  misc_feature (1)..(400): Homolog of NCBI NO: 13775107 NR Description: bZIP transcription factor 2 [Phaseolus vulgaris]
  misc_feature (20)..(375): Homolog of NCBI NO: 7489475 NR Description: G-box binding factor 1A - rice
  misc_feature (32)..(375): Homolog of NCBI NO: 629667 NR Description: G-box-binding protein - tomato
  misc_feature (1)..(400): Homolog of NCBI NO: 7488942 NR Description: bZIP DNA-binding protein - parsley
MGSSEMEKSGKEKEPKTTPPSTSSSAPATVVSQEPSSAVSAGVAVTQDWSGFQAYSPMPPHGYVASSPQPHPYMWGVQHMMPPYGTPPHPYVTMYPPGGMYAHPSLPPFLLTCSVLQQGSYPYSPYAMPSPNGMAEASGNTGSVIEGDGKPSDGKEKLPIKRSKGSLGSLNMIIGKNNEAGKNSGASANGACSKRHVTSYFAESGSDGSSDGSDANSQNDSGSRHNGKDGETASESGGSAHGPPRNGSNLPVNQTVAIMPVSATGVPGPPTNLNIGMDYWSGHGNVSGAVPGVVVDGSQSQPWLQDEREIKRQRRKQSNRESARRSRLRKQAECDELAQRAEVLNGENSSLRAEINKLKSQYEELLAENSSLKNKFSSAPSLEGGDLDKNEQEPQRSTRQDVA

SEQ ID NO: 85680 - protein, 398 aa, Arabidopsis thaliana
  peptide (1)..(398): Ceres Seq. ID no. 12681886
  misc_feature (302)..(366): Pfam Name: bZIP transcription factor Pfam Description: bZIP transcription factor
  misc_feature (1)..(398): Homolog of NCBI NO: 15222576 NR Description: G-Box binding protein, putative; protein id:
  misc_feature (1)..(398): Homolog of NCBI NO: 28393494 NR Description: putative G-Box binding protein [Arabidopsis
  misc_feature (1)..(389): Homolog of NCBI NO: 30686443 NR Description: G-box binding bZIP transcription factor -related
  misc_feature (1)..(370): Homolog of NCBI NO: 25344493 NR Description: hypothetical protein At2g35530 [imported] -
  misc_feature (1)..(398): Homolog of NCBI NO: 5381313 NR Description: G-Box binding protein 2 [Catharanthus roseus]
  misc_feature (1)..(387): Homolog of NCBI NO: 13775109 NR Description: bZIP transcription factor 3 [Phaseolus vulgaris]
  misc_feature (1)..(395): Homolog of NCBI NO: 13775107 NR Description: bZIP transcription factor 2 [Phaseolus vulgaris]
  misc_feature (15)..(370): Homolog of NCBI NO: 7489475 NR Description: G-box binding factor 1A - rice
  misc_feature (27)..(370): Homolog of NCBI NO: 629667 NR Description: G-box-binding protein - tomato
  misc_feature (1)..(395): Homolog of NCBI NO: 7488942 NR Description: bZIP DNA-binding protein - parsley
MEKSGKEKEPKTTPPSTSSSAPATVVSQEPSSAVSAGVAVTQDWSGFQAYSPMPPHGYVASSPQPHPYMWGVQHMMPPYGTPPHPYVTMYPPGGMYAHPSLPPFLLTCSVLQQGSYPYSPYAMPSPNGMAEASGNTGSVIEGDGKPSDGKEKLPIKRSKGSLGSLNMIIGKNNEAGKNSGASANGACSKRHVTSYFAESGSDGSSDGSDANSQNDSGSRHNGKDGETASESGGSAHGPPRNGSNLPVNQTVAIMPVSATGVPGPPTNLNIGMDYWSGHGNVSGAVPGVVVDGSQSQPWLQDEREIKRQRRKQSNRESARRSRLRKQAECDELAQRAEVLNGENSSLRAEINKLKSQYEELLAENSSLKNKFSSAPSLEGGDLDKNEQEPQRSTRQDVA

SEQ ID NO: 85681 - protein, 346 aa, Arabidopsis thaliana
  peptide (1)..(346): Ceres Seq. ID no. 12681887
  misc_feature (250)..(314): Pfam Name: bZIP transcription factor Pfam Description: bZIP transcription factor
  misc_feature (1)..(346): Homolog of NCBI NO: 15222576 NR Description: G-Box binding protein, putative; protein id:
  misc_feature (1)..(346): Homolog of NCBI NO: 28393494 NR Description: putative G-Box binding protein [Arabidopsis
  misc_feature (1)..(337): Homolog of NCBI NO: 30686443 NR Description: G-box binding bZIP transcription factor -related
  misc_feature (1)..(318): Homolog of NCBI NO: 25344493 NR Description: hypothetical protein At2g35530 [imported] -
  misc_feature (1)..(346): Homolog of NCBI NO: 5381313 NR Description: G-Box binding protein 2 [Catharanthus roseus]
  misc_feature (1)..(335): Homolog of NCBI NO: 13775109 NR Description: bZIP transcription factor 3 [Phaseolus vulgaris]
  misc_feature (1)..(343): Homolog of NCBI NO: 13775107 NR Description: bZIP transcription factor 2 [Phaseolus vulgaris]
  misc_feature (1)..(318): Homolog of NCBI NO: 7489475 NR Description: G-box binding factor 1A - rice
  misc_feature (1)..(318): Homolog of NCBI NO: 629667 NR Description: G-box-binding protein - tomato
  misc_feature (1)..(343): Homolog of NCBI NO: 7488942 NR Description: bZIP DNA-binding protein - parsley
MPPHGYVASSPQPHPYMWGVQHMMPPYGTPPHPYVTMYPPGGMYAHPSLPPFLLTCSVLQQGSYPYSPYAMPSPNGMAEASGNTGSVIEGDGKPSDGKEKLPIKRSKGSLGSLNMIIGKNNEAGKNSGASANGACSKRHVTSYFAESGSDGSSDGSDANSQNDSGSRHNGKDGETASESGGSAHGPPRNGSNLPVNQTVAIMPVSATGVPGPPTNLNIGMDYWSGHGNVSGAVPGVVVDGSQSQPWLQDEREIKRQRRKQSNRESARRSRLRKQAECDELAQRAEVLNGENSSLRAEINKLKSQYEELLAENSSLKNKFSSAPSLEGGDLDKNEQEPQRSTRQDVA

SEQ ID NO: 85682 - DNA, 2613 bp, Arabidopsis thaliana
  misc_feature (1)..(2613): Ceres Seq. ID no. 12681957
  misc_feature: MA Experiment ID: 20000184 Result: Up-regulated in Transcription
  misc_feature: MA Experiment 20000184 PARAMETER Experiment Name: At_Shoots__P Parameter: Age (day) Value: 7
  misc_feature: MA Experiment 20000184 PARAMETER Experiment Name: At_Shoots__P Parameter: Tissue Value: Shoots vs. Whole Plant
  misc_feature: MA Experiment ID: 20000438 Result: Up-regulated in Transcription
  misc_feature: MA Experiment 20000438 PARAMETER Experiment Name: At_Shoots__P Parameter: Age (day) Value: 14
  misc_feature: MA Experiment 20000438 PARAMETER Experiment Name: At_Shoots__P Parameter: Tissue Value: Shoots vs. Whole Plant
  misc_feature: MA Experiment ID: 20000495 Result: Down-regulated in Transcription
  misc_feature: MA Experiment 20000495 PARAMETER Experiment Name: At_Guard_Cells_P Parameter: Harvest Date Value: 8/2/2002
  misc_feature: MA Experiment 20000495 PARAMETER Experiment Name: At_Guard_Cells_P Parameter: Organism Value: A. thaliana
  misc_feature: MA Experiment 20000495 PARAMETER Experiment Name: At_Guard_Cells_P Parameter: Tissue Value: Guard Cells vs. Leaves
  misc_feature: MA Experiment ID: 20001248 Result: Down-regulated in Transcription
  misc_feature: MA Experiment 20001248 PARAMETER Experiment Name: At_Far-red-induction_P Parameter: Age (day) Value: 7
  misc_feature: MA Experiment 20001248 PARAMETER Experiment Name: At_Far-red-induction_P Parameter: Light Value: Far-red vs. White
  misc_feature: MA Experiment 20001248 PARAMETER Experiment Name: At_Far-red-induction_P Parameter: Organism Value: A. thaliana
  misc_feature: MA Experiment 20001248 PARAMETER Experiment Name: At_Far-red-induction_P Parameter: Plant Line Value: Columbia
  misc_feature: MA Experiment 20001248 PARAMETER Experiment Name: At_Far-red-induction_P Parameter: Timepoint (hr) Value: 4
  misc_feature: MA Experiment 20001248 PARAMETER Experiment Name: At_Far-red-induction_P Parameter: Tissue Value: Whole Plant
atgggttgtactgtgagggagaagcacgtgaaaccgacccgtaggatcaaagccgctgcatttagatccgacccaccgttatgttgggtcgagaagattgctatgtcacaatcaattgttgagaaccttgtttatcatcctggtcttactgattccggttctgtcaatttgaattccgttactgagaatcctgaggagaatttttgggcatattgtacagaggagcatttggaagagattttgctgaaacatttggagtttttgtataatcaagctgtttctaagcttcttgaattgggctatgaggaacgtgttgcgttgaaagcggttttgagtaatggacactgttatggtgaattggatgtgttgactaatatagtgaataattcattatcttatttgaatagtggtggaggtggaggtgggagtaatgggaacggtgaggatcgaacggagactggttttacggatttgagagatttggaggagtattcgcttgcgggtatgatttacttgttgcaacaagttaagcctaatttgagtaaaggtgatgcaatgtggtgtttgttaatgagtgagctccatgttggtagggcaagtactctggatgtcccaacgaataggtctagttgttgtactaaggaagatagcaatgtagaagatgttggtacgggtggtactctagatattgctggttttatggcaccagcgttgtgtcgattccatggaggttggggttttgggaatgggggaggacctgagttttctggtaatgggttttctatgaaaggtgctgagttgaagttgcagagagagattgattgtcctaaaaggtttaatctttcgccatccatgaagtccttgttgaagcggaatgttgcagcgtttgctgctgggtatcgtgctagtatgaagcagaagcaaatacagtcgtctgatactattggtgatagcaaagcttgtaatgatcctgcaattgtgaagagttgtgggcagcaaccacgtaagtcagggagtgaagaaagtgttagtacggtgttggagaaatttcgtgatctgaaccttgatgataatctggaatcggtgggtgtggatgataaggattgtgtgatagtcgatctgcttcatcaggttaaggatttcgagaagaaagtaaaggaaaggaaagagtgggctcagaagaacgcaatgcaagccgcacaaaaggtcagcgaggaattagctgagcttaaaacattgagtagtgaaagagaaggaatccaactgctgaaaaaggggaaacaggctgttgaagaatcaactgcgaaaagatttactgacaaggaaattgaactcagaaaagcttgcagtcaaaatgacagggccaatgtaattgtaagaaagcttgagaatcaaaatgcagagattcgagcagagcgggagggatccaaattaagtgcatcagaatcgcttaaagcgtgcatggaagcatcaaagaaggagaaaaaatgcttgaagaagcttgtggcatgggagaaacagatattgaagttgcaggatgagattacagctgaaaaagaaaagattaaggccctatataagactttagctcaaatcacagagtatgaaaaggagattgaggcgaaatggaggcaagagcagaaggcaaaagaggaggctctggctcaaatggaggaagaacaacgctcaaaagaagcagctgagggtcacaacaagagaaagcttgagactttacgactcaaaattgaactagacttccaaagacacaaagacgatcaccaaagactggagcaagaactcggtcgactcaaagcctcttcagatagtgactcaagccacatatccaacaacgcttggaaacccaaaaaatctcaaggagaaaacattgctaagctgcttgaagaaattgataagcttgaagggtcttatgacaatgaagcaaactatgatcgagaatgcataatctgtatgaaagatgaagtctctgtggtgtttcttccttgtgcgcatcaagttgtgtgtggtagttgcagtgatagcttcttcgcgagcaacaacggcggaagcaaagtcacttgtccttgttgccgaggaagagagttaaaatgttgctacaaggcaagcattgatgggtttggtgcaacaaagttccacgagcgttgtgacttcaaaggtccatgtgttatcatagcttacactaaagacaagtctttcaagtttggtggatttagtccggaaggatatagaagtactgatgattattacgatacatttgatgctttcctcttctattggctcgaggattgtgatgacccaatcgtccttcctaaggttggaggaagtggagcagcactatttgattatgctcgcggagggcctcaatttggagctgacgggcttcttatcggaccgcctttagctcccgtgatgggcggatttgcgggtccggatacgaactcggggattggtgatttgagggtggctaaatcaagattgggattgtcatatgctaagaggaaagatggaaaagaatctatatttggagatgaaaataaggttagtcttgatgatgtattggtcttttgtagtccttatattgcttccttgtattaa

SEQ ID NO: 85683 - protein, 870 aa, Arabidopsis thaliana
  peptide (1)..(870): Ceres Seq. ID no. 12681958
  misc_feature (653)..(696): Pfam Name: Zinc finger, C3HC4 type (RING finger) Pfam Description: Zinc finger, C3HC4 type (RING finger)
  misc_feature (1)..(462): Homolog of NCBI NO: 12322447 NR Description: unknown protein, 3' partial; 1386-1 [Arabidopsis
  misc_feature (1)..(697): Homolog of NCBI NO: 22531056 NR Description: unknown protein [Arabidopsis thaliana]
  misc_feature (1)..(697): Homolog of NCBI NO: 25408371 NR Description: hypothetical protein At2g35330 [imported] - thaliana >gi|3608154|gb|AAC36187.1| unknown protein [Arabidopsis
  misc_feature (1)..(697): Homolog of NCBI NO: 30686389 NR Description: expressed protein [Arabidopsis thaliana]
  misc_feature (707)..(870): Homolog of NCBI NO: 15223227 NR Description: unknown protein; protein id: At1g32520.1
  misc_feature (264)..(698): Homolog of NCBI NO: 25343843 NR Description: protein F15K9.3 [imported] - Arabidopsis thaliana
  misc_feature (76)..(199): Homolog of NCBI NO: 25343843 NR Description: protein F15K9.3 [imported] - Arabidopsis thaliana
  misc_feature (264)..(720): Homolog of NCBI NO: 15218791 NR Description: unknown protein; protein id: At1g03370.1
  misc_feature (76)..(199): Homolog of NCBI NO: 15218791 NR Description: unknown protein; protein id: At1g03370.1
  misc_feature (320)..(540): Homolog of NCBI NO: 15236231 NR Description: putative protein; protein id: At4g03000.1
MGCTVREKHVKPTRRIKAAAFRSDPPLCWVEKIAMSQSIVENLVYHPGLTDSGSVNLNSVTENPEENFWAYCTEEHLEEILLKHLEFLYNQAVSKLLELGYEERVALKAVLSNGHCYGELDVLTNIVNNSLSYLNSGGGGGGSNGNGEDRTETGFTDLRDLEEYSLAGMIYLLQQVKPNLSKGDAMWCLLMSELHVGRASTLDVPTNRSSCCTKEDSNVEDVGTGGTLDIAGFMAPALCRFHGGWGFGNGGGPEFSGNGFSMKGAELKLQREIDCPKRFNLSPSMKSLLKRNVAAFAAGYRASMKQKQIQSSDTIGDSKACNDPAIVKSCGQQPRKSGSEESVSTVLEKFRDLNLDDNLESVGVDDKDCVIVDLLHQVKDFEKKVKERKEWAQKNAMQAAQKVSEELAELKTLSSEREGIQLLKKGKQAVEESTAKRFTDKEIELRKACSQNDRANVIVRKLENQNAEIRAEREGSKLSASESLKACMEASKKEKKCLKKLVAWEKQILKLQDEITAEKEKIKALYKTLAQITEYEKEIEAKWRQEQKAKEEALAQMEEEQRSKEAAEGHNKRKLETLRLKIELDFQRHKDDHQRLEQELGRLKASSDSDSSHISNNAWKPKKSQGENIAKLLEEIDKLEGSYDNEANYDRECIICMKDEVSVVFLPCAHQVVCGSCSDSFFASNNGGSKVTCPCCRGRELKCCYKASIDGFGATKFHERCDFKGPCVIIAYTKDKSFKFGGFSPEGYRSTDDYYDTFDAFLFYWLEDCDDPIVLPKVGGSGAALFDYARGGPQFGADGLLIGPPLAPVMGGFAGPDTNSGIGDLRVAKSRLGLSYAKRKDGKESIFGDENKVSLDDVLVFCSPYIASLY

SEQ ID NO: 85684 - protein, 836 aa, Arabidopsis thaliana
  peptide (1)..(836): Ceres Seq. ID no. 12681959
  misc_feature (619)..(662): Pfam Name: Zinc finger, C3HC4 type (RING finger) Pfam Description: Zinc finger, C3HC4 type (RING finger)
  misc_feature (1)..(428): Homolog of NCBI NO: 12322447 NR Description: unknown protein, 3' partial; 1386-1 [Arabidopsis
  misc_feature (1)..(663): Homolog of NCBI NO: 22531056 NR Description: unknown protein [Arabidopsis thaliana]
  misc_feature (1)..(663): Homolog of NCBI NO: 25408371 NR Description: hypothetical protein At2g35330 [imported] - thaliana >gi|3608154|gb|AAC36187.1| unknown protein [Arabidopsis
  misc_feature (1)..(663): Homolog of NCBI NO: 30686389 NR Description: expressed protein [Arabidopsis thaliana]
  misc_feature (673)..(836): Homolog of NCBI NO: 15223227 NR Description: unknown protein; protein id: At1g32520.1
  misc_feature (230)..(664): Homolog of NCBI NO: 25343843 NR Description: protein F15K9.3 [imported] - Arabidopsis thaliana
  misc_feature (42)..(165): Homolog of NCBI NO: 25343843 NR Description: protein F15K9.3 [imported] - Arabidopsis thaliana
  misc_feature (230)..(686): Homolog of NCBI NO: 15218791 NR Description: unknown protein; protein id: At1g03370.1
  misc_feature (42)..(165): Homolog of NCBI NO: 15218791 NR Description: unknown protein; protein id: At1g03370.1
  misc_feature (286)..(506): Homolog of NCBI NO: 15236231 NR Description: putative protein; protein id: At4g03000.1
MSQSIVENLVYHPGLTDSGSVNLNSVTENPEENFWAYCTEEHLEEILLKHLEFLYNQAVSKLLELGYEERVALKAVLSNGHCYGELDVLTNIVNNSLSYLNSGGGGGGSNGNGEDRTETGFTDLRDLEEYSLAGMIYLLQQVKPNLSKGDAMWCLLMSELHVGRASTLDVPTNRSSCCTKEDSNVEDVGTGGTLDIAGFMAPALCRFHGGWGFGNGGGPEFSGNGFSMKGAELKLQREIDCPKRFNLSPSMKSLLKRNVAAFAAGYRASMKQKQIQSSDTIGDSKACNDPAIVKSCGQQPRKSGSEESVSTVLEKFRDLNLDDNLESVGVDDKDCVIVDLLHQVKDFEKKVKERKEWAQKNAMQAAQKVSEELAELKTLSSEREGIQLLKKGKQAVEESTAKRFTDKEIELRKACSQNDRANVIVRKLENQNAEIRAEREGSKLSASESLKACMEASKKEKKCLKKLVAWEKQILKLQDEITAEKEKIKALYKTLAQITEYEKEIEAKWRQEQKAKEEALAQMEEEQRSKEAAEGHNKRKLETLRLKIELDFQRHKDDHQRLEQELGRLKASSDSDSSHISNNAWKPKKSQGENIAKLLEEIDKLEGSYDNEANYDRECIICMKDEVSVVFLPCAHQVVCGSCSDSFFASNNGGSKVTCPCCRGRELKCCYKASIDGFGATKFHERCDFKGPCVIIAYTKDKSFKFGGFSPEGYRSTDDYYDTFDAFLFYWLEDCDDPIVLPKVGGSGAALFDYARGGPQFGADGLLIGPPLAPVMGGFAGPDTNSGIGDLRVAKSRLGLSYAKRKDGKESIFGDENKVSLDDVLVFCSPYIASLY

SEQ ID NO: 85685 - protein, 702 aa, Arabidopsis thaliana
  peptide (1)..(702): Ceres Seq. ID no. 12681960
  misc_feature (485)..(528): Pfam Name: Zinc finger, C3HC4 type (RING finger) Pfam Description: Zinc finger, C3HC4 type (RING finger)
  misc_feature (1)..(294): Homolog of NCBI NO: 12322447 NR Description: unknown protein, 3' partial; 1386-1 [Arabidopsis
  misc_feature (1)..(529): Homolog of NCBI NO: 22531056 NR Description: unknown protein [Arabidopsis thaliana]
  misc_feature (1)..(529): Homolog of NCBI NO: 25408371 NR Description: hypothetical protein At2g35330 [imported] - thaliana >gi|3608154|gb|AAC36187.1| unknown protein [Arabidopsis
  misc_feature (1)..(529): Homolog of NCBI NO: 30686389 NR Description: expressed protein [Arabidopsis thaliana]
  misc_feature (539)..(702): Homolog of NCBI NO: 15223227 NR Description: unknown protein; protein id: At1g32520.1
  misc_feature (96)..(530): Homolog of NCBI NO: 25343843 NR Description: protein F15K9.3 [imported] - Arabidopsis thaliana
  misc_feature (1)..(31): Homolog of NCBI NO: 25343843 NR Description: protein F15K9.3 [imported] - Arabidopsis thaliana
  misc_feature (96)..(552): Homolog of NCBI NO: 15218791 NR Description: unknown protein; protein id: At1g03370.1
  misc_feature (1)..(31): Homolog of NCBI NO: 15218791 NR Description: unknown protein; protein id: At1g03370.1
  misc_feature (152)..(372): Homolog of NCBI NO: 15236231 NR Description: putative protein; protein id: At4g03000.1
MIYLLQQVKPNLSKGDAMWCLLMSELHVGRASTLDVPTNRSSCCTKEDSNVEDVGTGGTLDIAGFMAPALCRFHGGWGFGNGGGPEFSGNGFSMKGAELKLQREIDCPKRFNLSPSMKSLLKRNVAAFAAGYRASMKQKQIQSSDTIGDSKACNDPAIVKSCGQQPRKSGSEESVSTVLEKFRDLNLDDNLESVGVDDKDCVIVDLLHQVKDFEKKVKERKEWAQKNAMQAAQKVSEELAELKTLSSEREGIQLLKKGKQAVEESTAKRFTDKEIELRKACSQNDRANVIVRKLENQNAEIRAEREGSKLSASESLKACMEASKKEKKCLKKLVAWEKQILKLQDEITAEKEKIKALYKTLAQITEYEKEIEAKWRQEQKAKEEALAQMEEEQRSKEAAEGHNKRKLETLRLKIELDFQRHKDDHQRLEQELGRLKASSDSDSSHISNNAWKPKKSQGENIAKLLEEIDKLEGSYDNEANYDRECIICMKDEVSVVFLPCAHQVVCGSCSDSFFASNNGGSKVTCPCCRGRELKCCYKASIDGFGATKFHERCDFKGPCVIIAYTKDKSFKFGGFSPEGYRSTDDYYDTFDAFLFYWLEDCDDPIVLPKVGGSGAALFDYARGGPQFGADGLLIGPPLAPVMGGFAGPDTNSGIGDLRVAKSRLGLSYAKRKDGKESIFGDENKVSLDDVLVFCSPYIASLY

SEQ ID NO: 85686 - DNA, 363 bp, Arabidopsis thaliana
  misc_feature (1)..(363): Ceres Seq. ID no. 12682055
  misc_feature: MA Experiment ID: 20000180 Result: Down-regulated in Transcription
  misc_feature: MA Experiment 20000180 PARAMETER Experiment Name: At_Germinating_Seeds_P Parameter: Age (hr) Value: 24 vs. 0
  misc_feature: MA Experiment 20000180 PARAMETER Experiment Name: At_Germinating_Seeds_P Parameter: Tissue Value: Germinating Seeds
  misc_feature: MA Experiment ID: 20000436 Result: Down-regulated in Transcription
  misc_feature: MA Experiment 20000436 PARAMETER Experiment Name: At_Drought_P Parameter: Age (day) Value: 7
  misc_feature: MA Experiment 20000436 PARAMETER Experiment Name: At_Drought_P Parameter: Organism Value: A. thaliana
  misc_feature: MA Experiment 20000436 PARAMETER Experiment Name: At_Drought_P Parameter: Plant Line Value: WS
  misc_feature: MA Experiment 20000436 PARAMETER Experiment Name: At_Drought_P Parameter: Timepoint (hr) Value: 12
  misc_feature: MA Experiment 20000436 PARAMETER Experiment Name: At_Drought_P Parameter: Tissue Value: Whole Plant
  misc_feature: MA Experiment 20000436 PARAMETER Experiment Name: At_Drought_P Parameter: Treatment Value: Drought vs. No Drought
  misc_feature: MA Experiment ID: 20000794 Result: Down-regulated in Transcription
  misc_feature: MA Experiment 20000794 PARAMETER Experiment Name: At_Petals_P Parameter: Age (day) Value: 23-25 days
  misc_feature: MA Experiment 20000794 PARAMETER Experiment Name: At_Petals_P Parameter: Plant Line Value: WS
  misc_feature: MA Experiment 20000794 PARAMETER Experiment Name: At_Petals_P Parameter: Tissue Value: Petals vs. Whole plant
  misc_feature: MA Experiment ID: 20001247 Result: Down-regulated in Transcription
  misc_feature: MA Experiment 20001247 PARAMETER Experiment Name: At_Far-red-induction_P Parameter: Age (day) Value: 7
  misc_feature: MA Experiment 20001247 PARAMETER Experiment Name: At_Far-red-induction_P Parameter: Light Value: Far-red vs. White
  misc_feature: MA Experiment 20001247 PARAMETER Experiment Name: At_Far-red-induction_P Parameter: Organism Value: A. thaliana
  misc_feature: MA Experiment 20001247 PARAMETER Experiment Name: At_Far-red-induction_P Parameter: Plant Line Value: Columbia
  misc_feature: MA Experiment 20001247 PARAMETER Experiment Name: At_Far-red-induction_P Parameter: Timepoint (hr) Value: 1
  misc_feature: MA Experiment 20001247 PARAMETER Experiment Name: At_Far-red-induction_P Parameter: Tissue Value: Whole Plant
  misc_feature: MA Experiment ID: 20001558 Result: Up-regulated in Transcription
  misc_feature: MA Experiment 20001558 PARAMETER Experiment Name: At_Drought_Soil_Dry_P Parameter: Age (day) Value: 27
  misc_feature: MA Experiment 20001558 PARAMETER Experiment Name: At_Drought_Soil_Dry_P Parameter: Organism Value: A. thaliana
  misc_feature: MA Experiment 20001558 PARAMETER Experiment Name: At_Drought_Soil_Dry_P Parameter: Plant Line Value: WS
  misc_feature: MA Experiment 20001558 PARAMETER Experiment Name: At_Drought_Soil_Dry_P Parameter: Post Timepoint (hr) Value: 6
  misc_feature: MA Experiment 20001558 PARAMETER Experiment Name: At_Drought_Soil_Dry_P Parameter: Post-Treatment Value: Re-Water vs. No Drought
  misc_feature: MA Experiment 20001558 PARAMETER Experiment Name: At_Drought_Soil_Dry_P Parameter: Timepoint (day) Value: 13
  misc_feature: MA Experiment 20001558 PARAMETER Experiment Name: At_Drought_Soil_Dry_P Parameter: Treatment Value: Drought vs. No Drought
  misc_feature: MA Experiment ID: 20001560 Result: Up-regulated in Transcription
  misc_feature: MA Experiment 20001560 PARAMETER Experiment Name: At_Drought_Soil_Dry_P Parameter: Age (day) Value: 28
  misc_feature: MA Experiment 20001560 PARAMETER Experiment Name: At_Drought_Soil_Dry_P Parameter: Organism Value: A. thaliana
  misc_feature: MA Experiment 20001560 PARAMETER Experiment Name: At_Drought_Soil_Dry_P Parameter: Plant Line Value: WS
  misc_feature: MA Experiment 20001560 PARAMETER Experiment Name: At_Drought_Soil_Dry_P Parameter: Post Timepoint (hr) Value: None
  misc_feature: MA Experiment 20001560 PARAMETER Experiment Name: At_Drought_Soil_Dry_P Parameter: Post-Treatment Value: None
  misc_feature: MA Experiment 20001560 PARAMETER Experiment Name: At_Drought_Soil_Dry_P Parameter: Timepoint (day) Value: 14
  misc_feature: MA Experiment 20001560 PARAMETER Experiment Name: At_Drought_Soil_Dry_P Parameter: Treatment Value: Drought vs. No Drought
  misc_feature: MA Experiment ID: 20001757 Result: Up-regulated in Transcription
  misc_feature: MA Experiment 20001757 PARAMETER Experiment Name: At_50mM_NH4NO3_L-to-H_P Parameter: Timepoint (hr) Value: 6
  misc_feature: MA Experiment 20001757 PARAMETER Experiment Name: At_50mM_NH4NO3_L-to-H_P Parameter: Tissue Value: Leaf
  misc_feature: MA Experiment 20001757 PARAMETER Experiment Name: At_50mM_NH4NO3_L-to-H_P Parameter: Treatment Value: 50mM NH4NO3 vs 100mM Mannitol
atgaacttggctgttgatacccagaagaagaatcggattcaagtttccaacactaagaaaccattgttcttctacgtcaatctcgccaagaggtacatgcagcagtacactgatgtcgaattgtctgcactaggaatggctattgccactgttgttacggtcgctgagatattgaagaacaatggctttgctgttgaaaagaagatcatgacatcgactgtggatatcaaggatgattcaaggggtcgtcctgtgcagaaagctaagattgagatcacgcttgccaagtctgagaagtttgatgaactaatggctgcagctaatgaagagaaggaggctgcagaagcccaagagcaaaactag

SEQ ID NO: 85687 - protein, 120 aa, Arabidopsis thaliana; identical to SEQ ID NO: 30535
  peptide (1)..(120): Ceres Seq. ID no. 12682056
  misc_feature (1)..(120): Homolog of NCBI NO: 18397011 NR Description: expressed protein; protein id: At1g29250.1, by cDNA: 18194., supported by cDNA: gi_15529269, supported by
  misc_feature (1)..(120): Homolog of NCBI NO: 18403464 NR Description: expressed protein; protein id: At2g34160.1, by cDNA: 107643. [Arabidopsis thaliana] >gi|25370772|pir||B84753
  misc_feature (11)..(119): Homolog of NCBI NO: 34910240 NR Description: OSJNBa0089K24.4 [Oryza sativa (japonica
  misc_feature (5)..(115): Homolog of NCBI NO: 15229322 NR Description: unknown protein; protein id: At3g04620.1 thaliana] >gi|6175166|gb|AAF04892.1|AC011437_7 unknown protein
  misc_feature (13)..(119): Homolog of NCBI NO: 15029401 NR Description: unknown [Leishmania infantum]
  misc_feature (13)..(119): Homolog of NCBI NO: 8745040 NR Description: conserved hypothetical protein L6293.01 major] >gi|13751124|emb|CAC37138.1| conserved hypothetical

SEQ ID NO: 85688 - protein, 88 aa, Arabidopsis thaliana
  peptide (1)..(88): Ceres Seq. ID no. 12682057
  misc_feature (1)..(88): Homolog of NCBI NO: 18397011 NR Description: expressed protein; protein id: At1g29250.1, by cDNA: 18194., supported by cDNA: gi_15529269, supported by
  misc_feature (1)..(88): Homolog of NCBI NO: 18403464 NR Description: expressed protein; protein id: At2g34160.1, by cDNA: 107643. [Arabidopsis thaliana] >gi|25370772|pir||B84753
  misc_feature (1)..(87): Homolog of NCBI NO: 34910240 NR Description: OSJNBa0089K24.4 [Oryza sativa (japonica
  misc_feature (1)..(83): Homolog of NCBI NO: 15229322 NR Description: unknown protein; protein id: At3g04620.1 thaliana] >gi|6175166|gb|AAF04892.1|AC011437_7 unknown protein
  misc_feature (1)..(87): Homolog of NCBI NO: 15029401 NR Description: unknown [Leishmania infantum]
  misc_feature (1)..(87): Homolog of NCBI NO: 8745040 NR Description: conserved hypothetical protein L6293.01 major] >gi|13751124|emb|CAC37138.1| conserved hypothetical
MQQYTDVELSALGMAIATVVTVAEILKNNGFAVEKKIMTSTVDIKDDSRGRPVQKAKIEITLAKSEKFDELMAAANEEKEAAEAQEQN

SEQ ID NO: 85689 - protein, 75 aa, Arabidopsis thaliana
  peptide (1)..(75): Ceres Seq. ID no. 12682058
  misc_feature (1)..(75): Homolog of NCBI NO: 18397011 NR Description: expressed protein; protein id: At1g29250.1, by cDNA: 18194., supported by cDNA: gi_15529269, supported by
  misc_feature (1)..(75): Homolog of NCBI NO: 18403464 NR Description: expressed protein; protein id: At2g34160.1, by cDNA: 107643. [Arabidopsis thaliana] >gi|25370772|pir||B84753
  misc_feature (1)..(74): Homolog of NCBI NO: 34910240 NR Description: OSJNBa0089K24.4 [Oryza sativa (japonica
  misc_feature (1)..(70): Homolog of NCBI NO: 15229322 NR Description: unknown protein; protein id: At3g04620.1 thaliana] >gi|6175166|gb|AAF04892.1|AC011437_7 unknown protein
  misc_feature (1)..(74): Homolog of NCBI NO: 15029401 NR Description: unknown [Leishmania infantum]
  misc_feature (1)..(74): Homolog of NCBI NO: 8745040 NR Description: conserved hypothetical protein L6293.01 major] >gi|13751124|emb|CAC37138.1| conserved hypothetical
MAIATVVTVAEILKNNGFAVEKKIMTSTVDIKDDSRGRPVQKAKIEITLAKSEKFDELMAAANEEKEAAEAQEQN

SEQ ID NO: 85690 - DNA, 723 bp, Arabidopsis thaliana
  misc_feature (1)..(723): Ceres Seq. ID no. 12682113
  misc_feature: MA Experiment ID: 20000315 Result: Down-regulated in Transcription
  misc_feature: MA Experiment 20000315 PARAMETER Experiment Name: At_14day_Shoots-Roots_Sub_P Parameter: Age (day) Value: 14
  misc_feature: MA Experiment 20000315 PARAMETER Experiment Name: At_14day_Shoots-Roots_Sub_P Parameter: Organism Value: A. thaliana
  misc_feature: MA Experiment 20000315 PARAMETER Experiment Name: At_14day_Shoots-Roots_Sub_P Parameter: Plant Line Value: WS
  misc_feature: MA Experiment 20000315 PARAMETER Experiment Name: At_14day_Shoots-Roots_Sub_P Parameter: Tissue Value: Shoots vs. Whole Plant
atggtggttatggattctccagtttcggggagaatggctgatcagaacatcgatcctaacaccacgacgagccctagtcctatagagaagcatgtttcggcgattaaggctatctccggcgacgagaaagctccgtcgaaggagaaaaagaactacgcgtcgaagaaatcaactaccgtaatccagaaatcgcactgtttccagaattcttggacattttggttcgataatccttcctccaaatcgaatcaagtcatatggggaagctctttgagatctttgtatacattcgctaccatcgaagagttctggagtctttacaataacattcatcctccaaccaagtgggtgtcagggtcggatctctactgcttcaaagataagattgaaccaaaatgggaagatcctatctgtgccaatggaggaaaatggactatgtttttccctagagctacactagaatctaattggcttaacacgttacttgcgttggttggtgagcaatttgaccaaggagatgagatctgtggagcagttttgaacttcagaacgagaggggacaggatctctctatggacaaagaaagctgcaaatgaggaggctcagctaagcattgggaagcagtggaaggaacttcttggctacaatgacacaatcggatttatagttcatgaggatgcaaagactcttgatcgtgatgctaaacgtcgatatactgtatga

SEQ ID NO: 85691 - protein, 240 aa, Arabidopsis thaliana; identical to SEQ ID NO: 71716
  peptide (1)..(240): Ceres Seq. ID no. 12682114
  misc_feature (1)..(240): Homolog of NCBI NO: 15220489 NR Description: eukaryotic translation initiation factor 4E, protein id: At1g29590.1 [Arabidopsis thaliana]
  misc_feature (1)..(240): Homolog of NCBI NO: 29839395 NR Description: Putative eukaryotic translation initiation factor
  misc_feature (1)..(240): Homolog of NCBI NO: 15220482 NR Description: eukaryotic translation initiation factor 4E, protein id: At1g29550.1 [Arabidopsis thaliana]
  misc_feature (38)..(240): Homolog of NCBI NO: 32698524 NR Description: eukaryotic translation initiation factor 4E
  misc_feature (1)..(239): Homolog of NCBI NO: 15236735 NR Description: translation initiation factor eIF4E; protein id: supported by cDNA: 25447., supported by cDNA: gi_14488075, by cDNA: gi_20147320 [Arabidopsis thaliana]
  misc_feature (53)..(238): Homolog of NCBI NO: 37813067 NR Description: eukaryotic translation initiation factor 4E
  misc_feature (40)..(240): Homolog of NCBI NO: 7862169 NR Description: eIF4E [Lycopersicon esculentum]
  misc_feature (12)..(240): Homolog of NCBI NO: 25176242 NR Description: eucaryotic initiation factor 4E [Capsicum annuum]
  misc_feature (12)..(240): Homolog of NCBI NO: 38565045 NR Description: eukaryotic translation initiation factor 4E
  misc_feature (12)..(240): Homolog of NCBI NO: 25176246 NR Description: eucaryotic initiation factor 4E [Capsicum annuum]

SEQ ID NO: 85692 - protein, 237 aa, Arabidopsis thaliana; identical to SEQ ID NO: 71717
  peptide (1)..(237): Ceres Seq. ID no. 12682115
  misc_feature (1)..(237): Homolog of NCBI NO: 15220489 NR Description: eukaryotic translation initiation factor 4E, protein id: At1g29590.1 [Arabidopsis thaliana]
  misc_feature (1)..(237): Homolog of NCBI NO: 29839395 NR Description: Putative eukaryotic translation initiation factor
  misc_feature (1)..(237): Homolog of NCBI NO: 15220482 NR Description: eukaryotic translation initiation factor 4E, protein id: At1g29550.1 [Arabidopsis thaliana]
  misc_feature (35)..(237): Homolog of NCBI NO: 32698524 NR Description: eukaryotic translation initiation factor 4E
  misc_feature (1)..(236): Homolog of NCBI NO: 15236735 NR Description: translation initiation factor eIF4E; protein id: supported by cDNA: 25447., supported by cDNA: gi_14488075, by cDNA: gi_20147320 [Arabidopsis thaliana]
  misc_feature (50)..(235): Homolog of NCBI NO: 37813067 NR Description: eukaryotic translation initiation factor 4E
  misc_feature (37)..(237): Homolog of NCBI NO: 7862169 NR Description: eIF4E [Lycopersicon esculentum]
  misc_feature (9)..(237): Homolog of NCBI NO: 25176242 NR Description: eucaryotic initiation factor 4E [Capsicum annuum]
  misc_feature (9)..(237): Homolog of NCBI NO: 38565045 NR Description: eukaryotic translation initiation factor 4E
  misc_feature (9)..(237): Homolog of NCBI NO: 25176246 NR Description: eucaryotic initiation factor 4E [Capsicum annuum]

SEQ ID NO: 85693 - protein, 229 aa, Arabidopsis thaliana
  peptide (1)..(229): Ceres Seq. ID no. 12682116
  misc_feature (1)..(229): Homolog of NCBI NO: 15220489 NR Description: eukaryotic translation initiation factor 4E, protein id: At1g29590.1 [Arabidopsis thaliana]
  misc_feature (1)..(229): Homolog of NCBI NO: 29839395 NR Description: Putative eukaryotic translation initiation factor
  misc_feature (1)..(229): Homolog of NCBI NO: 15220482 NR Description: eukaryotic translation initiation factor 4E, protein id: At1g29550.1 [Arabidopsis thaliana]
  misc_feature (27)..(229): Homolog of NCBI NO: 32698524 NR Description: eukaryotic translation initiation factor 4E
  misc_feature (1)..(228): Homolog of NCBI NO: 15236735 NR Description: translation initiation factor eIF4E; protein id: supported by cDNA: 25447., supported by cDNA: gi_14488075, by cDNA: gi_20147320 [Arabidopsis thaliana]
  misc_feature (42)..(227): Homolog of NCBI NO: 37813067 NR Description: eukaryotic translation initiation factor 4E
  misc_feature (29)..(229): Homolog of NCBI NO: 7862169 NR Description: eIF4E [Lycopersicon esculentum]
  misc_feature (1)..(229): Homolog of NCBI NO: 25176242 NR Description: eucaryotic initiation factor 4E [Capsicum annuum]
  misc_feature (1)..(229): Homolog of NCBI NO: 38565045 NR Description: eukaryotic translation initiation factor 4E
  misc_feature (1)..(229): Homolog of NCBI NO: 25176246 NR Description: eucaryotic initiation factor 4E [Capsicum annuum]
MADQNIDPNTTTSPSPIEKHVSAIKAISGDEKAPSKEKKNYASKKSTTVIQKSHCFQNSWTFWFDNPSSKSNQVIWGSSLRSLYTFATIEEFWSLYNNIHPPTKWVSGSDLYCFKDKIEPKWEDPICANGGKWTMFFPRATLESNWLNTLLALVGEQFDQGDEICGAVLNFRTRGDRISLWTKKAANEEAQLSIGKQWKELLGYNDTIGFIVHEDAKTLDRDAKRRYTV

SEQ ID NO: 85694 - DNA, 1905 bp, Arabidopsis thaliana
  misc_feature (1)..(1905): Ceres Seq. ID no. 12682569
  misc_feature: MA Experiment ID: 20000184 Result: Up-regulated in Transcription
  misc_feature: MA Experiment 20000184 PARAMETER Experiment Name: At_Shoots__P Parameter: Age (day) Value: 7
  misc_feature: MA Experiment 20000184 PARAMETER Experiment Name: At_Shoots__P Parameter: Tissue Value: Shoots vs. Whole Plant
  misc_feature: MA Experiment ID: 20000437 Result: Up-regulated in Transcription
  misc_feature: MA Experiment 20000437 PARAMETER Experiment Name: At_Drought_P Parameter: Age (day) Value: 8
  misc_feature: MA Experiment 20000437 PARAMETER Experiment Name: At_Drought_P Parameter: Organism Value: A. thaliana
  misc_feature: MA Experiment 20000437 PARAMETER Experiment Name: At_Drought_P Parameter: Plant Line Value: WS
  misc_feature: MA Experiment 20000437 PARAMETER Experiment Name: At_Drought_P Parameter: Timepoint (hr) Value: 24
  misc_feature: MA Experiment 20000437 PARAMETER Experiment Name: At_Drought_P Parameter: Tissue Value: Whole Plant
  misc_feature: MA Experiment 20000437 PARAMETER Experiment Name: At_Drought_P Parameter: Treatment Value: Drought vs. No Drought
  misc_feature: MA Experiment ID: 20001459 Result: Down-regulated in Transcription
  misc_feature: MA Experiment 20001459 PARAMETER Experiment Name: At_50mM_NH4NO3_L-to-H_P Parameter: Age (day) Value: Undefined
  misc_feature: MA Experiment 20001459 PARAMETER Experiment Name: At_50mM_NH4NO3_L-to-H_P Parameter: Organism Value: Undefined
  misc_feature: MA Experiment 20001459 PARAMETER Experiment Name: At_50mM_NH4NO3_L-to-H_P Parameter: Plant Line Value: Undefined
  misc_feature: MA Experiment 20001459 PARAMETER Experiment Name: At_50mM_NH4NO3_L-to-H_P Parameter: Timepoint (hr) Value: 4
  misc_feature: MA Experiment 20001459 PARAMETER Experiment Name: At_50mM_NH4NO3_L-to-H_P Parameter: Tissue Value: Siliques
  misc_feature: MA Experiment 20001459 PARAMETER Experiment Name: At_50mM_NH4NO3_L-to-H_P Parameter: Treatment Value: 50mM NH4NO3 vs. 100mM Manitol
atgggaaacacatgcgtgggtccgaatctgaaccctaatggattccttcaatccgttagtgctgccgtgtggcggaatcagaaaccagacgatagcattaagagcagcaaggacgagagcagtcgaaaaaagaacgataaaagcgttaatggcgacgacagtaacggtcacgtttcctccaccgtggatccagcaccatccacgttgccaacaccgagcacaccaccacctccggtgaaaatggccaacgaagaaccaccaccaaaacctatcacagagaacaaagaagatccgaattcgaaaccgcagaagaaagaagcgcacatgaaacgtatggcaagcgcaggtctacaaatagactcagttcttgggagaaaaacagagaatctcaaagatatatacagtgttgggagaaaattaggtcaaggacaatttggaacaacgtttctttgcgtggataagaagacaggtaaagagttcgcttgtaaaacgatagctaagaggaaattaacaacacctgaggatgttgaagatgtgagaagagagattcagataatgcatcatttgtctggtcatccaaacgtgattcagatcgttggtgcgtatgaagatgcagtagctgttcatgttgtgatggagatttgtgcaggtggagagttatttgataggattatacagagagggcattatactgagaaaaaagctgctgagcttgctaggatcattgttggtgttatagaagcttgtcattctttaggtgtaatgcaccgtgatcttaagcctgagaattttttatttgttagtggagatgaagaagctgctctcaagactattgattttggcctctctgttttctttaaaccaggagaaacattcactgatgtcgttggtagtccttattatgtggcaccagaagttttaaggaaacattatagtcatgaatgtgatgtttggagtgccggagttattatttacattttactaagtggcgtccctccgttttgggatgaaacggaacaggggatctttgagcaggttttgaaaggtgaccttgattttatatcagaaccatggcctagtgtatcagaaagtgccaaggatttggtccgtcggatgctaatcagagaccctaagaagcgaatgactactcatgaagttctctgtcatccatgggccagagtagatggtgttgctcttgataaacctcttgattctgctgtcctaagtcgtttgcaacaattttcagccatgaacaagctcaagaaaatagctatcaaggtaatagcagaaagcttgtcagaggaagaaatagcaggattgaaggaaatgttcaagatgatagatacagataatagtggacacatcactctcgaagaactcaagaaaggtttggacagagttggtgctgaccttaaagattcagaaatactaggattaatgcaagcagcggatatagataacagtgggacaatagactatggagagtttatagcagcaatggtgcatttgaacaaaatagagaaagaagaccatttgttcacagcattctcttactttgaccaagatggaagtggttatataaccagagacgagctccaacaagcttgcaagcaatttggcttagcggatgttcatttagacgacattttacgcgaagtcgataaagacaacgatggaagaatagactacagcgagtttgtggatatgataaactttcttggaaattattctggcgattcttctacctcccgtcggcgttttccttcgatatggttgtggggtagagttctggatctgtctcttgttgacgatactgggttacatccctgggatcatctatgctatctacgttcttgtcggatgatgaccaaattctcttgtaaatttttcataatctttatttag

SEQ ID NO: 85695 - protein, 634 aa, Arabidopsis thaliana
  peptide (1)..(634): Ceres Seq. ID no. 12682570
  misc_feature (134)..(392): Pfam Name: Protein kinase domain Pfam Description: Protein kinase domain
  misc_feature (1)..(574): Homolog of NCBI NO: 15224978 NR Description: putative calcium-dependent protein kinase;
  misc_feature (1)..(578): Homolog of NCBI NO: 15238353 NR Description: calcium-dependent protein kinase; protein id:
  misc_feature (48)..(575): Homolog of NCBI NO: 16215467 NR Description: calcium-dependent protein kinase 2 [Nicotiana
  misc_feature (48)..(575): Homolog of NCBI NO: 16215475 NR Description: calcium-dependent protein kinase 2 [Nicotiana
  misc_feature (59)..(575): Homolog of NCBI NO: 16215471 NR Description: calcium-dependent protein kinase 3 [Nicotiana
  misc_feature (59)..(575): Homolog of NCBI NO: 15289758 NR Description: calcium dependent protein kinase [Solanum
  misc_feature (63)..(578): Homolog of NCBI NO: 27819504 NR Description: putative calcium-dependent protein kinase [Oryza
  misc_feature (28)..(570): Homolog of NCBI NO: 15228350 NR Description: calmodulin-domain protein kinase CDPK isoform 2;
  misc_feature (43)..(575): Homolog of NCBI NO: 7434364 NR Description: calcium-dependent protein kinase (EC 2.7.1.-)
  misc_feature (63)..(570): Homolog of NCBI NO: 7428007 NR Description: calcium-dependent protein kinase (EC 2.7.1.-) -
MGNTCVGPNLNPNGFLQSVSAAVWRNQKPDDSIKSSKDESSRKKNDKSVNGDDSNGHVSSTVDPAPSTLPTPSTPPPPVKMANEEPPPKPITENKEDPNSKPQKKEAHMKRMASAGLQIDSVLGRKTENLKDIYSVGRKLGQGQFGTTFLCVDKKTGKEFACKTIAKRKLTTPEDVEDVRREIQIMHHLSGHPNVIQIVGAYEDAVAVHVVMEICAGGELFDRIIQRGHYTEKKAAELARIIVGVIEACHSLGVMHRDLKPENFLFVSGDEEAALKTIDFGLSVFFKPGETFTDVVGSPYYVAPEVLRKHYSHECDVWSAGVIIYILLSGVPPFWDETEQGIFEQVLKGDLDFISEPWPSVSESAKDLVRRMLIRDPKKRMTTHEVLCHPWARVDGVALDKPLDSAVLSRLQQFSAMNKLKKIAIKVIAESLSEEEIAGLKEMFKMIDTDNSGHITLEELKKGLDRVGADLKDSEILGLMQAADIDNSGTIDYGEFIAAMVHLNKIEKEDHLFTAFSYFDQDGSGYITRDELQQACKQFGLADVHLDDILREVDKDNDGRIDYSEFVDMINFLGNYSGDSSTSRRRFPSIWLWGRVLDLSLVDDTGLHPWDHLCYLRSCRMMTKFSCKFFIIFI

SEQ ID NO: 85696 - protein, 554 aa, Arabidopsis thaliana
  peptide (1)..(554): Ceres Seq. ID no. 12682571
  misc_feature (54)..(312): Pfam Name: Protein kinase domain Pfam Description: Protein kinase domain
  misc_feature (1)..(494): Homolog of NCBI NO: 15224978 NR Description: putative calcium-dependent protein kinase;
  misc_feature (1)..(498): Homolog of NCBI NO: 15238353 NR Description: calcium-dependent protein kinase; protein id:
  misc_feature (1)..(495): Homolog of NCBI NO: 16215467 NR Description: calcium-dependent protein kinase 2 [Nicotiana
  misc_feature (1)..(495): Homolog of NCBI NO: 16215475 NR Description: calcium-dependent protein kinase 2 [Nicotiana
  misc_feature (1)..(495): Homolog of NCBI NO: 16215471 NR Description: calcium-dependent protein kinase 3 [Nicotiana
  misc_feature (1)..(495): Homolog of NCBI NO: 15289758 NR Description: calcium dependent protein kinase [Solanum
  misc_feature (1)..(498): Homolog of NCBI NO: 27819504 NR Description: putative calcium-dependent protein kinase [Oryza
  misc_feature (1)..(490): Homolog of NCBI NO: 15228350 NR Description: calmodulin-domain protein kinase CDPK isoform 2;
  misc_feature (1)..(495): Homolog of NCBI NO: 7434364 NR Description: calcium-dependent protein kinase (EC 2.7.1.-)
  misc_feature (1)..(490): Homolog of NCBI NO: 7428007 NR Description: calcium-dependent protein kinase (EC 2.7.1.-) -
MANEEPPPKPITENKEDPNSKPQKKEAHMKRMASAGLQIDSVLGRKTENLKDIYSVGRKLGQGQFGTTFLCVDKKTGKEFACKTIAKRKLTTPEDVEDVRREIQIMHHLSGHPNVIQIVGAYEDAVAVHVVMEICAGGELFDRIIQRGHYTEKKAAELARIIVGVIEACHSLGVMHRDLKPENFLFVSGDEEAALKTIDFGLSVFFKPGETFTDVVGSPYYVAPEVLRKHYSHECDVWSAGVIIYILLSGVPPFWDETEQGIFEQVLKGDLDFISEPWPSVSESAKDLVRRMLIRDPKKRMTTHEVLCHPWARVDGVALDKPLDSAVLSRLQQFSAMNKLKKIAIKVIAESLSEEEIAGLKEMFKMIDTDNSGHITLEELKKGLDRVGADLKDSEILGLMQAADIDNSGTIDYGEFIAAMVHLNKIEKEDHLFTAFSYFDQDGSGYITRDELQQACKQFGLADVHLDDILREVDKDNDGRIDYSEFVDMINFLGNYSGDSSTSRRRFPSIWLWGRVLDLSLVDDTGLHPWDHLCYLRSCRMMTKFSCKFFIIFI

SEQ ID NO: 85697 - protein, 526 aa, Arabidopsis thaliana
  peptide (1)..(526): Ceres Seq. ID no. 12682572
  misc_feature (26)..(284): Pfam Name: Protein kinase domain Pfam Description: Protein kinase domain
  misc_feature (1)..(466): Homolog of NCBI NO: 15224978 NR Description: putative calcium-dependent protein kinase;
  misc_feature (1)..(470): Homolog of NCBI NO: 15238353 NR Description: calcium-dependent protein kinase; protein id:
  misc_feature (1)..(467): Homolog of NCBI NO: 16215467 NR Description: calcium-dependent protein kinase 2 [Nicotiana
  misc_feature (1)..(467): Homolog of NCBI NO: 16215475 NR Description: calcium-dependent protein kinase 2 [Nicotiana
  misc_feature (1)..(467): Homolog of NCBI NO: 16215471 NR Description: calcium-dependent protein kinase 3 [Nicotiana
  misc_feature (1)..(467): Homolog of NCBI NO: 15289758 NR Description: calcium dependent protein kinase [Solanum
  misc_feature (1)..(470): Homolog of NCBI NO: 27819504 NR Description: putative calcium-dependent protein kinase [Oryza
  misc_feature (1)..(462): Homolog of NCBI NO: 15228350 NR Description: calmodulin-domain protein kinase CDPK isoform 2;
  misc_feature (1)..(467): Homolog of NCBI NO: 7434364 NR Description: calcium-dependent protein kinase (EC 2.7.1.-)
  misc_feature (1)..(462): Homolog of NCBI NO: 7428007 NR Description: calcium-dependent protein kinase (EC 2.7.1.-) -
MKRMASAGLQIDSVLGRKTENLKDIYSVGRKLGQGQFGTTFLCVDKKTGKEFACKTIAKRKLTTPEDVEDVRREIQIMHHLSGHPNVIQIVGAYEDAVAVHVVMEICAGGELFDRIIQRGHYTEKKAAELARIIVGVIEACHSLGVMHRDLKPENFLFVSGDEEAALKTIDFGLSVFFKPGETFTDVVGSPYYVAPEVLRKHYSHECDVWSAGVIIYILLSGVPPFWDETEQGIFEQVLKGDLDFISEPWPSVSESAKDLVRRMLIRDPKKRMTTHEVLCHPWARVDGVALDKPLDSAVLSRLQQFSAMNKLKKIAIKVIAESLSEEEIAGLKEMFKMIDTDNSGHITLEELKKGLDRVGADLKDSEILGLMQAADIDNSGTIDYGEFIAAMVHLNKIEKEDHLFTAFSYFDQDGSGYITRDELQQACKQFGLADVHLDDILREVDKDNDGRIDYSEFVDMINFLGNYSGDSSTSRRRFPSIWLWGRVLDLSLVDDTGLHPWDHLCYLRSCRMMTKFSCKFFIIFI

SEQ ID NO: 85698 - DNA, 1080 bp, Arabidopsis thaliana
  misc_feature (1)..(1080): Ceres Seq. ID no. 12682598
  misc_feature: MA Experiment ID: 20000180 Result: Down-regulated in Transcription
  misc_feature: MA Experiment 20000180 PARAMETER Experiment Name: At_Germinating_Seeds_P Parameter: Age (hr) Value: 24 vs. 0
  misc_feature: MA Experiment 20000180 PARAMETER Experiment Name: At_Germinating_Seeds_P Parameter: Tissue Value: Germinating Seeds
  misc_feature: MA Experiment ID: 20000495 Result: Up-regulated in Transcription
  misc_feature: MA Experiment 20000495 PARAMETER Experiment Name: At_Guard_Cells_P Parameter: Harvest Date Value: 8/2/2002
  misc_feature: MA Experiment 20000495 PARAMETER Experiment Name: At_Guard_Cells_P Parameter: Organism Value: A. thaliana
  misc_feature: MA Experiment 20000495 PARAMETER Experiment Name: At_Guard_Cells_P Parameter: Tissue Value: Guard Cells vs. Leaves
  misc_feature: MA Experiment ID: 20000496 Result: Up-regulated in Transcription
  misc_feature: MA Experiment 20000496 PARAMETER Experiment Name: At_Guard_Cells_P Parameter: Harvest Date Value: 7/19/2002
  misc_feature: MA Experiment 20000496 PARAMETER Experiment Name: At_Guard_Cells_P Parameter: Organism Value: Canola
  misc_feature: MA Experiment 20000496 PARAMETER Experiment Name: At_Guard_Cells_P Parameter: Tissue Value: Guard Cells vs. Leaves
atgaaatggaagagagatccttatttcgacaacatcgaacacatcctccgatcatctcagctcaaatccgtcgtctctcttaagaactgtatcgtccaggaacctaatcgctgcattccgatctctgccatctccaagaagactcgtcaattcgatgtatcaaccaaaatcgctcacttcttaaggaagtttccttcaatctttgaagagttcgttggtccagagtataatctcccatggtttagattgacaccagaagcaacagaactagataggcaagagagagtcgtataccaaacttctgcagatgatttgcgtgataggttgaagaaattgattctgatgagtaaagataatgttttgccactaagtatagttcaaggaatgaaatggtatttaggtttacctgatgattacttgcagtttccagatatgaatttagattcttcgtttaggtttgtggatatggaagatggagttaaaggtttagcagtagattataatggaggagataaggttttgtctgtgttgcagaagaatgcaatgaagaagagaagaggagaagtgagtttagaagagattgagtttcctctgtttccatcaaaaggttgtagattgagagtcaagattgaagattggttaatggagtttcaaaagcttccttatgtatcaccatatgatgattattcatgtttggatccaagtagtgatatagcagagaagagagttgttggttttcttcatgaattgctttgtcttttcgttgagcattctgctgagaggaagaagttgttatgtctcaagaagcattttggattgccgcaaaaggttcataaggcgtttgagagacatccgcagattttctacttgtctatgaagaataaaacttgtacagctattcttagagagccttatagagataaagctagtgttgaaacacatcctgtgttgggggtaaggaagaaatacatccagttgatgaagaattcagagttgattctgaagagtcgaaggaatagtttcgggtttagggacgaaggggttgtagataaagatttggatttggattttgaaggctaa

SEQ ID NO: 85699 - protein, 359 aa, Arabidopsis thaliana; identical to SEQ ID NO: 72255
  peptide (1)..(359): Ceres Seq. ID no. 12682599
  misc_feature (3)..(336): Pfam Name: Plant specific of unknown function (DUF860) Pfam Description: Plant specific of unknown function (DUF860)
  misc_feature (1)..(359): Homolog of NCBI NO: 15225035 NR Description: hypothetical protein; protein id: At2g39120.1
  misc_feature (1)..(359): Homolog of NCBI NO: 11282335 NR Description: hypothetical protein F14P22.110 - Arabidopsis >gi|6735369|emb|CAB68190.1| putative protein [Arabidopsis
  misc_feature (1)..(359): Homolog of NCBI NO: 18410975 NR Description: putative protein; protein id: At3g58520.1, by cDNA: 112338., supported by cDNA: gi_15810015 [Arabidopsis >gi|15810016|gb|AAL06935.1| AT3g58520/F14P22_110 [Arabidopsis
  misc_feature (1)..(359): Homolog of NCBI NO: 21536812 NR Description: unknown [Arabidopsis thaliana]
  misc_feature (2)..(356): Homolog of NCBI NO: 15217597 NR Description: hypothetical protein; protein id: At1g71850.1
  misc_feature (1)..(337): Homolog of NCBI NO: 15238875 NR Description: putative protein; protein id: At5g48040.1 thaliana] >gi|10177755|dbj|BAB11068.1|
  misc_feature (2)..(356): Homolog of NCBI NO: 3413424 NR Description: hypothetical protein [Arabidopsis thaliana]
  misc_feature (1)..(330): Homolog of NCBI NO: 15233788 NR Description: putative protein; protein id: At4g24320.1
  misc_feature (4)..(338): Homolog of NCBI NO: 15224649 NR Description: hypothetical protein; protein id: At2g31290.1, by cDNA: gi_18377711, supported by cDNA: gi_20465406 [Arabidopsis >gi|25352258|pir||H84718 hypothetical protein At2g31290
  misc_feature (3)..(355): Homolog of NCBI NO: 21593983 NR Description: unknown [Arabidopsis thaliana]

SEQ ID NO: 85700 - protein, 245 aa, Arabidopsis thaliana; identical to SEQ ID NO: 72256
  peptide (1)..(245): Ceres Seq. ID no. 12682600
  misc_feature (1)..(222): Pfam Name: Plant specific of unknown function (DUF860) Pfam Description: Plant specific of unknown function (DUF860)
  misc_feature (1)..(245): Homolog of NCBI NO: 15225035 NR Description: hypothetical protein; protein id: At2g39120.1
  misc_feature (1)..(245): Homolog of NCBI NO: 11282335 NR Description: hypothetical protein F14P22.110 - Arabidopsis >gi|6735369|emb|CAB68190.1| putative protein [Arabidopsis
  misc_feature (1)..(245): Homolog of NCBI NO: 21536812 NR Description: unknown [Arabidopsis thaliana]
  misc_feature (1)..(245): Homolog of NCBI NO: 18410975 NR Description: putative protein; protein id: At3g58520.1, by cDNA: 112338., supported by cDNA: gi_15810015 [Arabidopsis >gi|15810016|gb|AAL06935.1| AT3g58520/F14P22_110 [Arabidopsis
  misc_feature (1)..(242): Homolog of NCBI NO: 15217597 NR Description: hypothetical protein; protein id: At1g71850.1
  misc_feature (1)..(223): Homolog of NCBI NO: 15238875 NR Description: putative protein; protein id: At5g48040.1 thaliana] >gi|10177755|dbj|BAB11068.1|
  misc_feature (1)..(242): Homolog of NCBI NO: 3413424 NR Description: hypothetical protein [Arabidopsis thaliana]
  misc_feature (1)..(216): Homolog of NCBI NO: 15233788 NR Description: putative protein; protein id: At4g24320.1
  misc_feature (1)..(224): Homolog of NCBI NO: 15224649 NR Description: hypothetical protein; protein id: At2g31290.1, by cDNA: gi_18377711, supported by cDNA: gi_20465406 [Arabidopsis >gi|25352258|pir||H84718 hypothetical protein At2g31290
  misc_feature (1)..(241): Homolog of NCBI NO: 21593983 NR Description: unknown [Arabidopsis thaliana]

SEQ ID NO: 85701 - protein, 231 aa, Arabidopsis thaliana
  peptide (1)..(231): Ceres Seq. ID no. 12682601
  misc_feature (1)..(208): Pfam Name: Plant specific of unknown function (DUF860) Pfam Description: Plant specific of unknown function (DUF860)
  misc_feature (1)..(231): Homolog of NCBI NO: 15225035 NR Description: hypothetical protein; protein id: At2g39120.1
  misc_feature (1)..(231): Homolog of NCBI NO: 11282335 NR Description: hypothetical protein F14P22.110 - Arabidopsis >gi|6735369|emb|CAB68190.1| putative protein [Arabidopsis
  misc_feature (1)..(231): Homolog of NCBI NO: 18410975 NR Description: putative protein; protein id: At3g58520.1, by cDNA: 112338., supported by cDNA: gi_15810015 [Arabidopsis >gi|15810016|gb|AAL06935.1| AT3g58520/F14P22_110 [Arabidopsis
  misc_feature (1)..(231): Homolog of NCBI NO: 21536812 NR Description: unknown [Arabidopsis thaliana]
  misc_feature (1)..(228): Homolog of NCBI NO: 15217597 NR Description: hypothetical protein; protein id: At1g71850.1
  misc_feature (1)..(209): Homolog of NCBI NO: 15238875 NR Description: putative protein; protein id: At5g48040.1 thaliana] >gi|10177755|dbj|BAB11068.1|
  misc_feature (1)..(228): Homolog of NCBI NO: 3413424 NR Description: hypothetical protein [Arabidopsis thaliana]
  misc_feature (1)..(202): Homolog of NCBI NO: 15233788 NR Description: putative protein; protein id: At4g24320.1
  misc_feature (1)..(210): Homolog of NCBI NO: 15224649 NR Description: hypothetical protein; protein id: At2g31290.1, by cDNA: gi_18377711, supported by cDNA: gi_20465406 [Arabidopsis >gi|25352258|pir||H84718 hypothetical protein At2g31290
  misc_feature (1)..(227): Homolog of NCBI NO: 21593983 NR Description: unknown [Arabidopsis thaliana]
MKWYLGLPDDYLQFPDMNLDSSFRFVDMEDGVKGLAVDYNGGDKVLSVLQKNAMKKRRGEVSLEEIEFPLFPSKGCRLRVKIEDWLMEFQKLPYVSPYDDYSCLDPSSDIAEKRVVGFLHELLCLFVEHSAERKKLLCLKKHFGLPQKVHKAFERHPQIFYLSMKNKTCTAILREPYRDKASVETHPVLGVRKKYIQLMKNSELILKSRRNSFGFRDEGVVDKDLDLDFEG

SEQ ID NO: 85702 - DNA, 696 bp, Arabidopsis thaliana
  misc_feature (1)..(696): Ceres Seq. ID no. 12682602
  misc_feature: MA Experiment ID: 20000184 Result: Down-regulated in Transcription
  misc_feature: MA Experiment 20000184 PARAMETER Experiment Name: At_Shoots__P Parameter: Age (day) Value: 7
  misc_feature: MA Experiment 20000184 PARAMETER Experiment Name: At_Shoots__P Parameter: Tissue Value: Shoots vs. Whole Plant
  misc_feature: MA Experiment ID: 20000264 Result: Down-regulated in Transcription
  misc_feature: MA Experiment 20000264 PARAMETER Experiment Name: At_Open_Flower_P Parameter: Age (day) Value: 21
  misc_feature: MA Experiment 20000264 PARAMETER Experiment Name: At_Open_Flower_P Parameter: Plant Line Value: WS
  misc_feature: MA Experiment 20000264 PARAMETER Experiment Name: At_Open_Flower_P Parameter: Tissue Value: Open Flower vs. Whole Plant
  misc_feature: MA Experiment ID: 20000495 Result: Down-regulated in Transcription
  misc_feature: MA Experiment 20000495 PARAMETER Experiment Name: At_Guard_Cells_P Parameter: Harvest Date Value: 8/2/2002
  misc_feature: MA Experiment 20000495 PARAMETER Experiment Name: At_Guard_Cells_P Parameter: Organism Value: A. thaliana
  misc_feature: MA Experiment 20000495 PARAMETER Experiment Name: At_Guard_Cells_P Parameter: Tissue Value: Guard Cells vs. Leaves
  misc_feature: MA Experiment ID: 20001451 Result: Down-regulated in Transcription
  misc_feature: MA Experiment 20001451 PARAMETER Experiment Name: At_Far-red-induction_P Parameter: Age (day) Value: 7
  misc_feature: MA Experiment 20001451 PARAMETER Experiment Name: At_Far-red-induction_P Parameter: Light Value: Far-red vs. White
  misc_feature: MA Experiment 20001451 PARAMETER Experiment Name: At_Far-red-induction_P Parameter: Organism Value: A. thaliana
  misc_feature: MA Experiment 20001451 PARAMETER Experiment Name: At_Far-red-induction_P Parameter: Plant Line Value: Columbia
  misc_feature: MA Experiment 20001451 PARAMETER Experiment Name: At_Far-red-induction_P Parameter: Timepoint (hr) Value: 24
  misc_feature: MA Experiment 20001451 PARAMETER Experiment Name: At_Far-red-induction_P Parameter: Tissue Value: Whole Plant
atgcatgagttctctactgttgatggttttgcggagataaacgagagcttagcggagatgataaagtacattgcaaatgaaccctcagtggggctttactacattcaacagcacatccgaaacgcagcaccgaatgttattaatctcaacaacaacgttttggagaagtcccgtgaaacaggcttgcataccgaagacttggaagattctatagccatggtgaaatctatgaaagactgtggttcacctattgctgatgagatgataggagacattaagaactctttagcgataatgtcttcgaaacaaccgaggagaggggtcatcctcaactccacaagtccttggagcagatccagcagtataacaacaagaacgcgtggttctgataacagccaggataatagtgaaagcagcaactatttcacatcagtcttcatgacggctaaggagaaggcaagcaacatcaaatggccacaacttgatttcaaagaacaaaagtcagaggctgaccccaatgtgcaaagcaatgagttaaaagaagaagaagaagaggactcagggaaaggtgaacatattgtggagacaacaaagtttgaggagttcaaggcaggtaaagaagcgagtctcaaggcatggcttggagatatggatgggaatgtggatgttggtggtcgtgttgccgagagaatttag

SEQ ID NO: 85703 - protein, 231 aa, Arabidopsis thaliana; identical to SEQ ID NO: 44612
  peptide (1)..(231): Ceres Seq. ID no. 12682603
  misc_feature (1)..(231): Homolog of NCBI NO: 15225042 NR Description: unknown protein; protein id: At2g39170.1

SEQ ID NO: 85704 - protein, 212 aa, Arabidopsis thaliana; identical to SEQ ID NO: 44613
  peptide (1)..(212): Ceres Seq. ID no. 12682604
  misc_feature (1)..(212): Homolog of NCBI NO: 15225042 NR Description: unknown protein; protein id: At2g39170.1

SEQ ID NO: 85705 - protein, 159 aa, Arabidopsis thaliana; identical to SEQ ID NO: 44614
  peptide (1)..(159): Ceres Seq. ID no. 12682605
  misc_feature (1)..(159): Homolog of NCBI NO: 15225042 NR Description: unknown protein; protein id: At2g39170.1

SEQ ID NO: 85706 - DNA, 2259 bp, Arabidopsis thaliana
  misc_feature (1)..(2259): Ceres Seq. ID no. 12682606
  misc_feature: MA Experiment ID: 20000180 Result: Up-regulated in Transcription
  misc_feature: MA Experiment 20000180 PARAMETER Experiment Name: At_Germinating_Seeds_P Parameter: Age (hr) Value: 24 vs. 0
  misc_feature: MA Experiment 20000180 PARAMETER Experiment Name: At_Germinating_Seeds_P Parameter: Tissue Value: Germinating Seeds
  misc_feature: MA Experiment ID: 20000184 Result: Up-regulated in Transcription
  misc_feature: MA Experiment 20000184 PARAMETER Experiment Name: At_Shoots__P Parameter: Age (day) Value: 7
  misc_feature: MA Experiment 20000184 PARAMETER Experiment Name: At_Shoots__P Parameter: Tissue Value: Shoots vs. Whole Plant
  misc_feature: MA Experiment ID: 20000227 Result: Up-regulated in Transcription
  misc_feature: MA Experiment 20000227 PARAMETER Experiment Name: At_Root-Tips-vs-Tops_P Parameter: Tissue Value: Root Tips vs. Root Tops
  misc_feature: MA Experiment ID: 20000437 Result: Down-regulated in Transcription
  misc_feature: MA Experiment 20000437 PARAMETER Experiment Name: At_Drought_P Parameter: Age (day) Value: 8
  misc_feature: MA Experiment 20000437 PARAMETER Experiment Name: At_Drought_P Parameter: Organism Value: A. thaliana
  misc_feature: MA Experiment 20000437 PARAMETER Experiment Name: At_Drought_P Parameter: Plant Line Value: WS
  misc_feature: MA Experiment 20000437 PARAMETER Experiment Name: At_Drought_P Parameter: Timepoint (hr) Value: 24
  misc_feature: MA Experiment 20000437 PARAMETER Experiment Name: At_Drought_P Parameter: Tissue Value: Whole Plant
  misc_feature: MA Experiment 20000437 PARAMETER Experiment Name: At_Drought_P Parameter: Treatment Value: Drought vs. No Drought
  misc_feature: MA Experiment ID: 20001247 Result: Up-regulated in Transcription
  misc_feature: MA Experiment 20001247 PARAMETER Experiment Name: At_Far-red-induction_P Parameter: Age (day) Value: 7
  misc_feature: MA Experiment 20001247 PARAMETER Experiment Name: At_Far-red-induction_P Parameter: Light Value: Far-red vs. White
  misc_feature: MA Experiment 20001247 PARAMETER Experiment Name: At_Far-red-induction_P Parameter: Organism Value: A. thaliana
  misc_feature: MA Experiment 20001247 PARAMETER Experiment Name: At_Far-red-induction_P Parameter: Plant Line Value: Columbia
  misc_feature: MA Experiment 20001247 PARAMETER Experiment Name: At_Far-red-induction_P Parameter: Timepoint (hr) Value: 1
  misc_feature: MA Experiment 20001247 PARAMETER Experiment Name: At_Far-red-induction_P Parameter: Tissue Value: Whole Plant
atgcaacccaattctcacatcttcgtcatcatcaccatttcatcactcatcattacagtttctgcgtatggctcaacaggcacaatcgcagcagctttcggcgaaaacggattcttctgcgccattgacgcaagtgggaagcaagaagtcatctgttgggatagaggaaacactaaccgatcattaaaccgacccccaggtgaaatctccggttattctcctccaatgacttctctttccggtggtgaaggttttctctgcgccattacgtcgaacacttcgcgtgcgttttgttggaaccttgaagatccttctgagaatctcgttcctcgagcttttcagtataattcttacttacagattgcttctggtaacaatcatgtttgtgctattagtggattgtattactcaggtcctgattatggtcctgttcattgttgggagtatagtgataacactaatttcacttctgatgggttttcttgtggtgttactaaagatggagacttggtttgttggggaccaaaatcaaaccttttgaatttctccaataatgaagaattcgaggttttagcttctgggaggaactctgtttgtggtgtctctaaagattcaggtcaacttcattgctttggagatgaaacagagtttggttcgttaccaaaccggcctcggtttattgctctttcagctggtgctaatcattattgtggtatacgtgaggatgatcatggagttgagtgttggggaaggaacttgaattcttcttcatcatcttcagctcctaatacttcagggtttgtggcgatttcgtcttcggattcaacaacttgtggagttagagagcttgatttagttcttgattgttggagagttcatgattcttcgaaagcggattatagtcctcctttggagttatgtagccccgggatgtgttcgcctcgcggtaattgtggtgatggttggtttgctttcaatgcaagtatcttgaaagaatctgagcttactagcttgtgctcgtttcataacctcaacatttgtttacgttgtggaatcagttgcttggaagggtatttcccttccagcacttgtaatccaaacgcggaccgggtctgtactccttgttcgctatgtcagaatagttcttgttacggtatctgtaagattcgggctacgaaatcgaaggagcatgagcagaaagagcagagagaggtacggagattggtgatcatcatagggtgctctgttttagggttcttggtgatgttgattggtttgtctttcattccaaagatgacaaaaggtagtaaacgagatgatgaagagaggagtaagatgacttgttgcttctgtttcgataagaattctgtagaagctgatcctgatcctgtccctcatcagtcggttcttctaccaaccgctgtatctctcggggaaaccaagatcttccgtctatcagaacttaaagacgcgactcacgggttcaaagaattcaacgagctcgggagaggtagcttcgggtttgtctataaagctgttttatctgatgggatacatgttgcggtcaaaagagcgaatgctgcaacgatcattcactctaataaccgaggtttcgagtccgagctagagattctttgcaaaatcagacacaacaatattgtgaatttgttaggatactgctcagagatgggggaaaggcttttggtttatgagtacatgccgcacggtacgcttcatgatcatctccatggagatctttcacaactggactggagcatgagactgaagatcatgttgcaggctgcaagaggacttgattacttacacaacgaagtagatcctccgataattcacagagatgtgaaaacgtccaacatcttgttagacggtgaaatgtgcgcaagaattgcggatttcggattggtaagctcgaatgaaagggattcaagcaatagtgatagagaaggtgatgtgtatgactttggtattgttctacttgagatactaagcgggcgaaaagctatcgatagagagtctgatcctgcggggattgcggaatgggcggttcctttgatcaggaaaggaaaagcagcggcgataatcgataggaacatttgtttgccaagaaatgtagagcctttgcttaaattggctgagttagctgagcttgctgtgagggaaaattcgaatgaacgaccaaatatcagaaatattctgtgttttcttgatctcatcgtcaagtctggcctcactttttaa

SEQ ID NO: 85707 - protein, 752 aa, Arabidopsis thaliana
  peptide (1)..(752): Ceres Seq. ID no. 12682607
  misc_feature (495)..(641): Pfam Name: Protein kinase domain Pfam Description: Protein kinase domain
  misc_feature (74)..(752): Homolog of NCBI NO: 15232759 NR Description: putative protein kinase; protein id: At3g09780.1 thaliana] >gi|6681340|gb|AAF23257.1|AC015985_15 putative protein
  misc_feature (9)..(649): Homolog of NCBI NO: 15721862 NR Description: CR4 [Oryza sativa]
  misc_feature (655)..(743): Homolog of NCBI NO: 15721862 NR Description: CR4 [Oryza sativa]
  misc_feature (1)..(262): Homolog of NCBI NO: 15225044 NR Description: putative protein kinase; protein id: At2g39180.1 thaliana] >gi|7487054|pir||T02584 probable protein kinase
  misc_feature (24)..(649): Homolog of NCBI NO: 3913366 NR Description: Putative receptor protein kinase CRINKLY4
  misc_feature (655)..(743): Homolog of NCBI NO: 3913366 NR Description: Putative receptor protein kinase CRINKLY4
  misc_feature (301)..(651): Homolog of NCBI NO: 15231681 NR Description: putative protein; protein id: At3g59420.1, by cDNA: gi_20302589 [Arabidopsis thaliana]
  misc_feature (655)..(743): Homolog of NCBI NO: 15231681 NR Description: putative protein; protein id: At3g59420.1, by cDNA: gi_20302589 [Arabidopsis thaliana]
  misc_feature (121)..(641): Homolog of NCBI NO: 15238823 NR Description: receptor kinase-like protein; protein id:
  misc_feature (655)..(751): Homolog of NCBI NO: 15238823 NR Description: receptor kinase-like protein; protein id:
MQPNSHIFVIITISSLIITVSAYGSTGTIAAAFGENGFFCAIDASGKQEVICWDRGNTNRSLNRPPGEISGYSPPMTSLSGGEGFLCAITSNTSRAFCWNLEDPSENLVPRAFQYNSYLQIASGNNHVCAISGLYYSGPDYGPVHCWEYSDNTNFTSDGFSCGVTKDGDLVCWGPKSNLLNFSNNEEFEVLASGRNSVCGVSKDSGQLHCFGDETEFGSLPNRPRFIALSAGANHYCGIREDDHGVECWGRNLNSSSSSSAPNTSGFVAISSSDSTTCGVRELDLVLDCWRVHDSSKADYSPPLELCSPGMCSPRGNCGDGWFAFNASILKESELTSLCSFHNLNICLRCGISCLEGYFPSSTCNPNADRVCTPCSLCQNSSCYGICKIRATKSKEHEQKEQREVRRLVIIIGCSVLGFLVMLIGLSFIPKMTKGSKRDDEERSKMTCCFCFDKNSVEADPDPVPHQSVLLPTAVSLGETKIFRLSELKDATHGFKEFNELGRGSFGFVYKAVLSDGIHVAVKRANAATIIHSNNRGFESELEILCKIRHNNIVNLLGYCSEMGERLLVYEYMPHGTLHDHLHGDLSQLDWSMRLKIMLQAARGLDYLHNEVDPPIIHRDVKTSNILLDGEMCARIADFGLVSSNERDSSNSDREGDVYDFGIVLLEILSGRKAIDRESDPAGIAEWAVPLIRKGKAAAIIDRNICLPRNVEPLLKLAELAELAVRENSNERPNIRNILCFLDLIVKSGLTF

SEQ ID NO: 85708 - protein, 677 aa, Arabidopsis thaliana
  peptide (1)..(677): Ceres Seq. ID no. 12682608
  misc_feature (420)..(566): Pfam Name: Protein kinase domain Pfam Description: Protein kinase domain
  misc_feature (1)..(677): Homolog of NCBI NO: 15232759 NR Description: putative protein kinase; protein id: At3g09780.1 thaliana] >gi|6681340|gb|AAF23257.1|AC015985_15 putative protein
  misc_feature (1)..(574): Homolog of NCBI NO: 15721862 NR Description: CR4 [Oryza sativa]
  misc_feature (580)..(668): Homolog of NCBI NO: 15721862 NR Description: CR4 [Oryza sativa]
  misc_feature (1)..(187): Homolog of NCBI NO: 15225044 NR Description: putative protein kinase; protein id: At2g39180.1 thaliana] >gi|7487054|pir||T02584 probable protein kinase
  misc_feature (1)..(574): Homolog of NCBI NO: 3913366 NR Description: Putative receptor protein kinase CRINKLY4
  misc_feature (580)..(668): Homolog of NCBI NO: 3913366 NR Description: Putative receptor protein kinase CRINKLY4
  misc_feature (226)..(576): Homolog of NCBI NO: 15231681 NR Description: putative protein; protein id: At3g59420.1, by cDNA: gi_20302589 [Arabidopsis thaliana]
  misc_feature (580)..(668): Homolog of NCBI NO: 15231681 NR Description: putative protein; protein id: At3g59420.1, by cDNA: gi_20302589 [Arabidopsis thaliana]
  misc_feature (46)..(566): Homolog of NCBI NO: 15238823 NR Description: receptor kinase-like protein; protein id:
  misc_feature (580)..(676): Homolog of NCBI NO: 15238823 NR Description: receptor kinase-like protein; protein id:
MTSLSGGEGFLCAITSNTSRAFCWNLEDPSENLVPRAFQYNSYLQIASGNNHVCAISGLYYSGPDYGPVHCWEYSDNTNFTSDGFSCGVTKDGDLVCWGPKSNLLNFSNNEEFEVLASGRNSVCGVSKDSGQLHCFGDETEFGSLPNRPRFIALSAGANHYCGIREDDHGVECWGRNLNSSSSSSAPNTSGFVAISSSDSTTCGVRELDLVLDCWRVHDSSKADYSPPLELCSPGMCSPRGNCGDGWFAFNASILKESELTSLCSFHNLNICLRCGISCLEGYFPSSTCNPNADRVCTPCSLCQNSSCYGICKIRATKSKEHEQKEQREVRRLVIIIGCSVLGFLVMLIGLSFIPKMTKGSKRDDEERSKMTCCFCFDKNSVEADPDPVPHQSVLLPTAVSLGETKIFRLSELKDATHGFKEFNELGRGSFGFVYKAVLSDGIHVAVKRANAATIIHSNNRGFESELEILCKIRHNNIVNLLGYCSEMGERLLVYEYMPHGTLHDHLHGDLSQLDWSMRLKIMLQAARGLDYLHNEVDPPIIHRDVKTSNILLDGEMCARIADFGLVSSNERDSSNSDREGDVYDFGIVLLEILSGRKAIDRESDPAGIAEWAVPLIRKGKAAAIIDRNICLPRNVEPLLKLAELAELAVRENSNERPNIRNILCFLDLIVKSGLTF

SEQ ID NO: 85709 - protein, 442 aa, Arabidopsis thaliana
  peptide (1)..(442): Ceres Seq. ID no. 12682609
  misc_feature (185)..(331): Pfam Name: Protein kinase domain Pfam Description: Protein kinase domain
  misc_feature (1)..(442): Homolog of NCBI NO: 15232759 NR Description: putative protein kinase; protein id: At3g09780.1 thaliana] >gi|6681340|gb|AAF23257.1|AC015985_15 putative protein
  misc_feature (1)..(339): Homolog of NCBI NO: 15721862 NR Description: CR4 [Oryza sativa]
  misc_feature (345)..(433): Homolog of NCBI NO: 15721862 NR Description: CR4 [Oryza sativa]
  misc_feature (1)..(339): Homolog of NCBI NO: 3913366 NR Description: Putative receptor protein kinase CRINKLY4
  misc_feature (345)..(433): Homolog of NCBI NO: 3913366 NR Description: Putative receptor protein kinase CRINKLY4
  misc_feature (1)..(341): Homolog of NCBI NO: 15231681 NR Description: putative protein; protein id: At3g59420.1, by cDNA: gi_20302589 [Arabidopsis thaliana]
  misc_feature (345)..(433): Homolog of NCBI NO: 15231681 NR Description: putative protein; protein id: At3g59420.1, by cDNA: gi_20302589 [Arabidopsis thaliana]
  misc_feature (1)..(331): Homolog of NCBI NO: 15238823 NR Description: receptor kinase-like protein; protein id:
  misc_feature (345)..(441): Homolog of NCBI NO: 15238823 NR Description: receptor kinase-like protein; protein id:
  misc_feature (147)..(347): Homolog of NCBI NO: 39545656 NR Description: OJ000114_01.11 [Oryza sativa (japonica
MCSPRGNCGDGWFAFNASILKESELTSLCSFHNLNICLRCGISCLEGYFPSSTCNPNADRVCTPCSLCQNSSCYGICKIRATKSKEHEQKEQREVRRLVIIIGCSVLGFLVMLIGLSFIPKMTKGSKRDDEERSKMTCCFCFDKNSVEADPDPVPHQSVLLPTAVSLGETKIFRLSELKDATHGFKEFNELGRGSFGFVYKAVLSDGIHVAVKRANAATIIHSNNRGFESELEILCKIRHNNIVNLLGYCSEMGERLLVYEYMPHGTLHDHLHGDLSQLDWSMRLKIMLQAARGLDYLHNEVDPPIIHRDVKTSNILLDGEMCARIADFGLVSSNERDSSNSDREGDVYDFGIVLLEILSGRKAIDRESDPAGIAEWAVPLIRKGKAAAIIDRNICLPRNVEPLLKLAELAELAVRENSNERPNIRNILCFLDLIVKSGLTF

SEQ ID NO: 85710 - DNA, 933 bp, Arabidopsis thaliana
  misc_feature (1)..(933): Ceres Seq. ID no. 12682659
  misc_feature: MA Experiment ID: 20000030 Result: Up-regulated in Transcription
  misc_feature: MA Experiment 20000030 PARAMETER Experiment Name: At_CS6630_Roots_cDNA_P Parameter: Plant Line Value: CS6630 vs. WS
  misc_feature: MA Experiment 20000030 PARAMETER Experiment Name: At_CS6630_Roots_cDNA_P Parameter: Tissue Value: Roots
  misc_feature: MA Experiment ID: 20000068 Result: Up-regulated in Transcription
  misc_feature: MA Experiment ID: 20000306 Result: Up-regulated in Transcription
  misc_feature: MA Experiment 20000306 PARAMETER Experiment Name: At_Germinating_Seeds_Sub_P Parameter: Age (hr) Value: 6 vs. 0
  misc_feature: MA Experiment 20000306 PARAMETER Experiment Name: At_Germinating_Seeds_Sub_P Parameter: Organism Value: A. thaliana
  misc_feature: MA Experiment 20000306 PARAMETER Experiment Name: At_Germinating_Seeds_Sub_P Parameter: Plant Line Value: WS
  misc_feature: MA Experiment 20000306 PARAMETER Experiment Name: At_Germinating_Seeds_Sub_P Parameter: Tissue Value: Germinating Seeds
  misc_feature: MA Experiment ID: 20000307 Result: Up-regulated in Transcription
  misc_feature: MA Experiment 20000307 PARAMETER Experiment Name: At_Germinating_Seeds_Sub_P Parameter: Age (hr) Value: 24 vs. 0
  misc_feature: MA Experiment 20000307 PARAMETER Experiment Name: At_Germinating_Seeds_Sub_P Parameter: Organism Value: A. thaliana
  misc_feature: MA Experiment 20000307 PARAMETER Experiment Name: At_Germinating_Seeds_Sub_P Parameter: Plant Line Value: WS
  misc_feature: MA Experiment 20000307 PARAMETER Experiment Name: At_Germinating_Seeds_Sub_P Parameter: Tissue Value: Germinating Seeds
  misc_feature: MA Experiment ID: 20000314 Result: Up-regulated in Transcription
  misc_feature: MA Experiment 20000314 PARAMETER Experiment Name: At_14day_Shoots-Roots_Sub_P Parameter: Age (day) Value: 14
  misc_feature: MA Experiment 20000314 PARAMETER Experiment Name: At_14day_Shoots-Roots_Sub_P Parameter: Organism Value: A. thaliana
  misc_feature: MA Experiment 20000314 PARAMETER Experiment Name: At_14day_Shoots-Roots_Sub_P Parameter: Plant Line Value: WS
  misc_feature: MA Experiment 20000314 PARAMETER Experiment Name: At_14day_Shoots-Roots_Sub_P Parameter: Tissue Value: Roots vs. Whole Plant
  misc_feature: MA Experiment ID: 20000315 Result: Down-regulated in Transcription
  misc_feature: MA Experiment 20000315 PARAMETER Experiment Name: At_14day_Shoots-Roots_Sub_P Parameter: Age (day) Value: 14
  misc_feature: MA Experiment 20000315 PARAMETER Experiment Name: At_14day_Shoots-Roots_Sub_P Parameter: Organism Value: A. thaliana
  misc_feature: MA Experiment 20000315 PARAMETER Experiment Name: At_14day_Shoots-Roots_Sub_P Parameter: Plant Line Value: WS
  misc_feature: MA Experiment 20000315 PARAMETER Experiment Name: At_14day_Shoots-Roots_Sub_P Parameter: Tissue Value: Shoots vs. Whole Plant
atgacccaaaaaccacgaactgtgatctgcgtcggagacatccatggaaacatatcaaagctcaataaactctggcttaatcttcaatccgatatccaaaactcagatttcagctcagctctcgtcatcttcctcggcgactactgcgatcgtggaccggagactcgaaaagtcatcgacttcttgatctctttgccggagaaacatcccgatcagacccatgtctttcttgccggaaaccacgactttgcttttgctggcttcttgggtttgttacctcgcccttcagatgggtctgagtttaaggaaacgtggaaagagtactcaaaaagtgaggagagagaaggatggtataaaggtgaagggtttgagaatatgcatctccaaagcaggagatgggcgggaaagattagggttcagttcgattattccgcatatggagtgttgtataatggatcaatatacgatgcggcgtctacttttgaatcttatggcgttcctcatggatcttctgatttgataaaggcagtacctgagagtcacaagaaattcttgaccaatatggtttgggtacataaagaggatgatgtttgtatagaaacagaggaaggccttacgcattgtaagttgattgccgtacatgctggtctagagacaaagaataacgtagaagaacagcttaaactattgagagataaagacacaagcatcccaagaatacaacctctaactggtcggaaaaccgtttgggggatcccacaggaactggatgataaaaagactattgttgttagcggccaccatgggaaacttcacatcgatggcttgagattgatcatcgatgaaggtggtggatataccgatacacctttggctgcaattgttcttccttctaagaagattatccgcgacaccgataatttttccaattaa

SEQ ID NO: 85711 - protein, 310 aa, Arabidopsis thaliana; identical to SEQ ID NO: 43054
  peptide (1)..(310): Ceres Seq. ID no. 12682660
  misc_feature (6)..(271): Pfam Name: Calcineurin-like phosphoesterase Pfam Description: Calcineurin-like phosphoesterase
  misc_feature (1)..(310): Homolog of NCBI NO: 6143880 NR Description: unknown protein [Arabidopsis thaliana]
  misc_feature (1)..(310): Homolog of NCBI NO: 18398696 NR Description: expressed protein; protein id: At3g09960.1, by cDNA: 155078. [Arabidopsis thaliana]
  misc_feature (1)..(310): Homolog of NCBI NO: 18398699 NR Description: expressed protein; protein id: At3g09970.1, by cDNA: 97694. [Arabidopsis thaliana] unknown protein [Arabidopsis thaliana]
  misc_feature (1)..(310): Homolog of NCBI NO: 21618122 NR Description: unknown [Arabidopsis thaliana]
  misc_feature (5)..(310): Homolog of NCBI NO: 38347604 NR Description: OSJNBa0042I15.17 [Oryza sativa (japonica
  misc_feature (160)..(310): Homolog of NCBI NO: 19424085 NR Description: unknown protein [Arabidopsis thaliana]
  misc_feature (11)..(95): Homolog of NCBI NO: 13475753 NR Description: serine/threonine protein phosphatase loti] >gi|14026509|dbj|BAB53106.1| serine/threonine protein
  misc_feature (8)..(89): Homolog of NCBI NO: 29653830 NR Description: serine/threonine protein phosphatase [Coxiella RSA 493] >gi|29541093|gb|AAO90036.1| serine/threonine protein
  misc_feature (8)..(101): Homolog of NCBI NO: 27377467 NR Description: serine/threonine protein phosphatase I japonicum] >gi|27350611|dbj|BAC47621.1| serine/threonine protein

SEQ ID NO: 85712 - protein, 185 aa, Arabidopsis thaliana
  peptide (1)..(185): Ceres Seq. ID no. 12682661
  misc_feature (1)..(146): Pfam Name: Calcineurin-like phosphoesterase Pfam Description: Calcineurin-like phosphoesterase
  misc_feature (1)..(185): Homolog of NCBI NO: 6143880 NR Description: unknown protein [Arabidopsis thaliana]
  misc_feature (1)..(185): Homolog of NCBI NO: 18398696 NR Description: expressed protein; protein id: At3g09960.1, by cDNA: 155078. [Arabidopsis thaliana]
  misc_feature (1)..(185): Homolog of NCBI NO: 18398699 NR Description: expressed protein; protein id: At3g09970.1, by cDNA: 97694. [Arabidopsis thaliana] unknown protein [Arabidopsis thaliana]
  misc_feature (1)..(185): Homolog of NCBI NO: 21618122 NR Description: unknown [Arabidopsis thaliana]
  misc_feature (1)..(185): Homolog of NCBI NO: 38347604 NR Description: OSJNBa0042I15.17 [Oryza sativa (japonica
  misc_feature (35)..(185): Homolog of NCBI NO: 19424085 NR Description: unknown protein [Arabidopsis thaliana]
MHLQSRRWAGKIRVQFDYSAYGVLYNGSIYDAASTFESYGVPHGSSDLIKAVPESHKKFLTNMVWVHKEDDVCIETEEGLTHCKLIAVHAGLETKNNVEEQLKLLRDKDTSIPRIQPLTGRKTVWGIPQELDDKKTIVVSGHHGKLHIDGLRLIIDEGGGYTDTPLAAIVLPSKKIIRDTDNFSN

SEQ ID NO: 85713 - DNA, 1161 bp, Arabidopsis thaliana
  misc_feature (1)..(1161): Ceres Seq. ID no. 12682678
  misc_feature: MA Experiment ID: 20000173 Result: Up-regulated in Transcription
  misc_feature: MA Experiment 20000173 PARAMETER Experiment Name: At_42deg_Heat_P Parameter: Age (day) Value: 14
  misc_feature: MA Experiment 20000173 PARAMETER Experiment Name: At_42deg_Heat_P Parameter: Organism Value: A. thaliana
  misc_feature: MA Experiment 20000173 PARAMETER Experiment Name: At_42deg_Heat_P Parameter: Plant Line Value: WS
  misc_feature: MA Experiment 20000173 PARAMETER Experiment Name: At_42deg_Heat_P Parameter: Temperature (deg C) Value: 42 vs. 22
  misc_feature: MA Experiment 20000173 PARAMETER Experiment Name: At_42deg_Heat_P Parameter: Timepoint (hr) Value: 6
  misc_feature: MA Experiment 20000173 PARAMETER Experiment Name: At_42deg_Heat_P Parameter: Tissue Value: Aerial
  misc_feature: MA Experiment ID: 20000179 Result: Up-regulated in Transcription
  misc_feature: MA Experiment 20000179 PARAMETER Experiment Name: At_Germinating_Seeds_P Parameter: Age (hr) Value: 6 vs. 0
  misc_feature: MA Experiment 20000179 PARAMETER Experiment Name: At_Germinating_Seeds_P Parameter: Tissue Value: Germinating Seeds
  misc_feature: MA Experiment ID: 20000182 Result: Down-regulated in Transcription
  misc_feature: MA Experiment 20000182 PARAMETER Experiment Name: At_2mM_SA_P Parameter: Age (day) Value: 14
  misc_feature: MA Experiment 20000182 PARAMETER Experiment Name: At_2mM_SA_P Parameter: Organism Value: A. thaliana
  misc_feature: MA Experiment 20000182 PARAMETER Experiment Name: At_2mM_SA_P Parameter: Plant Line Value: WS
  misc_feature: MA Experiment 20000182 PARAMETER Experiment Name: At_2mM_SA_P Parameter: Timepoint (hr) Value: 6
  misc_feature: MA Experiment 20000182 PARAMETER Experiment Name: At_2mM_SA_P Parameter: Tissue Value: Aerial
  misc_feature: MA Experiment 20000182 PARAMETER Experiment Name: At_2mM_SA_P Parameter: Treatment Value: 2mM SA vs. No Treatment
  misc_feature: MA Experiment ID: 20000264 Result: Up-regulated in Transcription
  misc_feature: MA Experiment 20000264 PARAMETER Experiment Name: At_Open_Flower_P Parameter: Age (day) Value: 21
  misc_feature: MA Experiment 20000264 PARAMETER Experiment Name: At_Open_Flower_P Parameter: Plant Line Value: WS
  misc_feature: MA Experiment 20000264 PARAMETER Experiment Name: At_Open_Flower_P Parameter: Tissue Value: Open Flower vs. Whole Plant
  misc_feature: MA Experiment ID: 20000265 Result: Up-regulated in Transcription
  misc_feature: MA Experiment 20000265 PARAMETER Experiment Name: At_Open_Flower_P Parameter: Age (day) Value: 21
  misc_feature: MA Experiment 20000265 PARAMETER Experiment Name: At_Open_Flower_P Parameter: Plant Line Value: WS
  misc_feature: MA Experiment 20000265 PARAMETER Experiment Name: At_Open_Flower_P Parameter: Tissue Value: Closed Flower vs. Whole Plant
  misc_feature: MA Experiment ID: 20000286 Result: Up-regulated in Transcription
  misc_feature: MA Experiment 20000286 PARAMETER Experiment Name: At_Open_Flower_P Parameter: Age (day) Value: 21
  misc_feature: MA Experiment 20000286 PARAMETER Experiment Name: At_Open_Flower_P Parameter: Plant Line Value: WS
  misc_feature: MA Experiment 20000286 PARAMETER Experiment Name: At_Open_Flower_P Parameter: Tissue Value: Half Open vs. Whole Plant
  misc_feature: MA Experiment ID: 20000437 Result: Up-regulated in Transcription
  misc_feature: MA Experiment 20000437 PARAMETER Experiment Name: At_Drought_P Parameter: Age (day) Value: 8
  misc_feature: MA Experiment 20000437 PARAMETER Experiment Name: At_Drought_P Parameter: Organism Value: A. thaliana
  misc_feature: MA Experiment 20000437 PARAMETER Experiment Name: At_Drought_P Parameter: Plant Line Value: WS
  misc_feature: MA Experiment 20000437 PARAMETER Experiment Name: At_Drought_P Parameter: Timepoint (hr) Value: 24
  misc_feature: MA Experiment 20000437 PARAMETER Experiment Name: At_Drought_P Parameter: Tissue Value: Whole Plant
  misc_feature: MA Experiment 20000437 PARAMETER Experiment Name: At_Drought_P Parameter: Treatment Value: Drought vs. No Drought
  misc_feature: MA Experiment ID: 20000451 Result: Up-regulated in Transcription
  misc_feature: MA Experiment 20000451 PARAMETER Experiment Name: At_CS6879_Shoots-Roots_P Parameter: Age (day) Value: 14
  misc_feature: MA Experiment 20000451 PARAMETER Experiment Name: At_CS6879_Shoots-Roots_P Parameter: Organism Value: A. thaliana
  misc_feature: MA Experiment 20000451 PARAMETER Experiment Name: At_CS6879_Shoots-Roots_P Parameter: Plant Line Value: CS6879 vs. WS
  misc_feature: MA Experiment 20000451 PARAMETER Experiment Name: At_CS6879_Shoots-Roots_P Parameter: Tissue Value: Roots
  misc_feature: MA Experiment ID: 20000495 Result: Up-regulated in Transcription
  misc_feature: MA Experiment 20000495 PARAMETER Experiment Name: At_Guard_Cells_P Parameter: Harvest Date Value: 8/2/2002
  misc_feature: MA Experiment 20000495 PARAMETER Experiment Name: At_Guard_Cells_P Parameter: Organism Value: A. thaliana
  misc_feature: MA Experiment 20000495 PARAMETER Experiment Name: At_Guard_Cells_P Parameter: Tissue Value: Guard Cells vs. Leaves
  misc_feature: MA Experiment ID: 20000794 Result: Up-regulated in Transcription
  misc_feature: MA Experiment 20000794 PARAMETER Experiment Name: At_Petals_P Parameter: Age (day) Value: 23-25 days
  misc_feature: MA Experiment 20000794 PARAMETER Experiment Name: At_Petals_P Parameter: Plant Line Value: WS
  misc_feature: MA Experiment 20000794 PARAMETER Experiment Name: At_Petals_P Parameter: Tissue Value: Petals vs. Whole plant
  misc_feature: MA Experiment ID: 20001248 Result: Down-regulated in Transcription
  misc_feature: MA Experiment 20001248 PARAMETER Experiment Name: At_Far-red-induction_P Parameter: Age (day) Value: 7
  misc_feature: MA Experiment 20001248 PARAMETER Experiment Name: At_Far-red-induction_P Parameter: Light Value: Far-red vs. White
  misc_feature: MA Experiment 20001248 PARAMETER Experiment Name: At_Far-red-induction_P Parameter: Organism Value: A. thaliana
  misc_feature: MA Experiment 20001248 PARAMETER Experiment Name: At_Far-red-induction_P Parameter: Plant Line Value: Columbia
  misc_feature: MA Experiment 20001248 PARAMETER Experiment Name: At_Far-red-induction_P Parameter: Timepoint (hr) Value: 4
  misc_feature: MA Experiment 20001248 PARAMETER Experiment Name: At_Far-red-induction_P Parameter: Tissue Value: Whole Plant
  misc_feature: MA Experiment ID: 20001459 Result: Down-regulated in Transcription
  misc_feature: MA Experiment 20001459 PARAMETER Experiment Name: At_50mM_NH4NO3_L-to-H_P Parameter: Age (day) Value: Undefined
  misc_feature: MA Experiment 20001459 PARAMETER Experiment Name: At_50mM_NH4NO3_L-to-H_P Parameter: Organism Value: Undefined
  misc_feature: MA Experiment 20001459 PARAMETER Experiment Name: At_50mM_NH4NO3_L-to-H_P Parameter: Plant Line Value: Undefined
  misc_feature: MA Experiment 20001459 PARAMETER Experiment Name: At_50mM_NH4NO3_L-to-H_P Parameter: Timepoint (hr) Value: 4
  misc_feature: MA Experiment 20001459 PARAMETER Experiment Name: At_50mM_NH4NO3_L-to-H_P Parameter: Tissue Value: Siliques
  misc_feature: MA Experiment 20001459 PARAMETER Experiment Name: At_50mM_NH4NO3_L-to-H_P Parameter: Treatment Value: 50mM NH4NO3 vs. 100mM Manitol
  misc_feature: MA Experiment ID: 20001906 Result: Up-regulated in Transcription
  misc_feature: MA Experiment 20001906 PARAMETER Experiment Name: At_Drought_Reproduction_P Parameter: Age (day) Value: 35
  misc_feature: MA Experiment 20001906 PARAMETER Experiment Name: At_Drought_Reproduction_P Parameter: Organism Value: A. thaliana
  misc_feature: MA Experiment 20001906 PARAMETER Experiment Name: At_Drought_Reproduction_P Parameter: Plant Line Value: WS
  misc_feature: MA Experiment 20001906 PARAMETER Experiment Name: At_Drought_Reproduction_P Parameter: Timepoint (day) Value: 5
  misc_feature: MA Experiment 20001906 PARAMETER Experiment Name: At_Drought_Reproduction_P Parameter: Tissue Value: Siliques
  misc_feature: MA Experiment 20001906 PARAMETER Experiment Name: At_Drought_Reproduction_P Parameter: Treatment Value: Drought vs. No Drought
  misc_feature: MA Experiment ID: 20001907 Result: Up-regulated in Transcription
  misc_feature: MA Experiment 20001907 PARAMETER Experiment Name: At_Drought_Reproduction_P Parameter: Age (day) Value: 37
  misc_feature: MA Experiment 20001907 PARAMETER Experiment Name: At_Drought_Reproduction_P Parameter: Organism Value: A. thaliana
  misc_feature: MA Experiment 20001907 PARAMETER Experiment Name: At_Drought_Reproduction_P Parameter: Plant Line Value: WS
  misc_feature: MA Experiment 20001907 PARAMETER Experiment Name: At_Drought_Reproduction_P Parameter: Timepoint (day) Value: 7
  misc_feature: MA Experiment 20001907 PARAMETER Experiment Name: At_Drought_Reproduction_P Parameter: Tissue Value: Siliques
  misc_feature: MA Experiment 20001907 PARAMETER Experiment Name: At_Drought_Reproduction_P Parameter: Treatment Value: Drought vs. No Drought
  misc_feature: MA Experiment ID: 20001908 Result: Up-regulated in Transcription
  misc_feature: MA Experiment 20001908 PARAMETER Experiment Name: At_Drought_Reproduction_P Parameter: Age (day) Value: 40
  misc_feature: MA Experiment 20001908 PARAMETER Experiment Name: At_Drought_Reproduction_P Parameter: Organism Value: A. thaliana
  misc_feature: MA Experiment 20001908 PARAMETER Experiment Name: At_Drought_Reproduction_P Parameter: Plant Line Value: WS
  misc_feature: MA Experiment 20001908 PARAMETER Experiment Name: At_Drought_Reproduction_P Parameter: Timepoint (day) Value: 10
  misc_feature: MA Experiment 20001908 PARAMETER Experiment Name: At_Drought_Reproduction_P Parameter: Tissue Value: Siliques
  misc_feature: MA Experiment 20001908 PARAMETER Experiment Name: At_Drought_Reproduction_P Parameter: Treatment Value: Drought vs. No Drought
  misc_feature: MA Experiment ID: 20001911 Result: Up-regulated in Transcription
  misc_feature: MA Experiment 20001911 PARAMETER Experiment Name: At_Drought_Reproduction_P Parameter: Age (day) Value: 40
  misc_feature: MA Experiment 20001911 PARAMETER Experiment Name: At_Drought_Reproduction_P Parameter: Organism Value: A. thaliana
  misc_feature: MA Experiment 20001911 PARAMETER Experiment Name: At_Drought_Reproduction_P Parameter: Plant Line Value: WS
  misc_feature: MA Experiment 20001911 PARAMETER Experiment Name: At_Drought_Reproduction_P Parameter: Timepoint (day) Value: 10
  misc_feature: MA Experiment 20001911 PARAMETER Experiment Name: At_Drought_Reproduction_P Parameter: Tissue Value: Flowers
  misc_feature: MA Experiment 20001911 PARAMETER Experiment Name: At_Drought_Reproduction_P Parameter: Treatment Value: Drought vs. No Drought
atgccgcaaaatccaccaaatccccaaaattcaattcagttccagcatcctcatccttacaccacctccggcgaccaacaaactcagccgccgataaaatccttatacccatacgcctcaaaacccaaacaaatgtcacccattagcggtggcggttgcgacgacgaggatcgcgggtcgggttccggatccggttgcaaccctgaagacagcgcgggaactgacgggaagaggaaattgtcacaatggcatagaatgaaatggacggatacaatggttaggcttttgatcatggcggttttctacatcggtgacgaaaagaaagggaagtggaaatcagtgtcgagagctatggtggagaaaggtttctctgtgtcaccacaacaatgtgaagacaagttcaatgatttgaacaagaggtacaagagagttaacgatattcttggtaaaggaatcgcttgtcgtgtcgttgagaatcaaggattgttagagagtatggatcatttgactccgaagttgaaagatgaagtcaagaagttgcttaattctaagcatcttttctttagagagatgtgtgcttatcataatagttgtggtcatcttggtggtcatgaccaacaaccaccgcaacagaatcctatttcgattccgattccgagtcagcagcagaactgttttcacgcggcggaagcagggaaaatggcgagaattgcggagagggtggaggtggaggaggaagtagagtctgatatggcggaggattcggagtcagagatggaggaatcagaggaagaagagacgaggaagaagcggaggatatcgacggcggtgaagaggttgagggaagaagcggcaagtgtagtggaagatgttgggaagagtgtgtgggagaagaaagagtggataaggagaaagatgttggagattgaggagaagaagattgggtatgagtgggaaggagtggagatggagaagcagagagtgaagtggatgagatataggagcaagaaagagagagagatggagaaggctaagcttgacaatcagagacggaggcttgagacggagaggatgattctcatgttacggcggagtgaaattgagttgaatgagttacagtcttcgggtacacgggttgacccgagttccgctaaggggtga

SEQ ID NO: 85714 - protein, 386 aa, Arabidopsis thaliana
  peptide (1)..(386): Ceres Seq. ID no. 12682679
  misc_feature (229)..(385): Pfam Name: Caldesmon Pfam Description: Caldesmon
  misc_feature (106)..(386): Homolog of NCBI NO: 6143872 NR Description: unknown protein [Arabidopsis thaliana]
  misc_feature (106)..(386): Homolog of NCBI NO: 30681119 NR Description: expressed protein [Arabidopsis thaliana]
  misc_feature (1)..(106): Homolog of NCBI NO: 6143872 NR Description: unknown protein [Arabidopsis thaliana]
  misc_feature (1)..(106): Homolog of NCBI NO: 30681119 NR Description: expressed protein [Arabidopsis thaliana]
  misc_feature (106)..(265): Homolog of NCBI NO: 34894646 NR Description: P0028G04.23 [Oryza sativa (japonica
  misc_feature (7)..(109): Homolog of NCBI NO: 34894646 NR Description: P0028G04.23 [Oryza sativa (japonica
  misc_feature (275)..(380): Homolog of NCBI NO: 34894646 NR Description: P0028G04.23 [Oryza sativa (japonica
MPQNPPNPQNSIQFQHPHPYTTSGDQQTQPPIKSLYPYASKPKQMSPISGGGCDDEDRGSGSGSGCNPEDSAGTDGKRKLSQWHRMKWTDTMVRLLIMAVFYIGDEKKGKWKSVSRAMVEKGFSVSPQQCEDKFNDLNKRYKRVNDILGKGIACRVVENQGLLESMDHLTPKLKDEVKKLLNSKHLFFREMCAYHNSCGHLGGHDQQPPQQNPISIPIPSQQQNCFHAAEAGKMARIAERVEVEEEVESDMAEDSESEMEESEEEETRKKRRISTAVKRLREEAASVVEDVGKSVWEKKEWIRRKMLEIEEKKIGYEWEGVEMEKQRVKWMRYRSKKEREMEKAKLDNQRRRLETERMILMLRRSEIELNELQSSGTRVDPSSAKG

SEQ ID NO: 85715 - protein, 342 aa, Arabidopsis thaliana
  peptide (1)..(342): Ceres Seq. ID no. 12682680
  misc_feature (185)..(341): Pfam Name: Caldesmon Pfam Description: Caldesmon
  misc_feature (62)..(342): Homolog of NCBI NO: 6143872 NR Description: unknown protein [Arabidopsis thaliana]
  misc_feature (62)..(342): Homolog of NCBI NO: 30681119 NR Description: expressed protein [Arabidopsis thaliana]
  misc_feature (1)..(62): Homolog of NCBI NO: 6143872 NR Description: unknown protein [Arabidopsis thaliana]
  misc_feature (1)..(62): Homolog of NCBI NO: 30681119 NR Description: expressed protein [Arabidopsis thaliana]
  misc_feature (62)..(221): Homolog of NCBI NO: 34894646 NR Description: P0028G04.23 [Oryza sativa (japonica
  misc_feature (1)..(65): Homolog of NCBI NO: 34894646 NR Description: P0028G04.23 [Oryza sativa (japonica
  misc_feature (231)..(336): Homolog of NCBI NO: 34894646 NR Description: P0028G04.23 [Oryza sativa (japonica
MSPISGGGCDDEDRGSGSGSGCNPEDSAGTDGKRKLSQWHRMKWTDTMVRLLIMAVFYIGDEKKGKWKSVSRAMVEKGFSVSPQQCEDKFNDLNKRYKRVNDILGKGIACRVVENQGLLESMDHLTPKLKDEVKKLLNSKHLFFREMCAYHNSCGHLGGHDQQPPQQNPISIPIPSQQQNCFHAAEAGKMARIAERVEVEEEVESDMAEDSESEMEESEEEETRKKRRISTAVKRLREEAASVVEDVGKSVWEKKEWIRRKMLEIEEKKIGYEWEGVEMEKQRVKWMRYRSKKEREMEKAKLDNQRRRLETERMILMLRRSEIELNELQSSGTRVDPSSAKG

SEQ ID NO: 85716 - protein, 301 aa, Arabidopsis thaliana
  peptide (1)..(301): Ceres Seq. ID no. 12682681
  misc_feature (144)..(300): Pfam Name: Caldesmon Pfam Description: Caldesmon
  misc_feature (21)..(301): Homolog of NCBI NO: 6143872 NR Description: unknown protein [Arabidopsis thaliana]
  misc_feature (21)..(301): Homolog of NCBI NO: 30681119 NR Description: expressed protein [Arabidopsis thaliana]
  misc_feature (1)..(21): Homolog of NCBI NO: 6143872 NR Description: unknown protein [Arabidopsis thaliana]
  misc_feature (1)..(21): Homolog of NCBI NO: 30681119 NR Description: expressed protein [Arabidopsis thaliana]
  misc_feature (21)..(180): Homolog of NCBI NO: 34894646 NR Description: P0028G04.23 [Oryza sativa (japonica
  misc_feature (1)..(24): Homolog of NCBI NO: 34894646 NR Description: P0028G04.23 [Oryza sativa (japonica
  misc_feature (190)..(295): Homolog of NCBI NO: 34894646 NR Description: P0028G04.23 [Oryza sativa (japonica
MKWTDTMVRLLIMAVFYIGDEKKGKWKSVSRAMVEKGFSVSPQQCEDKFNDLNKRYKRVNDILGKGIACRVVENQGLLESMDHLTPKLKDEVKKLLNSKHLFFREMCAYHNSCGHLGGHDQQPPQQNPISIPIPSQQQNCFHAAEAGKMARIAERVEVEEEVESDMAEDSESEMEESEEEETRKKRRISTAVKRLREEAASVVEDVGKSVWEKKEWIRRKMLEIEEKKIGYEWEGVEMEKQRVKWMRYRSKKEREMEKAKLDNQRRRLETERMILMLRRSEIELNELQSSGTRVDPSSAKG

SEQ ID NO: 85717 - DNA, 5532 bp, Arabidopsis thaliana
  misc_feature (1)..(5532): Ceres Seq. ID no. 12682712
  misc_feature: MA Experiment ID: 20000182 Result: Down-regulated in Transcription
  misc_feature: MA Experiment 20000182 PARAMETER Experiment Name: At_2mM_SA_P Parameter: Age (day) Value: 14
  misc_feature: MA Experiment 20000182 PARAMETER Experiment Name: At_2mM_SA_P Parameter: Organism Value: A. thaliana
  misc_feature: MA Experiment 20000182 PARAMETER Experiment Name: At_2mM_SA_P Parameter: Plant Line Value: WS
  misc_feature: MA Experiment 20000182 PARAMETER Experiment Name: At_2mM_SA_P Parameter: Timepoint (hr) Value: 6
  misc_feature: MA Experiment 20000182 PARAMETER Experiment Name: At_2mM_SA_P Parameter: Tissue Value: Aerial
  misc_feature: MA Experiment 20000182 PARAMETER Experiment Name: At_2mM_SA_P Parameter: Treatment Value: 2mM SA vs. No Treatment
  misc_feature: MA Experiment ID: 20000234 Result: Up-regulated in Transcription
  misc_feature: MA Experiment 20000234 PARAMETER Experiment Name: At_Siliques_P Parameter: Age (day) Value: 21
  misc_feature: MA Experiment 20000234 PARAMETER Experiment Name: At_Siliques_P Parameter: Organism Value: A. thaliana
  misc_feature: MA Experiment 20000234 PARAMETER Experiment Name: At_Siliques_P Parameter: Plant Line Value: WS
  misc_feature: MA Experiment 20000234 PARAMETER Experiment Name: At_Siliques_P Parameter: Tissue Value: Less Than 5mm Siliques vs. Whole Plant
  misc_feature: MA Experiment ID: 20000437 Result: Down-regulated in Transcription
  misc_feature: MA Experiment 20000437 PARAMETER Experiment Name: At_Drought_P Parameter: Age (day) Value: 8
  misc_feature: MA Experiment 20000437 PARAMETER Experiment Name: At_Drought_P Parameter: Organism Value: A. thaliana
  misc_feature: MA Experiment 20000437 PARAMETER Experiment Name: At_Drought_P Parameter: Plant Line Value: WS
  misc_feature: MA Experiment 20000437 PARAMETER Experiment Name: At_Drought_P Parameter: Timepoint (hr) Value: 24
  misc_feature: MA Experiment 20000437 PARAMETER Experiment Name: At_Drought_P Parameter: Tissue Value: Whole Plant
  misc_feature: MA Experiment 20000437 PARAMETER Experiment Name: At_Drought_P Parameter: Treatment Value: Drought vs. No Drought
  misc_feature: MA Experiment ID: 20001451 Result: Down-regulated in Transcription
  misc_feature: MA Experiment 20001451 PARAMETER Experiment Name: At_Far-red-induction_P Parameter: Age (day) Value: 7
  misc_feature: MA Experiment 20001451 PARAMETER Experiment Name: At_Far-red-induction_P Parameter: Light Value: Far-red vs. White
  misc_feature: MA Experiment 20001451 PARAMETER Experiment Name: At_Far-red-induction_P Parameter: Organism Value: A. thaliana
  misc_feature: MA Experiment 20001451 PARAMETER Experiment Name: At_Far-red-induction_P Parameter: Plant Line Value: Columbia
  misc_feature: MA Experiment 20001451 PARAMETER Experiment Name: At_Far-red-induction_P Parameter: Timepoint (hr) Value: 24
  misc_feature: MA Experiment 20001451 PARAMETER Experiment Name: At_Far-red-induction_P Parameter: Tissue Value: Whole Plant
atggagagaatccatgtctcagtcagagcgcgaccgctttcgtcggaggacgcgaagacaagtccctggaagatctcttccgactcaattttcatgcccaatcactcttctctcgcttttgaatttgatcgaatttttagagaagattgtaaaactgtccaagtgtatgaggcgcggacgaaggagattgtttctgccgctgttcgtggattcaacggaaccgtatttgcttacgggcaaactaacagtggcaagacgcatacaatgcgaggctcacctattgaacctggagttattcctctcgctgtacatgatttgtttgacactatatatcaggatgcaagtagagagtttctgttgcgtatgtcgtacctggagatttataatgaagatattaacgatttgctggcccctgagcacagaaaactacagattcatgaaaatctagagaaaggaatatttgttgctggattacgagaagagattgtcgcttcccctcaacaagtccttgaaatgatggaatttggagaatctcatcggcatattggggagacaaatatgaatctttacagtagcagatctcacactatttttcgcatgattatagaaagtagacagaagatgcaagatgaaggtgttggaaattcctgtgatgcagttcgtgtttctgttctgaatttggtggatctagctggttcagaacgggctgcaaaaaccggtgcagagggtgttaggttgaaggagggctcacatataaacaaaagcttgatgacactcgggactgtcataaaaaaactgagtgaaggagtagaaactcaaggtggtcatgtcccgtaccgagacagcaagcttacaaggatcttgcagcctgccttaggtgggaatgccaacacagctattatatgcaatatcacacttgcaccgattcatgcagatgaaaccaagagcagtcttcagttcgctagccgagcactgcgtgtcactaactgtgcccatgtcaatgagattttgactgatgctgctctattaaagcgccagaagaaggagatagaggagctcagatccaaactaaagacttctcactctgaccattcagaagaagagattcttaacttgcgtaacaccttgttgaagtctgaattagagagagagcgaatagcacttgagttagaagaggagaagaaggcacaagctcagagggaaagagttttgcaggagcaagccaaaaaaatcaagaacttgagttcaatggttcttctttcgaatagagatgagaagcgtgagcaggatcactttaagaagggaaaaaggagggatacatggtgtattggtaagctttcacgagactccacatcagaggatcagtctaatgttttgtcaaggggatcctctcttgaatctgcaagatccgagcgtgagactggtccactacttccattttcagaactagtaaatgaacctttatataacattaacgaggaagatgaagatagtatcgagggaacccttgaagattctgtacttccagatccatgtgcattagtgaatgtgacaagcagaaagaaaccatcaattaagcagaaaaatcctgtagtggttgaaaacgaattagatagaattcaaagggaatatgaggctcttctcttgcaatatgaaaccgaggtgaaattgggtgaagatggtttatctggtgatgcaaaatgcaagcaatcagaagtcgttggcaacgtgcattgcgaagaacatgttgtaaacttaagagatccagaagctattcttctcatcaagcaactacaagagaagataaacatgctagaattggagaagtcttcaagcaaccgaaatcttgatgatcttgttatggtagctactgagcagaatatatgtgccagggaaaaatttgctgagattcaagaagagattcatgctgctagagaagaggcccaggttgctcgtgaacaacttgtgtctaaggagtctgaagttattgatgtgattaatgagaatttcaactcactggtcaacgtagcaaccgaaattgaagtcttagagtctgaatttcaaaaatataaagcatcagtagaaaccatatcatcagttatgaatgagggtctccaagattttgctttcttctctccgttgatacatgatttcacattgtttgtgcgccaaagttctgagcaacatgattcacttatcaacagctaccaaactgtccaatctagtctaaaaaaaaaagttcttgatgttgagaatgagaagcttcttttgcaagagcagtgtgctggtctgcagagccaaatagaagaactaaatcaggaagcccaaaagcatgaaacttccttaaagatgctctcagaacaccatgagtcggagaggtcagatctactctctcacatagaatgtcttgaaaaggatatagggagtctgtcatcctcttccttggccaaagagaaggagaacctaagaaaagattttgagaagacgaaaacaaagctaaaagacactgaatccaagctaaagaattccatgcaagataaaaccaagctagaggccgagaaagcatctgctgaaagagagttaaaacgcttgcatagccagaaggccctactcgagagagacatcagcaaacaggagtcctttgctggtaaaagacgcgactctcttcttgttgagagaagtgctaaccagtcgttgcaggaagaatttaaacagcttgaagtgcttgcttttgaaatggaaaccacaattgcttcactggaggaagagctggccgctgaacgtggagaaaaagaggaggcactctgtagaaatgacggtttaggctcagaaattacagatctgacagagaaactggagcactcaaatactaaactagaacatcttcaaaacgatgtcacggagcttaaaacgagacttgaagtctcatcttctgatcagcagcaactggaaaccaatgttaaacagttgcttgaagaaaaggaagagctagcaatgcatctggcgaactcacttttggaaatggaggaggagaaagcaatatggagctcgaaagaaaaagctttgacagaggctgtggaggaaaagatcagactatataaaaatatacaaattgagtcactatccaaagaaatgtcagaggaaaagaaggagctggaatcttgtcgacttgaatgcgttactcttgctgataggcttagatgttctgaggagaatgctaagcaggacaaagaaagcagcctggagaagtctttggagattgatagactgggtgatgaacttcgatcagctgatgctgtgagtaagcaatctcaagaggttctcaagtctgatatcgacatactaaagtccgaagttcaacatgcttgcaagatgtcggatacatttcagagagagatggattatgtcacaagtgagcgccagggtttgctagctcgcatagaggagttgagtaaggagcttgcttcatcaaatcgttggcaggatgcagctgcagaaaacaaggagaaggcaaagctaaaaatgagactcaggggtatgcaagcacgcttagatgcaatcagtctacggtacaagcagtctgtgcaagaatcagaacttatgaacaggaagttcaaagaggcatctgctaagctaaaggagaagttagcatcaaaagcactcgaagttctcgacctcaagaagcaactctctgcttcttcaagaacaattgatgaaccgagaaactcacttgagagttattgtgatgcggcagttgtggttgcgactgtggtggttgtggttgtcgagcaggagattccaaatcttaggtactcaagcaattcaatagaagttgtggagaaagctgccattaatatgggttcaaaggaagacaaggcagataatccagctttatcttcatatgatgatgccatggaagctctgtcgactcttatttctcgtcgaaaccgtggggatcgcacacctactaaaggaaatcgtgacaagcttgaacaagtcgtcacatatctcaagattttggacctggaagacaaaataaaagaactaaaagttattcatgtcgcaggaacaaaaggaaagggttcaacatgtgtcttcagtgaggcaattttacgtaattgtgggtttcgaaccggaatgtttacatctcctcacttgattgatgtgagggaaagattccgaatagatggcttggatatatctgaggaaaagtttctacagtacttctgggaatgttggaagttattgaaggagaaagctgtagatggtcttaccatgcctcctctttttcagtttctcacagtattggcatttaagatttttgtttgtgaaaaggttgatgttgctgtcattgaagttggacttgggggaaaacttgactcgacaaatgtgattcaaaaacctgttgtctgtggcattgcttctcttgggatggatcatatggacatattgggaaatacgctagctgatattgcctttcataaggctgggattttcaagcctcaaatccccgccttcacagtaccacaactctctgaagcaatggatgttcttcagaaaacagctaataatctcgaggttcctctagaagtagtagcgcctcttgaacctaaaaagttggacggagttacgcttggcttgtctggggatcatcagctagtaaatgcaggtcttgctgtttctctttcaagatgctggcttcaaagaaccgggaattggaagaagatatttccaaatgaaagcaaggaaactgagattcccgtggcattttgtcgtggtcttgcaacggcacgtcttcatgggagagctcaagttgttcatgatgtagtttcagatccgcaggactcatcagactcgatggaaactccatgcggtgatctgatcttttacttggatggtgctcacagtccagagagcatggaggcttgtggtcgatggttctcttctgcagtcagaggagacaaaagcttatccactgctgtcaatggttacatgagacatggggagtatggtacagacttaaacagagtctccaaacagattcttctgttcaactgcatggaagtgagagaccctcaagtcttacttccaaagctggtcaccacttgcgcttcctcaggcactcatttctcaagagcgctttttgtcccgagcatgtctacttacaacaaagtcatttcgggtgcatcagcgattccttcagatacacgtagaaaggatttgacttggcaattcagactacaaagactatgggagaaatcaatccaagggactgatgcggggcttgaccatacactgaaacccgatggaataaccgccttaccacctcatgatttcctgtgcggagatgcacctcaatgtggtggacctgcagggacaccggtcacttccagtgccgtaatgccttcacttccattgactataaactggctaagagactgcgtacgccgaaacccttcactgaaactagaggttctggtcacaggatcgctacatcttgttggagatgtgctcaggttgctaaagagatga

SEQ ID NO: 85718 - protein, 1843 aa, Arabidopsis thaliana
  peptide (1)..(1843): Ceres Seq. ID no. 12682713
  misc_feature (519)..(1266): Pfam Name: Myosin tail Pfam Description: Myosin tail
  misc_feature (1268)..(1843): Homolog of NCBI NO: 17976757 NR Description: dihydrofolate synthetase [Arabidopsis thaliana]
  misc_feature (36)..(434): Homolog of NCBI NO: 6056206 NR Description: putative kinesin-like centromere protein
  misc_feature (1380)..(1661): Homolog of NCBI NO: 15228213 NR Description: putative folylpolyglutamate synthetase; protein At3g10160.1 [Arabidopsis thaliana]
  misc_feature (1300)..(1775): Homolog of NCBI NO: 30681208 NR Description: folylpolyglutamate synthase (fpgs2) [Arabidopsis
  misc_feature (1797)..(1843): Homolog of NCBI NO: 30681208 NR Description: folylpolyglutamate synthase (fpgs2) [Arabidopsis
  misc_feature (1300)..(1775): Homolog of NCBI NO: 17976705 NR Description: dihydrofolate synthetase /folylpolyglutamate
  misc_feature (1797)..(1843): Homolog of NCBI NO: 17976705 NR Description: dihydrofolate synthetase /folylpolyglutamate
  misc_feature (1299)..(1562): Homolog of NCBI NO: 37535812 NR Description: putative folylpolyglutamate synthetase [Oryza
  misc_feature (1586)..(1763): Homolog of NCBI NO: 37535812 NR Description: putative folylpolyglutamate synthetase [Oryza
  misc_feature (1796)..(1842): Homolog of NCBI NO: 37535812 NR Description: putative folylpolyglutamate synthetase [Oryza
MERIHVSVRARPLSSEDAKTSPWKISSDSIFMPNHSSLAFEFDRIFREDCKTVQVYEARTKEIVSAAVRGFNGTVFAYGQTNSGKTHTMRGSPIEPGVIPLAVHDLFDTIYQDASREFLLRMSYLEIYNEDINDLLAPEHRKLQIHENLEKGIFVAGLREEIVASPQQVLEMMEFGESHRHIGETNMNLYSSRSHTIFRMIIESRQKMQDEGVGNSCDAVRVSVLNLVDLAGSERAAKTGAEGVRLKEGSHINKSLMTLGTVIKKLSEGVETQGGHVPYRDSKLTRILQPALGGNANTAIICNITLAPIHADETKSSLQFASRALRVTNCAHVNEILTDAALLKRQKKEIEELRSKLKTSHSDHSEEEILNLRNTLLKSELERERIALELEEEKKAQAQRERVLQEQAKKIKNLSSMVLLSNRDEKREQDHFKKGKRRDTWCIGKLSRDSTSEDQSNVLSRGSSLESARSERETGPLLPFSELVNEPLYNINEEDEDSIEGTLEDSVLPDPCALVNVTSRKKPSIKQKNPVVVENELDRIQREYEALLLQYETEVKLGEDGLSGDAKCKQSEVVGNVHCEEHVVNLRDPEAILLIKQLQEKINMLELEKSSSNRNLDDLVMVATEQNICAREKFAEIQEEIHAAREEAQVAREQLVSKESEVIDVINENFNSLVNVATEIEVLESEFQKYKASVETISSVMNEGLQDFAFFSPLIHDFTLFVRQSSEQHDSLINSYQTVQSSLKKKVLDVENEKLLLQEQCAGLQSQIEELNQEAQKHETSLKMLSEHHESERSDLLSHIECLEKDIGSLSSSSLAKEKENLRKDFEKTKTKLKDTESKLKNSMQDKTKLEAEKASAERELKRLHSQKALLERDISKQESFAGKRRDSLLVERSANQSLQEEFKQLEVLAFEMETTIASLEEELAAERGEKEEALCRNDGLGSEITDLTEKLEHSNTKLEHLQNDVTELKTRLEVSSSDQQQLETNVKQLLEEKEELAMHLANSLLEMEEEKAIWSSKEKALTEAVEEKIRLYKNIQIESLSKEMSEEKKELESCRLECVTLADRLRCSEENAKQDKESSLEKSLEIDRLGDELRSADAVSKQSQEVLKSDIDILKSEVQHACKMSDTFQREMDYVTSERQGLLARIEELSKELASSNRWQDAAAENKEKAKLKMRLRGMQARLDAISLRYKQSVQESELMNRKFKEASAKLKEKLASKALEVLDLKKQLSASSRTIDEPRNSLESYCDAAVVVATVVVVVVEQEIPNLRYSSNSIEVVEKAAINMGSKEDKADNPALSSYDDAMEALSTLISRRNRGDRTPTKGNRDKLEQVVTYLKILDLEDKIKELKVIHVAGTKGKGSTCVFSEAILRNCGFRTGMFTSPHLIDVRERFRIDGLDISEEKFLQYFWECWKLLKEKAVDGLTMPPLFQFLTVLAFKIFVCEKVDVAVIEVGLGGKLDSTNVIQKPVVCGIASLGMDHMDILGNTLADIAFHKAGIFKPQIPAFTVPQLSEAMDVLQKTANNLEVPLEVVAPLEPKKLDGVTLGLSGDHQLVNAGLAVSLSRCWLQRTGNWKKIFPNESKETEIPVAFCRGLATARLHGRAQVVHDVVSDPQDSSDSMETPCGDLIFYLDGAHSPESMEACGRWFSSAVRGDKSLSTAVNGYMRHGEYGTDLNRVSKQILLFNCMEVRDPQVLLPKLVTTCASSGTHFSRALFVPSMSTYNKVISGASAIPSDTRRKDLTWQFRLQRLWEKSIQGTDAGLDHTLKPDGITALPPHDFLCGDAPQCGGPAGTPVTSSAVMPSLPLTINWLRDCVRRNPSLKLEVLVTGSLHLVGDVLRLLKR

SEQ ID NO: 85719 - protein, 1812 aa, Arabidopsis thaliana
  peptide (1)..(1812): Ceres Seq. ID no. 12682714
  misc_feature (488)..(1235): Pfam Name: Myosin tail Pfam Description: Myosin tail
  misc_feature (1237)..(1812): Homolog of NCBI NO: 17976757 NR Description: dihydrofolate synthetase [Arabidopsis thaliana]
  misc_feature (5)..(403): Homolog of NCBI NO: 6056206 NR Description: putative kinesin-like centromere protein
  misc_feature (1349)..(1630): Homolog of NCBI NO: 15228213 NR Description: putative folylpolyglutamate synthetase; protein At3g10160.1 [Arabidopsis thaliana]
  misc_feature (1269)..(1744): Homolog of NCBI NO: 30681208 NR Description: folylpolyglutamate synthase (fpgs2) [Arabidopsis
  misc_feature (1766)..(1812): Homolog of NCBI NO: 30681208 NR Description: folylpolyglutamate synthase (fpgs2) [Arabidopsis
  misc_feature (1269)..(1744): Homolog of NCBI NO: 17976705 NR Description: dihydrofolate synthetase /folylpolyglutamate
  misc_feature (1766)..(1812): Homolog of NCBI NO: 17976705 NR Description: dihydrofolate synthetase /folylpolyglutamate
  misc_feature (1268)..(1531): Homolog of NCBI NO: 37535812 NR Description: putative folylpolyglutamate synthetase [Oryza
  misc_feature (1555)..(1732): Homolog of NCBI NO: 37535812 NR Description: putative folylpolyglutamate synthetase [Oryza
  misc_feature (1765)..(1811): Homolog of NCBI NO: 37535812 NR Description: putative folylpolyglutamate synthetase [Oryza
MPNHSSLAFEFDRIFREDCKTVQVYEARTKEIVSAAVRGFNGTVFAYGQTNSGKTHTMRGSPIEPGVIPLAVHDLFDTIYQDASREFLLRMSYLEIYNEDINDLLAPEHRKLQIHENLEKGIFVAGLREEIVASPQQVLEMMEFGESHRHIGETNMNLYSSRSHTIFRMIIESRQKMQDEGVGNSCDAVRVSVLNLVDLAGSERAAKTGAEGVRLKEGSHINKSLMTLGTVIKKLSEGVETQGGHVPYRDSKLTRILQPALGGNANTAIICNITLAPIHADETKSSLQFASRALRVTNCAHVNEILTDAALLKRQKKEIEELRSKLKTSHSDHSEEEILNLRNTLLKSELERERIALELEEEKKAQAQRERVLQEQAKKIKNLSSMVLLSNRDEKREQDHFKKGKRRDTWCIGKLSRDSTSEDQSNVLSRGSSLESARSERETGPLLPFSELVNEPLYNINEEDEDSIEGTLEDSVLPDPCALVNVTSRKKPSIKQKNPVVVENELDRIQREYEALLLQYETEVKLGEDGLSGDAKCKQSEVVGNVHCEEHVVNLRDPEAILLIKQLQEKINMLELEKSSSNRNLDDLVMVATEQNICAREKFAEIQEEIHAAREEAQVAREQLVSKESEVIDVINENFNSLVNVATEIEVLESEFQKYKASVETISSVMNEGLQDFAFFSPLIHDFTLFVRQSSEQHDSLINSYQTVQSSLKKKVLDVENEKLLLQEQCAGLQSQIEELNQEAQKHETSLKMLSEHHESERSDLLSHIECLEKDIGSLSSSSLAKEKENLRKDFEKTKTKLKDTESKLKNSMQDKTKLEAEKASAERELKRLHSQKALLERDISKQESFAGKRRDSLLVERSANQSLQEEFKQLEVLAFEMETTIASLEEELAAERGEKEEALCRNDGLGSEITDLTEKLEHSNTKLEHLQNDVTELKTRLEVSSSDQQQLETNVKQLLEEKEELAMHLANSLLEMEEEKAIWSSKEKALTEAVEEKIRLYKNIQIESLSKEMSEEKKELESCRLECVTLADRLRCSEENAKQDKESSLEKSLEIDRLGDELRSADAVSKQSQEVLKSDIDILKSEVQHACKMSDTFQREMDYVTSERQGLLARIEELSKELASSNRWQDAAAENKEKAKLKMRLRGMQARLDAISLRYKQSVQESELMNRKFKEASAKLKEKLASKALEVLDLKKQLSASSRTIDEPRNSLESYCDAAVVVATVVVVVVEQEIPNLRYSSNSIEVVEKAAINMGSKEDKADNPALSSYDDAMEALSTLISRRNRGDRTPTKGNRDKLEQVVTYLKILDLEDKIKELKVIHVAGTKGKGSTCVFSEAILRNCGFRTGMFTSPHLIDVRERFRIDGLDISEEKFLQYFWECWKLLKEKAVDGLTMPPLFQFLTVLAFKIFVCEKVDVAVIEVGLGGKLDSTNVIQKPVVCGIASLGMDHMDILGNTLADIAFHKAGIFKPQIPAFTVPQLSEAMDVLQKTANNLEVPLEVVAPLEPKKLDGVTLGLSGDHQLVNAGLAVSLSRCWLQRTGNWKKIFPNESKETEIPVAFCRGLATARLHGRAQVVHDVVSDPQDSSDSMETPCGDLIFYLDGAHSPESMEACGRWFSSAVRGDKSLSTAVNGYMRHGEYGTDLNRVSKQILLFNCMEVRDPQVLLPKLVTTCASSGTHFSRALFVPSMSTYNKVISGASAIPSDTRRKDLTWQFRLQRLWEKSIQGTDAGLDHTLKPDGITALPPHDFLCGDAPQCGGPAGTPVTSSAVMPSLPLTINWLRDCVRRNPSLKLEVLVTGSLHLVGDVLRLLKR

SEQ ID NO: 85720 - protein, 1755 aa, Arabidopsis thaliana
  peptide (1)..(1755): Ceres Seq. ID no. 12682715
  misc_feature (431)..(1178): Pfam Name: Myosin tail Pfam Description: Myosin tail
  misc_feature (1180)..(1755): Homolog of NCBI NO: 17976757 NR Description: dihydrofolate synthetase [Arabidopsis thaliana]
  misc_feature (1)..(346): Homolog of NCBI NO: 6056206 NR Description: putative kinesin-like centromere protein
  misc_feature (1292)..(1573): Homolog of NCBI NO: 15228213 NR Description: putative folylpolyglutamate synthetase; protein At3g10160.1 [Arabidopsis thaliana]
  misc_feature (1212)..(1687): Homolog of NCBI NO: 30681208 NR Description: folylpolyglutamate synthase (fpgs2) [Arabidopsis
  misc_feature (1709)..(1755): Homolog of NCBI NO: 30681208 NR Description: folylpolyglutamate synthase (fpgs2) [Arabidopsis
  misc_feature (1212)..(1687): Homolog of NCBI NO: 17976705 NR Description: dihydrofolate synthetase /folylpolyglutamate
  misc_feature (1709)..(1755): Homolog of NCBI NO: 17976705 NR Description: dihydrofolate synthetase /folylpolyglutamate
  misc_feature (1211)..(1474): Homolog of NCBI NO: 37535812 NR Description: putative folylpolyglutamate synthetase [Oryza
  misc_feature (1498)..(1675): Homolog of NCBI NO: 37535812 NR Description: putative folylpolyglutamate synthetase [Oryza
  misc_feature (1708)..(1754): Homolog of NCBI NO: 37535812 NR Description: putative folylpolyglutamate synthetase [Oryza
MRGSPIEPGVIPLAVHDLFDTIYQDASREFLLRMSYLEIYNEDINDLLAPEHRKLQIHENLEKGIFVAGLREEIVASPQQVLEMMEFGESHRHIGETNMNLYSSRSHTIFRMIIESRQKMQDEGVGNSCDAVRVSVLNLVDLAGSERAAKTGAEGVRLKEGSHINKSLMTLGTVIKKLSEGVETQGGHVPYRDSKLTRILQPALGGNANTAIICNITLAPIHADETKSSLQFASRALRVTNCAHVNEILTDAALLKRQKKEIEELRSKLKTSHSDHSEEEILNLRNTLLKSELERERIALELEEEKKAQAQRERVLQEQAKKIKNLSSMVLLSNRDEKREQDHFKKGKRRDTWCIGKLSRDSTSEDQSNVLSRGSSLESARSERETGPLLPFSELVNEPLYNINEEDEDSIEGTLEDSVLPDPCALVNVTSRKKPSIKQKNPVVVENELDRIQREYEALLLQYETEVKLGEDGLSGDAKCKQSEVVGNVHCEEHVVNLRDPEAILLIKQLQEKINMLELEKSSSNRNLDDLVMVATEQNICAREKFAEIQEEIHAAREEAQVAREQLVSKESEVIDVINENFNSLVNVATEIEVLESEFQKYKASVETISSVMNEGLQDFAFFSPLIHDFTLFVRQSSEQHDSLINSYQTVQSSLKKKVLDVENEKLLLQEQCAGLQSQIEELNQEAQKHETSLKMLSEHHESERSDLLSHIECLEKDIGSLSSSSLAKEKENLRKDFEKTKTKLKDTESKLKNSMQDKTKLEAEKASAERELKRLHSQKALLERDISKQESFAGKRRDSLLVERSANQSLQEEFKQLEVLAFEMETTIASLEEELAAERGEKEEALCRNDGLGSEITDLTEKLEHSNTKLEHLQNDVTELKTRLEVSSSDQQQLETNVKQLLEEKEELAMHLANSLLEMEEEKAIWSSKEKALTEAVEEKIRLYKNIQIESLSKEMSEEKKELESCRLECVTLADRLRCSEENAKQDKESSLEKSLEIDRLGDELRSADAVSKQSQEVLKSDIDILKSEVQHACKMSDTFQREMDYVTSERQGLLARIEELSKELASSNRWQDAAAENKEKAKLKMRLRGMQARLDAISLRYKQSVQESELMNRKFKEASAKLKEKLASKALEVLDLKKQLSASSRTIDEPRNSLESYCDAAVVVATVVVVVVEQEIPNLRYSSNSIEVVEKAAINMGSKEDKADNPALSSYDDAMEALSTLISRRNRGDRTPTKGNRDKLEQVVTYLKILDLEDKIKELKVIHVAGTKGKGSTCVFSEAILRNCGFRTGMFTSPHLIDVRERFRIDGLDISEEKFLQYFWECWKLLKEKAVDGLTMPPLFQFLTVLAFKIFVCEKVDVAVIEVGLGGKLDSTNVIQKPVVCGIASLGMDHMDILGNTLADIAFHKAGIFKPQIPAFTVPQLSEAMDVLQKTANNLEVPLEVVAPLEPKKLDGVTLGLSGDHQLVNAGLAVSLSRCWLQRTGNWKKIFPNESKETEIPVAFCRGLATARLHGRAQVVHDVVSDPQDSSDSMETPCGDLIFYLDGAHSPESMEACGRWFSSAVRGDKSLSTAVNGYMRHGEYGTDLNRVSKQILLFNCMEVRDPQVLLPKLVTTCASSGTHFSRALFVPSMSTYNKVISGASAIPSDTRRKDLTWQFRLQRLWEKSIQGTDAGLDHTLKPDGITALPPHDFLCGDAPQCGGPAGTPVTSSAVMPSLPLTINWLRDCVRRNPSLKLEVLVTGSLHLVGDVLRLLKR

SEQ ID NO: 85721 - DNA, 906 bp, Arabidopsis thaliana
  misc_feature (1)..(906): Ceres Seq. ID no. 12682719
  misc_feature: MA Experiment ID: 108573 Result: Up-regulated in Transcription
  misc_feature: MA Experiment 108573 PARAMETER Experiment Name: At_Drought_cDNA_P Parameter: Timepoint (hr) Value: 6
  misc_feature: MA Experiment 108573 PARAMETER Experiment Name: At_Drought_cDNA_P Parameter: Tissue Value: Aerial
  misc_feature: MA Experiment 108573 PARAMETER Experiment Name: At_Drought_cDNA_P Parameter: Treatment Value: Drought vs. No Drought
  misc_feature: MA Experiment ID: 108579 Result: Down-regulated in Transcription
  misc_feature: MA Experiment 108579 PARAMETER Experiment Name: At_4deg_Cold_cDNA_P Parameter: Temperature (deg C) Value: 4 vs. 22
  misc_feature: MA Experiment 108579 PARAMETER Experiment Name: At_4deg_Cold_cDNA_P Parameter: Timepoint (hr) Value: 6
  misc_feature: MA Experiment 108579 PARAMETER Experiment Name: At_4deg_Cold_cDNA_P Parameter: Tissue Value: Aerial
  misc_feature: MA Experiment ID: 20000437 Result: Up-regulated in Transcription
  misc_feature: MA Experiment 20000437 PARAMETER Experiment Name: At_Drought_P Parameter: Age (day) Value: 8
  misc_feature: MA Experiment 20000437 PARAMETER Experiment Name: At_Drought_P Parameter: Organism Value: A. thaliana
  misc_feature: MA Experiment 20000437 PARAMETER Experiment Name: At_Drought_P Parameter: Plant Line Value: WS
  misc_feature: MA Experiment 20000437 PARAMETER Experiment Name: At_Drought_P Parameter: Timepoint (hr) Value: 24
  misc_feature: MA Experiment 20000437 PARAMETER Experiment Name: At_Drought_P Parameter: Tissue Value: Whole Plant
  misc_feature: MA Experiment 20000437 PARAMETER Experiment Name: At_Drought_P Parameter: Treatment Value: Drought vs. No Drought
aggaatattccggtgatggctgaagatttttcggtggttgtgttggcttctgatctaggaattgacgctagacccttcttgacgagaagcgatgacgttgatgaacaagaaaactggcatgattgtccccaatacttaggagatgaagatttctctgatctcgatcttctccagttctttactctccagggcttggataggtccggtaaccggattttccgcatcgtcggaaagtatttccctgctcgtgtagtgagtgcggagcggctgaagaagtatatatcccagaagataagcaaccaatgtcctgagggacctttgtgcttggtttacatgcatagcacagtccaaaaggacgacaattcaccgggaattaccatcttacggtggatttacgaggaccttccttcagatatcaaagacaggcttcaacttgtttatttcatccaccctggtcttcgttcaagacttgtcattgccactcttggccgccttcttttaagtggaggactgtactggaagattaagtacgtgagcaggttgcagtacctttgggaggacataaagaaaggcgaggtggaaattcccgactttgtgaagaaccatgacaatgtgctcgagcatagaccattaacggactatggaatcgaaccggatcctttccagttaagcgaggttcaatcttcatcgttctctctcaaccgctacgagaacagatgggtctcatagtacaattgctctttgttgagctagaacctctatatgtttgtgtctgttgtatagagtaatctaatgtattaaacactcgtgtatcatcaatctggtttttgattgattttggaccgaaccagtaccagtattagatttgttttcgaaagcgggtcgaattttactctttgttgagct

SEQ ID NO: 85722 - protein, 242 aa, Arabidopsis thaliana; identical to SEQ ID NO: 44670
  peptide (1)..(242): Ceres Seq. ID no. 12682720
  misc_feature (6)..(242): Homolog of NCBI NO: 18398797 NR Description: expressed protein; protein id: At3g10210.1, by cDNA: 4147., supported by cDNA: gi_15809947, supported by gi_18958049 [Arabidopsis thaliana]
  misc_feature (6)..(242): Homolog of NCBI NO: 21593697 NR Description: unknown [Arabidopsis thaliana]
  misc_feature (81)..(240): Homolog of NCBI NO: 22830926 NR Description: P0466H10.24 [Oryza sativa (japonica
  misc_feature (9)..(81): Homolog of NCBI NO: 22830926 NR Description: P0466H10.24 [Oryza sativa (japonica
  misc_feature (54)..(242): Homolog of NCBI NO: 15237117 NR Description: putative protein; protein id: At4g35750.1, by cDNA: 17117., supported by cDNA: gi_17473777 [Arabidopsis
  misc_feature (54)..(242): Homolog of NCBI NO: 21553817 NR Description: unknown [Arabidopsis thaliana]
  misc_feature (54)..(217): Homolog of NCBI NO: 38345848 NR Description: OSJNBa0084K11.12 [Oryza sativa (japonica
  misc_feature (50)..(203): Homolog of NCBI NO: 37534804 NR Description: unknown protein [Oryza sativa (japonica

SEQ ID NO: 85723 - protein, 237 aa, Arabidopsis thaliana; identical to SEQ ID NO: 44671
  peptide (1)..(237): Ceres Seq. ID no. 12682721
  misc_feature (1)..(237): Homolog of NCBI NO: 18398797 NR Description: expressed protein; protein id: At3g10210.1, by cDNA: 4147., supported by cDNA: gi_15809947, supported by gi_18958049 [Arabidopsis thaliana]
  misc_feature (1)..(237): Homolog of NCBI NO: 21593697 NR Description: unknown [Arabidopsis thaliana]
  misc_feature (76)..(235): Homolog of NCBI NO: 22830926 NR Description: P0466H10.24 [Oryza sativa (japonica
  misc_feature (4)..(76): Homolog of NCBI NO: 22830926 NR Description: P0466H10.24 [Oryza sativa (japonica
  misc_feature (49)..(237): Homolog of NCBI NO: 15237117 NR Description: putative protein; protein id: At4g35750.1, by cDNA: 17117., supported by cDNA: gi_17473777 [Arabidopsis
  misc_feature (49)..(237): Homolog of NCBI NO: 21553817 NR Description: unknown [Arabidopsis thaliana]
  misc_feature (49)..(212): Homolog of NCBI NO: 38345848 NR Description: OSJNBa0084K11.12 [Oryza sativa (japonica
  misc_feature (45)..(198): Homolog of NCBI NO: 37534804 NR Description: unknown protein [Oryza sativa (japonica

SEQ ID NO: 85724 - protein, 131 aa, Arabidopsis thaliana; identical to SEQ ID NO: 44672
  peptide (1)..(131): Ceres Seq. ID no. 12682722
  misc_feature (1)..(131): Homolog of NCBI NO: 18398797 NR Description: expressed protein; protein id: At3g10210.1, by cDNA: 4147., supported by cDNA: gi_15809947, supported by gi_18958049 [Arabidopsis thaliana]
  misc_feature (1)..(131): Homolog of NCBI NO: 21593697 NR Description: unknown [Arabidopsis thaliana]
  misc_feature (1)..(129): Homolog of NCBI NO: 22830926 NR Description: P0466H10.24 [Oryza sativa (japonica
  misc_feature (1)..(131): Homolog of NCBI NO: 15237117 NR Description: putative protein; protein id: At4g35750.1, by cDNA: 17117., supported by cDNA: gi_17473777 [Arabidopsis
  misc_feature (1)..(131): Homolog of NCBI NO: 21553817 NR Description: unknown [Arabidopsis thaliana]
  misc_feature (1)..(106): Homolog of NCBI NO: 38345848 NR Description: OSJNBa0084K11.12 [Oryza sativa (japonica
  misc_feature (1)..(92): Homolog of NCBI NO: 37534804 NR Description: unknown protein [Oryza sativa (japonica

SEQ ID NO: 85725 - DNA, 1317 bp, Arabidopsis thaliana
  misc_feature (1)..(1317): Ceres Seq. ID no. 12682737
  misc_feature: MA Experiment ID: 20000495 Result: Down-regulated in Transcription
  misc_feature: MA Experiment 20000495 PARAMETER Experiment Name: At_Guard_Cells_P Parameter: Harvest Date Value: 8/2/2002
  misc_feature: MA Experiment 20000495 PARAMETER Experiment Name: At_Guard_Cells_P Parameter: Organism Value: A. thaliana
  misc_feature: MA Experiment 20000495 PARAMETER Experiment Name: At_Guard_Cells_P Parameter: Tissue Value: Guard Cells vs. Leaves
  misc_feature: MA Experiment ID: 20000496 Result: Down-regulated in Transcription
  misc_feature: MA Experiment 20000496 PARAMETER Experiment Name: At_Guard_Cells_P Parameter: Harvest Date Value: 7/19/2002
  misc_feature: MA Experiment 20000496 PARAMETER Experiment Name: At_Guard_Cells_P Parameter: Organism Value: Canola
  misc_feature: MA Experiment 20000496 PARAMETER Experiment Name: At_Guard_Cells_P Parameter: Tissue Value: Guard Cells vs. Leaves
  misc_feature: MA Experiment ID: 20001451 Result: Down-regulated in Transcription
  misc_feature: MA Experiment 20001451 PARAMETER Experiment Name: At_Far-red-induction_P Parameter: Age (day) Value: 7
  misc_feature: MA Experiment 20001451 PARAMETER Experiment Name: At_Far-red-induction_P Parameter: Light Value: Far-red vs. White
  misc_feature: MA Experiment 20001451 PARAMETER Experiment Name: At_Far-red-induction_P Parameter: Organism Value: A. thaliana
  misc_feature: MA Experiment 20001451 PARAMETER Experiment Name: At_Far-red-induction_P Parameter: Plant Line Value: Columbia
  misc_feature: MA Experiment 20001451 PARAMETER Experiment Name: At_Far-red-induction_P Parameter: Timepoint (hr) Value: 24
  misc_feature: MA Experiment 20001451 PARAMETER Experiment Name: At_Far-red-induction_P Parameter: Tissue Value: Whole Plant
atggcgactctgtcttcctatctgttatcttctcctcctctatgcaaatcccgattctcggcaacaagtctcgtctcaggaattgatttcatctctttctctcctcgaacaactctctcctcgtcatccactgtcttgccggcgattctttctctttccgttaaacataatcgccggagaaactcgcttcaaggttcgaattctaaagttttcctttttcttaatctgaaacaggattggattagcttagcttctcttgattttgattttgatttctgggtttcagtgaaatcagtagctagcccaacggagacgatttcagaattcgatgagatggtctccggcacgaaacgaaagtattacatgctcggtgggaaaggaggagtgggcaaaactagttgtgctgcttctttagctgtgagattcgccaacaatggacacccaactctggttgtatctacagatccagcacattccttgagcgattcttttgctcaggacttgactggaggaatgcttgtccctgtagaaggacccgaagctcctttatttgctttagaaataaaccctgagaaggctagggaagagtttcgtagtgcctcgcagatgaatggaggaactggggtgaaagattttatggatggtatgggacttggaatgcttgtagaacagttgggggagcttaaacttggagaattgctcgacacaccgcctcctggattggatgaagccatagtcattcaattcttggaatcaccagagtataacatgttcaccagaatcgtatttgatactgcaccaacgggtcatacgctaaggctactctctttacctgatttcttggatgcatccattggtaaaatcttgaagcttagacagaaaataacctcggctacttcagcgatcaaatcagtttttgggaaagaagaaaaggggcctgatgctgccgacaaattggaaaaactaagagaaaggatggttaaagttcgcgagcttttccgtgacacagagtcaacagaattcgtcattgtcactatcccaacggtaatggctgtcagcgagtcttctaggttaagtgcttccttgaagaaggaaagtgttcccgtcaaaagactcattgttaatcagcttctcccgccatcctcctcagattgcaaattttgctctattaagagaaaggaccaaatgcgggctcttgatatgatccgggaggattcagaactctctgctttgacactgatggaggctccgctggttgatatggagatcagaggtgtccctgctctgcgcttcttgggcgatatcatttggaaataa

SEQ ID NO: 85726 - protein, 438 aa, Arabidopsis thaliana
  peptide (1)..(438): Ceres Seq. ID no. 12682738
  misc_feature (118)..(225): Pfam Name: Anion-transporting ATPase Pfam Description: Anion-transporting ATPase
  misc_feature (94)..(438): Homolog of NCBI NO: 30681260 NR Description: ATPase -related [Arabidopsis thaliana]
  misc_feature (1)..(64): Homolog of NCBI NO: 30681260 NR Description: ATPase -related [Arabidopsis thaliana]
  misc_feature (246)..(438): Homolog of NCBI NO: 6056208 NR Description: putative ATPase [Arabidopsis thaliana]
  misc_feature (94)..(225): Homolog of NCBI NO: 6056208 NR Description: putative ATPase [Arabidopsis thaliana]
  misc_feature (1)..(64): Homolog of NCBI NO: 6056208 NR Description: putative ATPase [Arabidopsis thaliana]
  misc_feature (94)..(411): Homolog of NCBI NO: 5824321 NR Description: ATPase [Solanum tuberosum]
  misc_feature (82)..(438): Homolog of NCBI NO: 9759337 NR Description: arsenite translocating ATPase-like protein
  misc_feature (96)..(438): Homolog of NCBI NO: 30697424 NR Description: ATPase - like protein [Arabidopsis thaliana]
  misc_feature (117)..(437): Homolog of NCBI NO: 15679508 NR Description: arsenical pump-driving ATPase [Methanothermobacter
  misc_feature (118)..(437): Homolog of NCBI NO: 20095116 NR Description: Arsenite transporting ATPase [Methanopyrus AV19] >gi|19888411|gb|AAM02893.1| Arsenite transporting ATPase
MATLSSYLLSSPPLCKSRFSATSLVSGIDFISFSPRTTLSSSSTVLPAILSLSVKHNRRRNSLQGSNSKVFLFLNLKQDWISLASLDFDFDFWVSVKSVASPTETISEFDEMVSGTKRKYYMLGGKGGVGKTSCAASLAVRFANNGHPTLVVSTDPAHSLSDSFAQDLTGGMLVPVEGPEAPLFALEINPEKAREEFRSASQMNGGTGVKDFMDGMGLGMLVEQLGELKLGELLDTPPPGLDEAIVIQFLESPEYNMFTRIVFDTAPTGHTLRLLSLPDFLDASIGKILKLRQKITSATSAIKSVFGKEEKGPDAADKLEKLRERMVKVRELFRDTESTEFVIVTIPTVMAVSESSRLSASLKKESVPVKRLIVNQLLPPSSSDCKFCSIKRKDQMRALDMIREDSELSALTLMEAPLVDMEIRGVPALRFLGDIIWK

SEQ ID NO: 85727 - protein, 327 aa, Arabidopsis thaliana
  peptide (1)..(327): Ceres Seq. ID no. 12682739
  misc_feature (7)..(114): Pfam Name: Anion-transporting ATPase Pfam Description: Anion-transporting ATPase
  misc_feature (1)..(327): Homolog of NCBI NO: 30681260 NR Description: ATPase -related [Arabidopsis thaliana]
  misc_feature (135)..(327): Homolog of NCBI NO: 6056208 NR Description: putative ATPase [Arabidopsis thaliana]
  misc_feature (1)..(114): Homolog of NCBI NO: 6056208 NR Description: putative ATPase [Arabidopsis thaliana]
  misc_feature (1)..(300): Homolog of NCBI NO: 5824321 NR Description: ATPase [Solanum tuberosum]
  misc_feature (1)..(327): Homolog of NCBI NO: 9759337 NR Description: arsenite translocating ATPase-like protein
  misc_feature (1)..(327): Homolog of NCBI NO: 30697424 NR Description: ATPase - like protein [Arabidopsis thaliana]
  misc_feature (6)..(326): Homolog of NCBI NO: 15679508 NR Description: arsenical pump-driving ATPase [Methanothermobacter
  misc_feature (7)..(326): Homolog of NCBI NO: 20095116 NR Description: Arsenite transporting ATPase [Methanopyrus AV19] >gi|19888411|gb|AAM02893.1| Arsenite transporting ATPase
  misc_feature (1)..(326): Homolog of NCBI NO: 15669329 NR Description: arsenical pump-driving ATPase (arsA)
  misc_feature (1)..(319): Homolog of NCBI NO: 15789625 NR Description: arsenical pump-driving ATPase; ArsA1
MVSGTKRKYYMLGGKGGVGKTSCAASLAVRFANNGHPTLVVSTDPAHSLSDSFAQDLTGGMLVPVEGPEAPLFALEINPEKAREEFRSASQMNGGTGVKDFMDGMGLGMLVEQLGELKLGELLDTPPPGLDEAIVIQFLESPEYNMFTRIVFDTAPTGHTLRLLSLPDFLDASIGKILKLRQKITSATSAIKSVFGKEEKGPDAADKLEKLRERMVKVRELFRDTESTEFVIVTIPTVMAVSESSRLSASLKKESVPVKRLIVNQLLPPSSSDCKFCSIKRKDQMRALDMIREDSELSALTLMEAPLVDMEIRGVPALRFLGDIIWK

SEQ ID NO: 85728 - protein, 317 aa, Arabidopsis thaliana
  peptide (1)..(317): Ceres Seq. ID no. 12682740
  misc_feature (1)..(104): Pfam Name: Anion-transporting ATPase Pfam Description: Anion-transporting ATPase
  misc_feature (1)..(317): Homolog of NCBI NO: 30681260 NR Description: ATPase -related [Arabidopsis thaliana]
  misc_feature (125)..(317): Homolog of NCBI NO: 6056208 NR Description: putative ATPase [Arabidopsis thaliana]
  misc_feature (1)..(104): Homolog of NCBI NO: 6056208 NR Description: putative ATPase [Arabidopsis thaliana]
  misc_feature (1)..(290): Homolog of NCBI NO: 5824321 NR Description: ATPase [Solanum tuberosum]
  misc_feature (1)..(317): Homolog of NCBI NO: 9759337 NR Description: arsenite translocating ATPase-like protein
  misc_feature (1)..(317): Homolog of NCBI NO: 30697424 NR Description: ATPase - like protein [Arabidopsis thaliana]
  misc_feature (1)..(316): Homolog of NCBI NO: 15679508 NR Description: arsenical pump-driving ATPase [Methanothermobacter
  misc_feature (1)..(316): Homolog of NCBI NO: 20095116 NR Description: Arsenite transporting ATPase [Methanopyrus AV19] >gi|19888411|gb|AAM02893.1| Arsenite transporting ATPase
  misc_feature (1)..(316): Homolog of NCBI NO: 15669329 NR Description: arsenical pump-driving ATPase (arsA)
  misc_feature (1)..(309): Homolog of NCBI NO: 15789625 NR Description: arsenical pump-driving ATPase; ArsA1
MLGGKGGVGKTSCAASLAVRFANNGHPTLVVSTDPAHSLSDSFAQDLTGGMLVPVEGPEAPLFALEINPEKAREEFRSASQMNGGTGVKDFMDGMGLGMLVEQLGELKLGELLDTPPPGLDEAIVIQFLESPEYNMFTRIVFDTAPTGHTLRLLSLPDFLDASIGKILKLRQKITSATSAIKSVFGKEEKGPDAADKLEKLRERMVKVRELFRDTESTEFVIVTIPTVMAVSESSRLSASLKKESVPVKRLIVNQLLPPSSSDCKFCSIKRKDQMRALDMIREDSELSALTLMEAPLVDMEIRGVPALRFLGDIIWK

SEQ ID NO: 85729 - DNA, 405 bp, Arabidopsis thaliana
  misc_feature (1)..(405): Ceres Seq. ID no. 12682807
  misc_feature: MA Experiment ID: 20000307 Result: Down-regulated in Transcription
  misc_feature: MA Experiment 20000307 PARAMETER Experiment Name: At_Germinating_Seeds_Sub_P Parameter: Age (hr) Value: 24 vs. 0
  misc_feature: MA Experiment 20000307 PARAMETER Experiment Name: At_Germinating_Seeds_Sub_P Parameter: Organism Value: A. thaliana
  misc_feature: MA Experiment 20000307 PARAMETER Experiment Name: At_Germinating_Seeds_Sub_P Parameter: Plant Line Value: WS
  misc_feature: MA Experiment 20000307 PARAMETER Experiment Name: At_Germinating_Seeds_Sub_P Parameter: Tissue Value: Germinating Seeds
  misc_feature: MA Experiment ID: 20000440 Result: Up-regulated in Transcription
  misc_feature: MA Experiment 20000440 PARAMETER Experiment Name: At_Closed-Flower__Sub_P Parameter: Tissue Value: Closed Flower vs. Whole Plant
atggatcgcatggcagttgcggaagagcaaatcctattggagagggttaggagaaaaatcgaagaagtaaatgcatctggtcagtcgcagctctctcctattcaagaacatatcagtttcacccttctgcaagcttatttcaaatgctcaaacgagtgctttgagaaaagaagaaagccagaagtgacaactaactgtgttgagctctgtcgtgttcccgttgctaaatctcaacagcaattcgatagcgatatggccaagtttcaggataggatgaacagatctctcatggtatgtcaagacaaattcgaggctgcaaagctactgaatatgaacaggattgatgccgccaaagatatggagggttgcgtaaacgatgcagctgcagcattacttggcggctaa

SEQ ID NO: 85730 - protein, 134 aa, Arabidopsis thaliana
  peptide (1)..(134): Ceres Seq. ID no. 12682808
  misc_feature (1)..(134): Homolog of NCBI NO: 15221247 NR Description: hypothetical protein; protein id: At1g05740.1
  misc_feature (1)..(125): Homolog of NCBI NO: 18402744 NR Description: expressed protein; protein id: At2g31725.1, by cDNA: 25159. [Arabidopsis thaliana] expressed protein [Arabidopsis thaliana]
  misc_feature (1)..(125): Homolog of NCBI NO: 15221245 NR Description: hypothetical Protein; protein id: At1g05730.1
  misc_feature (1)..(125): Homolog of NCBI NO: 15224344 NR Description: hypothetical protein; protein id: At2g43720.1, by cDNA: gi_18491242 [Arabidopsis thaliana]
  misc_feature (35)..(124): Homolog of NCBI NO: 37589716 NR Description: Unknown (protein for MGC:73247) [Danio rerio]
  misc_feature (47)..(124): Homolog of NCBI NO: 14249520 NR Description: hypothetical protein FLJ14668 [Homo sapiens]
  misc_feature (47)..(124): Homolog of NCBI NO: 15929034 NR Description: hypothetical protein FLJ14668 [Homo sapiens]
  misc_feature (47)..(124): Homolog of NCBI NO: 27712200 NR Description: similar to RIKEN cDNA 2010309E21 [Mus musculus]
  misc_feature (47)..(124): Homolog of NCBI NO: 13385042 NR Description: RIKEN cDNA 2010309E21 [Mus musculus] unnamed protein product [Mus musculus] unnamed protein product [Mus musculus]
  misc_feature (47)..(124): Homolog of NCBI NO: 15489002 NR Description: Unknown (protein for IMAGE:3493774) [Mus musculus]
MDRMAVAEEQILLERVRRKIEEVNASGQSQLSPIQEHISFTLLQAYFKCSNECFEKRRKPEVTTNCVELCRVPVAKSQQQFDSDMAKFQDRMNRSLMVCQDKFEAAKLLNMNRIDAAKDMEGCVNDAAAALLGG

SEQ ID NO: 85731 - protein, 131 aa, Arabidopsis thaliana
  peptide (1)..(131): Ceres Seq. ID no. 12682809
  misc_feature (1)..(131): Homolog of NCBI NO: 15221247 NR Description: hypothetical protein; protein id: At1g05740.1
  misc_feature (1)..(122): Homolog of NCBI NO: 18402744 NR Description: expressed protein; protein id: At2g31725.1, by cDNA: 25159. [Arabidopsis thaliana] expressed protein [Arabidopsis thaliana]
  misc_feature (1)..(122): Homolog of NCBI NO: 15221245 NR Description: hypothetical Protein; protein id: At1g05730.1
  misc_feature (1)..(122): Homolog of NCBI NO: 15224344 NR Description: hypothetical protein; protein id: At2g43720.1, by cDNA: gi_18491242 [Arabidopsis thaliana]
  misc_feature (32)..(121): Homolog of NCBI NO: 37589716 NR Description: Unknown (protein for MGC:73247) [Danio rerio]
  misc_feature (44)..(121): Homolog of NCBI NO: 14249520 NR Description: hypothetical protein FLJ14668 [Homo sapiens]
  misc_feature (44)..(121): Homolog of NCBI NO: 15929034 NR Description: hypothetical protein FLJ14668 [Homo sapiens]
  misc_feature (44)..(121): Homolog of NCBI NO: 27712200 NR Description: similar to RIKEN cDNA 2010309E21 [Mus musculus]
  misc_feature (44)..(121): Homolog of NCBI NO: 13385042 NR Description: RIKEN cDNA 2010309E21 [Mus musculus] unnamed protein product [Mus musculus] unnamed protein product [Mus musculus]
  misc_feature (44)..(121): Homolog of NCBI NO: 15489002 NR Description: Unknown (protein for IMAGE:3493774) [Mus musculus]
MAVAEEQILLERVRRKIEEVNASGQSQLSPIQEHISFTLLQAYFKCSNECFEKRRKPEVTTNCVELCRVPVAKSQQQFDSDMAKFQDRMNRSLMVCQDKFEAAKLLNMNRIDAAKDMEGCVNDAAAALLGG

SEQ ID NO: 85732 - DNA, 1584 bp, Arabidopsis thaliana
  misc_feature (1)..(1584): Ceres Seq. ID no. 12682852
  misc_feature: MA Experiment ID: 108433 Result: Down-regulated in Transcription
  misc_feature: MA Experiment 108433 PARAMETER Experiment Name: At_rhl_Mutant2_cDNA_P Parameter: Age (day) Value: 7
  misc_feature: MA Experiment 108433 PARAMETER Experiment Name: At_rhl_Mutant2_cDNA_P Parameter: Organism Value: A. thaliana
  misc_feature: MA Experiment 108433 PARAMETER Experiment Name: At_rhl_Mutant2_cDNA_P Parameter: Plant Line Value: rhl Mutant vs. wt landsburg
  misc_feature: MA Experiment 108433 PARAMETER Experiment Name: At_rhl_Mutant2_cDNA_P Parameter: Tissue Value: Roots
  misc_feature: MA Experiment ID: 108434 Result: Down-regulated in Transcription
  misc_feature: MA Experiment 108434 PARAMETER Experiment Name: At_Root_Tips_cDNA_P Parameter: Tissue Value: Root Tips
  misc_feature: MA Experiment ID: 108435 Result: Up-regulated in Transcription
  misc_feature: MA Experiment 108435 PARAMETER Experiment Name: At_stm_Mutants_cDNA_P Parameter: Plant Line Value: wt Landsburg vs stm
  misc_feature: MA Experiment 108435 PARAMETER Experiment Name: At_stm_Mutants_cDNA_P Parameter: Tissue Value: Shoot Apical Meristem Region
  misc_feature: MA Experiment ID: 108461 Result: Up-regulated in Transcription
  misc_feature: MA Experiment 108461 PARAMETER Experiment Name: At_Germinating_Seeds_cDNA_P Parameter: Age (day) Value: 1 vs. 0
  misc_feature: MA Experiment 108461 PARAMETER Experiment Name: At_Germinating_Seeds_cDNA_P Parameter: Tissue Value: Germinating Seeds
  misc_feature: MA Experiment ID: 108462 Result: Up-regulated in Transcription
  misc_feature: MA Experiment 108462 PARAMETER Experiment Name: At_Germinating_Seeds_cDNA_P Parameter: Age (day) Value: 2 vs. 0
  misc_feature: MA Experiment 108462 PARAMETER Experiment Name: At_Germinating_Seeds_cDNA_P Parameter: Tissue Value: Germinating Seeds
  misc_feature: MA Experiment ID: 108463 Result: Up-regulated in Transcription
  misc_feature: MA Experiment 108463 PARAMETER Experiment Name: At_Germinating_Seeds_cDNA_P Parameter: Age (day) Value: 3 vs. 0
  misc_feature: MA Experiment 108463 PARAMETER Experiment Name: At_Germinating_Seeds_cDNA_P Parameter: Tissue Value: Germinating Seeds
  misc_feature: MA Experiment ID: 108464 Result: Up-regulated in Transcription
  misc_feature: MA Experiment 108464 PARAMETER Experiment Name: At_Germinating_Seeds_cDNA_P Parameter: Age (day) Value: 4 vs. 0
  misc_feature: MA Experiment 108464 PARAMETER Experiment Name: At_Germinating_Seeds_cDNA_P Parameter: Tissue Value: Germinating Seeds
  misc_feature: MA Experiment ID: 108473 Result: Down-regulated in Transcription
  misc_feature: MA Experiment 108473 PARAMETER Experiment Name: At_Drought_Flowers_cDNA_P Parameter: Timepoint (hr) Value: 7 d
  misc_feature: MA Experiment 108473 PARAMETER Experiment Name: At_Drought_Flowers_cDNA_P Parameter: Tissue Value: Flower
  misc_feature: MA Experiment 108473 PARAMETER Experiment Name: At_Drought_Flowers_cDNA_P Parameter: Treatment Value: Drought vs. No Drought
  misc_feature: MA Experiment ID: 108501 Result: Up-regulated in Transcription
  misc_feature: MA Experiment 108501 PARAMETER Experiment Name: At_ap2_floral_buds_cDNA_P Parameter: Plant Line Value: ap2 (Ler.)
  misc_feature: MA Experiment 108501 PARAMETER Experiment Name: At_ap2_floral_buds_cDNA_P Parameter: Tissue Value: Closed Flower
  misc_feature: MA Experiment ID: 108561 Result: Down-regulated in Transcription
  misc_feature: MA Experiment 108561 PARAMETER Experiment Name: At_100uM_ABA_cDNA_P Parameter: Timepoint (hr) Value: 6
  misc_feature: MA Experiment 108561 PARAMETER Experiment Name: At_100uM_ABA_cDNA_P Parameter: Tissue Value: Aerial
  misc_feature: MA Experiment 108561 PARAMETER Experiment Name: At_100uM_ABA_cDNA_P Parameter: Treatment Value: 100uM ABA vs. No Treatment
  misc_feature: MA Experiment ID: 108573 Result: Down-regulated in Transcription
  misc_feature: MA Experiment 108573 PARAMETER Experiment Name: At_Drought_cDNA_P Parameter: Timepoint (hr) Value: 6
  misc_feature: MA Experiment 108573 PARAMETER Experiment Name: At_Drought_cDNA_P Parameter: Tissue Value: Aerial
  misc_feature: MA Experiment 108573 PARAMETER Experiment Name: At_Drought_cDNA_P Parameter: Treatment Value: Drought vs. No Drought
  misc_feature: MA Experiment ID: 108574 Result: Up-regulated in Transcription
  misc_feature: MA Experiment 108574 PARAMETER Experiment Name: At_Wounding__cDNA_P Parameter: Timepoint (hr) Value: 1
  misc_feature: MA Experiment 108574 PARAMETER Experiment Name: At_Wounding__cDNA_P Parameter: Tissue Value: Aerial
  misc_feature: MA Experiment 108574 PARAMETER Experiment Name: At_Wounding__cDNA_P Parameter: Treatment Value: Wounding vs. No Wounding
  misc_feature: MA Experiment ID: 108576 Result: Down-regulated in Transcription
  misc_feature: MA Experiment 108576 PARAMETER Experiment Name: At_42deg_Heat_cDNA_P Parameter: Temperature (deg C) Value: 42 vs. 22
  misc_feature: MA Experiment 108576 PARAMETER Experiment Name: At_42deg_Heat_cDNA_P Parameter: Timepoint (hr) Value: 1
  misc_feature: MA Experiment 108576 PARAMETER Experiment Name: At_42deg_Heat_cDNA_P Parameter: Tissue Value: Aerial
  misc_feature: MA Experiment ID: 108577 Result: Down-regulated in Transcription
  misc_feature: MA Experiment 108577 PARAMETER Experiment Name: At_42deg_Heat_cDNA_P Parameter: Temperature (deg C) Value: 42 vs. 22
  misc_feature: MA Experiment 108577 PARAMETER Experiment Name: At_42deg_Heat_cDNA_P Parameter: Timepoint (hr) Value: 6
  misc_feature: MA Experiment 108577 PARAMETER Experiment Name: At_42deg_Heat_cDNA_P Parameter: Tissue Value: Aerial
  misc_feature: MA Experiment ID: 108579 Result: Up-regulated in Transcription
  misc_feature: MA Experiment 108579 PARAMETER Experiment Name: At_4deg_Cold_cDNA_P Parameter: Temperature (deg C) Value: 4 vs. 22
  misc_feature: MA Experiment 108579 PARAMETER Experiment Name: At_4deg_Cold_cDNA_P Parameter: Timepoint (hr) Value: 6
  misc_feature: MA Experiment 108579 PARAMETER Experiment Name: At_4deg_Cold_cDNA_P Parameter: Tissue Value: Aerial
  misc_feature: MA Experiment ID: 20000069 Result: Down-regulated in Transcription
  misc_feature: MA Experiment 20000069 PARAMETER Experiment Name: At_100uM_ABA_Mutants_cDNA_P Parameter: Plant Line Value: CS23
  misc_feature: MA Experiment 20000069 PARAMETER Experiment Name: At_100uM_ABA_Mutants_cDNA_P Parameter: Timepoint (hr) Value: 6
  misc_feature: MA Experiment 20000069 PARAMETER Experiment Name: At_100uM_ABA_Mutants_cDNA_P Parameter: Tissue Value: Aerial
  misc_feature: MA Experiment 20000069 PARAMETER Experiment Name: At_100uM_ABA_Mutants_cDNA_P Parameter: Treatment Value: 100uM ABA vs. No Treatment
  misc_feature: MA Experiment ID: 20000070 Result: Down-regulated in Transcription
  misc_feature: MA Experiment 20000070 PARAMETER Experiment Name: At_100uM_ABA_Mutants_cDNA_P Parameter: Plant Line Value: CS24
  misc_feature: MA Experiment 20000070 PARAMETER Experiment Name: At_100uM_ABA_Mutants_cDNA_P Parameter: Timepoint (hr) Value: 6
  misc_feature: MA Experiment 20000070 PARAMETER Experiment Name: At_100uM_ABA_Mutants_cDNA_P Parameter: Tissue Value: Aerial
  misc_feature: MA Experiment 20000070 PARAMETER Experiment Name: At_100uM_ABA_Mutants_cDNA_P Parameter: Treatment Value: 100uM ABA vs. No Treatment
  misc_feature: MA Experiment ID: 20000071 Result: Down-regulated in Transcription
  misc_feature: MA Experiment 20000071 PARAMETER Experiment Name: At_100uM_ABA_Mutants_cDNA_P Parameter: Plant Line Value: CS8104
  misc_feature: MA Experiment 20000071 PARAMETER Experiment Name: At_100uM_ABA_Mutants_cDNA_P Parameter: Timepoint (hr) Value: 6
  misc_feature: MA Experiment 20000071 PARAMETER Experiment Name: At_100uM_ABA_Mutants_cDNA_P Parameter: Tissue Value: Aerial
  misc_feature: MA Experiment 20000071 PARAMETER Experiment Name: At_100uM_ABA_Mutants_cDNA_P Parameter: Treatment Value: 100uM ABA vs. No Treatment
  misc_feature: MA Experiment ID: 20000088 Result: Down-regulated in Transcription
  misc_feature: MA Experiment 20000088 PARAMETER Experiment Name: At_100uM_ABA_Mutants_cDNA_P Parameter: Plant Line Value: Landsberg
  misc_feature: MA Experiment 20000088 PARAMETER Experiment Name: At_100uM_ABA_Mutants_cDNA_P Parameter: Timepoint (hr) Value: 6
  misc_feature: MA Experiment 20000088 PARAMETER Experiment Name: At_100uM_ABA_Mutants_cDNA_P Parameter: Tissue Value: Aerial
  misc_feature: MA Experiment 20000088 PARAMETER Experiment Name: At_100uM_ABA_Mutants_cDNA_P Parameter: Treatment Value: 100uM ABA vs. No Treatment
  misc_feature: MA Experiment ID: 20000090 Result: Down-regulated in Transcription
  misc_feature: MA Experiment ID: 20000117 Result: Down-regulated in Transcription
  misc_feature: MA Experiment 20000117 PARAMETER Experiment Name: At_100uM_ABA_Mutants_cDNA_P Parameter: Plant Line Value: Columbia
  misc_feature: MA Experiment 20000117 PARAMETER Experiment Name: At_100uM_ABA_Mutants_cDNA_P Parameter: Timepoint (hr) Value: 6
  misc_feature: MA Experiment 20000117 PARAMETER Experiment Name: At_100uM_ABA_Mutants_cDNA_P Parameter: Tissue Value: Aerial
  misc_feature: MA Experiment 20000117 PARAMETER Experiment Name: At_100uM_ABA_Mutants_cDNA_P Parameter: Treatment Value: 100uM ABA vs. No Treatment
  misc_feature: MA Experiment ID: 20000173 Result: Down-regulated in Transcription
  misc_feature: MA Experiment 20000173 PARAMETER Experiment Name: At_42deg_Heat_P Parameter: Age (day) Value: 14
  misc_feature: MA Experiment 20000173 PARAMETER Experiment Name: At_42deg_Heat_P Parameter: Organism Value: A. thaliana
  misc_feature: MA Experiment 20000173 PARAMETER Experiment Name: At_42deg_Heat_P Parameter: Plant Line Value: WS
  misc_feature: MA Experiment 20000173 PARAMETER Experiment Name: At_42deg_Heat_P Parameter: Temperature (deg C) Value: 42 vs. 22
  misc_feature: MA Experiment 20000173 PARAMETER Experiment Name: At_42deg_Heat_P Parameter: Timepoint (hr) Value: 6
  misc_feature: MA Experiment 20000173 PARAMETER Experiment Name: At_42deg_Heat_P Parameter: Tissue Value: Aerial
  misc_feature: MA Experiment ID: 20000179 Result: Up-regulated in Transcription
  misc_feature: MA Experiment 20000179 PARAMETER Experiment Name: At_Germinating_Seeds_P Parameter: Age (hr) Value: 6 vs. 0
  misc_feature: MA Experiment 20000179 PARAMETER Experiment Name: At_Germinating_Seeds_P Parameter: Tissue Value: Germinating Seeds
  misc_feature: MA Experiment ID: 20000180 Result: Up-regulated in Transcription
  misc_feature: MA Experiment 20000180 PARAMETER Experiment Name: At_Germinating_Seeds_P Parameter: Age (hr) Value: 24 vs. 0
  misc_feature: MA Experiment 20000180 PARAMETER Experiment Name: At_Germinating_Seeds_P Parameter: Tissue Value: Germinating Seeds
  misc_feature: MA Experiment ID: 20000184 Result: Up-regulated in Transcription
  misc_feature: MA Experiment 20000184 PARAMETER Experiment Name: At_Shoots__P Parameter: Age (day) Value: 7
  misc_feature: MA Experiment 20000184 PARAMETER Experiment Name: At_Shoots__P Parameter: Tissue Value: Shoots vs. Whole Plant
  misc_feature: MA Experiment ID: 20000185 Result: Up-regulated in Transcription
  misc_feature: MA Experiment 20000185 PARAMETER Experiment Name: At_Roots__P Parameter: Age (day) Value: 7 vs. 21
  misc_feature: MA Experiment 20000185 PARAMETER Experiment Name: At_Roots__P Parameter: Organism Value: A. thaliana
  misc_feature: MA Experiment 20000185 PARAMETER Experiment Name: At_Roots__P Parameter: Tissue Value: Roots vs. Whole Plant
  misc_feature: MA Experiment ID: 20000211 Result: Up-regulated in Transcription
  misc_feature: MA Experiment 20000211 PARAMETER Experiment Name: At_0.001percent_MeJA__P Parameter: Age (day) Value: 14
  misc_feature: MA Experiment 20000211 PARAMETER Experiment Name: At_0.001percent_MeJA__P Parameter: Organism Value: A. thaliana
  misc_feature: MA Experiment 20000211 PARAMETER Experiment Name: At_0.001percent_MeJA__P Parameter: Plant Line Value: WS
  misc_feature: MA Experiment 20000211 PARAMETER Experiment Name: At_0.001percent_MeJA__P Parameter: Timepoint (hr) Value: 1
  misc_feature: MA Experiment 20000211 PARAMETER Experiment Name: At_0.001percent_MeJA__P Parameter: Tissue Value: Aerial
  misc_feature: MA Experiment 20000211 PARAMETER Experiment Name: At_0.001percent_MeJA__P Parameter: Treatment Value: 0.001percent MeJA vs. No Treatment
  misc_feature: MA Experiment ID: 20000224 Result: Up-regulated in Transcription
  misc_feature: MA Experiment ID: 20000234 Result: Up-regulated in Transcription
  misc_feature: MA Experiment 20000234 PARAMETER Experiment Name: At_Siliques_P Parameter: Age (day) Value: 21
  misc_feature: MA Experiment 20000234 PARAMETER Experiment Name: At_Siliques_P Parameter: Organism Value: A. thaliana
  misc_feature: MA Experiment 20000234 PARAMETER Experiment Name: At_Siliques_P Parameter: Plant Line Value: WS
  misc_feature: MA Experiment 20000234 PARAMETER Experiment Name: At_Siliques_P Parameter: Tissue Value: Less Than 5mm Siliques vs. Whole Plant
  misc_feature: MA Experiment ID: 20000264 Result: Up-regulated in Transcription
  misc_feature: MA Experiment 20000264 PARAMETER Experiment Name: At_Open_Flower_P Parameter: Age (day) Value: 21
  misc_feature: MA Experiment 20000264 PARAMETER Experiment Name: At_Open_Flower_P Parameter: Plant Line Value: WS
  misc_feature: MA Experiment 20000264 PARAMETER Experiment Name: At_Open_Flower_P Parameter: Tissue Value: Open Flower vs. Whole Plant
  misc_feature: MA Experiment ID: 20000265 Result: Up-regulated in Transcription
  misc_feature: MA Experiment 20000265 PARAMETER Experiment Name: At_Open_Flower_P Parameter: Age (day) Value: 21
  misc_feature: MA Experiment 20000265 PARAMETER Experiment Name: At_Open_Flower_P Parameter: Plant Line Value: WS
  misc_feature: MA Experiment 20000265 PARAMETER Experiment Name: At_Open_Flower_P Parameter: Tissue Value: Closed Flower vs. Whole Plant
  misc_feature: MA Experiment ID: 20000286 Result: Up-regulated in Transcription
  misc_feature: MA Experiment 20000286 PARAMETER Experiment Name: At_Open_Flower_P Parameter: Age (day) Value: 21
  misc_feature: MA Experiment 20000286 PARAMETER Experiment Name: At_Open_Flower_P Parameter: Plant Line Value: WS
  misc_feature: MA Experiment 20000286 PARAMETER Experiment Name: At_Open_Flower_P Parameter: Tissue Value: Half Open vs. Whole Plant
  misc_feature: MA Experiment ID: 20000437 Result: Down-regulated in Transcription
  misc_feature: MA Experiment 20000437 PARAMETER Experiment Name: At_Drought_P Parameter: Age (day) Value: 8
  misc_feature: MA Experiment 20000437 PARAMETER Experiment Name: At_Drought_P Parameter: Organism Value: A. thaliana
  misc_feature: MA Experiment 20000437 PARAMETER Experiment Name: At_Drought_P Parameter: Plant Line Value: WS
  misc_feature: MA Experiment 20000437 PARAMETER Experiment Name: At_Drought_P Parameter: Timepoint (hr) Value: 24
  misc_feature: MA Experiment 20000437 PARAMETER Experiment Name: At_Drought_P Parameter: Tissue Value: Whole Plant
  misc_feature: MA Experiment 20000437 PARAMETER Experiment Name: At_Drought_P Parameter: Treatment Value: Drought vs. No Drought
  misc_feature: MA Experiment ID: 20000439 Result: Up-regulated in Transcription
  misc_feature: MA Experiment 20000439 PARAMETER Experiment Name: At_Roots__P Parameter: Age (day) Value: 14 vs. 21
  misc_feature: MA Experiment 20000439 PARAMETER Experiment Name: At_Roots__P Parameter: Organism Value: A. thaliana
  misc_feature: MA Experiment 20000439 PARAMETER Experiment Name: At_Roots__P Parameter: Tissue Value: Roots vs. Whole Plant
  misc_feature: MA Experiment ID: 20000573 Result: Down-regulated in Transcription
  misc_feature: MA Experiment 20000573 PARAMETER Experiment Name: At_100uM_ABA_Mutants__P Parameter: Organism Value: A. thaliana
  misc_feature: MA Experiment 20000573 PARAMETER Experiment Name: At_100uM_ABA_Mutants__P Parameter: Plant Line Value: CS22 vs. Ler wt
  misc_feature: MA Experiment 20000573 PARAMETER Experiment Name: At_100uM_ABA_Mutants__P Parameter: Timepoint (hr) Value: N/A
  misc_feature: MA Experiment 20000573 PARAMETER Experiment Name: At_100uM_ABA_Mutants__P Parameter: Tissue Value: Whole Plant
  misc_feature: MA Experiment 20000573 PARAMETER Experiment Name: At_100uM_ABA_Mutants__P Parameter: Treatment Value: None
  misc_feature: MA Experiment ID: 20000574 Result: Down-regulated in Transcription
  misc_feature: MA Experiment 20000574 PARAMETER Experiment Name: At_100uM_ABA_Mutants__P Parameter: Organism Value: A. thaliana
  misc_feature: MA Experiment 20000574 PARAMETER Experiment Name: At_100uM_ABA_Mutants__P Parameter: Plant Line Value: CS23 vs. Ler wt
  misc_feature: MA Experiment 20000574 PARAMETER Experiment Name: At_100uM_ABA_Mutants__P Parameter: Timepoint (hr) Value: N/A
  misc_feature: MA Experiment 20000574 PARAMETER Experiment Name: At_100uM_ABA_Mutants__P Parameter: Tissue Value: Whole Plant
  misc_feature: MA Experiment 20000574 PARAMETER Experiment Name: At_100uM_ABA_Mutants__P Parameter: Treatment Value: None
  misc_feature: MA Experiment ID: 20001248 Result: Down-regulated in Transcription
  misc_feature: MA Experiment 20001248 PARAMETER Experiment Name: At_Far-red-induction_P Parameter: Age (day) Value: 7
  misc_feature: MA Experiment 20001248 PARAMETER Experiment Name: At_Far-red-induction_P Parameter: Light Value: Far-red vs. White
  misc_feature: MA Experiment 20001248 PARAMETER Experiment Name: At_Far-red-induction_P Parameter: Organism Value: A. thaliana
  misc_feature: MA Experiment 20001248 PARAMETER Experiment Name: At_Far-red-induction_P Parameter: Plant Line Value: Columbia
  misc_feature: MA Experiment 20001248 PARAMETER Experiment Name: At_Far-red-induction_P Parameter: Timepoint (hr) Value: 4
  misc_feature: MA Experiment 20001248 PARAMETER Experiment Name: At_Far-red-induction_P Parameter: Tissue Value: Whole Plant
  misc_feature: MA Experiment ID: 20001450 Result: Down-regulated in Transcription
  misc_feature: MA Experiment 20001450 PARAMETER Experiment Name: At_Far-red-induction_P Parameter: Age (day) Value: 7
  misc_feature: MA Experiment 20001450 PARAMETER Experiment Name: At_Far-red-induction_P Parameter: Light Value: Far-red vs. White
  misc_feature: MA Experiment 20001450 PARAMETER Experiment Name: At_Far-red-induction_P Parameter: Organism Value: A. thaliana
  misc_feature: MA Experiment 20001450 PARAMETER Experiment Name: At_Far-red-induction_P Parameter: Plant Line Value: Columbia
  misc_feature: MA Experiment 20001450 PARAMETER Experiment Name: At_Far-red-induction_P Parameter: Timepoint (hr) Value: 8
  misc_feature: MA Experiment 20001450 PARAMETER Experiment Name: At_Far-red-induction_P Parameter: Tissue Value: Whole Plant
  misc_feature: MA Experiment ID: 20001451 Result: Down-regulated in Transcription
  misc_feature: MA Experiment 20001451 PARAMETER Experiment Name: At_Far-red-induction_P Parameter: Age (day) Value: 7
  misc_feature: MA Experiment 20001451 PARAMETER Experiment Name: At_Far-red-induction_P Parameter: Light Value: Far-red vs. White
  misc_feature: MA Experiment 20001451 PARAMETER Experiment Name: At_Far-red-induction_P Parameter: Organism Value: A. thaliana
  misc_feature: MA Experiment 20001451 PARAMETER Experiment Name: At_Far-red-induction_P Parameter: Plant Line Value: Columbia
  misc_feature: MA Experiment 20001451 PARAMETER Experiment Name: At_Far-red-induction_P Parameter: Timepoint (hr) Value: 24
  misc_feature: MA Experiment 20001451 PARAMETER Experiment Name: At_Far-red-induction_P Parameter: Tissue Value: Whole Plant
  misc_feature: MA Experiment ID: 20001504 Result: Up-regulated in Transcription
  misc_feature: MA Experiment 20001504 PARAMETER Experiment Name: At_Far-red-enriched_P Parameter: Age (day) Value: 10
  misc_feature: MA Experiment 20001504 PARAMETER Experiment Name: At_Far-red-enriched_P Parameter: Light Value: Far-red enriched vs. White
  misc_feature: MA Experiment 20001504 PARAMETER Experiment Name: At_Far-red-enriched_P Parameter: Organism Value: A. thaliana
  misc_feature: MA Experiment 20001504 PARAMETER Experiment Name: At_Far-red-enriched_P Parameter: Plant Line Value: Columbia
  misc_feature: MA Experiment 20001504 PARAMETER Experiment Name: At_Far-red-enriched_P Parameter: Timepoint (day) Value: 6
  misc_feature: MA Experiment 20001504 PARAMETER Experiment Name: At_Far-red-enriched_P Parameter: Tissue Value: Whole Plant
  misc_feature: MA Experiment ID: 20001557 Result: Up-regulated in Transcription
  misc_feature: MA Experiment 20001557 PARAMETER Experiment Name: At_Drought_Soil_Dry_P Parameter: Age (day) Value: 27
  misc_feature: MA Experiment 20001557 PARAMETER Experiment Name: At_Drought_Soil_Dry_P Parameter: Organism Value: A. thaliana
  misc_feature: MA Experiment 20001557 PARAMETER Experiment Name: At_Drought_Soil_Dry_P Parameter: Plant Line Value: WS
  misc_feature: MA Experiment 20001557 PARAMETER Experiment Name: At_Drought_Soil_Dry_P Parameter: Post Timepoint (hr) Value: 3
  misc_feature: MA Experiment 20001557 PARAMETER Experiment Name: At_Drought_Soil_Dry_P Parameter: Post-Treatment Value: Re-Water vs. No Drought
  misc_feature: MA Experiment 20001557 PARAMETER Experiment Name: At_Drought_Soil_Dry_P Parameter: Timepoint (day) Value: 13
  misc_feature: MA Experiment 20001557 PARAMETER Experiment Name: At_Drought_Soil_Dry_P Parameter: Treatment Value: Drought vs. No Drought
  misc_feature: MA Experiment ID: 20001558 Result: Up-regulated in Transcription
  misc_feature: MA Experiment 20001558 PARAMETER Experiment Name: At_Drought_Soil_Dry_P Parameter: Age (day) Value: 27
  misc_feature: MA Experiment 20001558 PARAMETER Experiment Name: At_Drought_Soil_Dry_P Parameter: Organism Value: A. thaliana
  misc_feature: MA Experiment 20001558 PARAMETER Experiment Name: At_Drought_Soil_Dry_P Parameter: Plant Line Value: WS
  misc_feature: MA Experiment 20001558 PARAMETER Experiment Name: At_Drought_Soil_Dry_P Parameter: Post Timepoint (hr) Value: 6
  misc_feature: MA Experiment 20001558 PARAMETER Experiment Name: At_Drought_Soil_Dry_P Parameter: Post-Treatment Value: Re-Water vs. No Drought
  misc_feature: MA Experiment 20001558 PARAMETER Experiment Name: At_Drought_Soil_Dry_P Parameter: Timepoint (day) Value: 13
  misc_feature: MA Experiment 20001558 PARAMETER Experiment Name: At_Drought_Soil_Dry_P Parameter: Treatment Value: Drought vs. No Drought
cattgtcggcagtaaaactaaaaataaaaggagttccacttttcaatttttctccactccaaaaccagaaagaaagaaaaaaacatcaatcatgacaacaacaacaacgaagaagccgcacgttctggtgataccgtttccacaatccggtcacatggttccacatcttgacctcacgcatcagattcttctccgtggagccaccgtcactgtcctcgtcacacccaaaaactcttcctatctcgatgctctccgttctcttcactccccggaacacttcaaaaccctaatccttccttttccttctcacccttgtataccttccggtgtcgaatctctccagcaacttcctctcgaagctatagttcacatgtttgatgctctctctcgtctccacgaccctctcgttgactttctcagccgtcaaccaccgtcggatctccccgacgccatcctaggaagctcatttctcagcccttggattaacaaagtagctgatgctttctctattaagtccattagtttcttacccatcaatgctcattcgatctccgtcatgtgggctcaagaagatagaagcttcttcaacgatctcgagactgccacaacggaaagctacgggctcgtcatcaacagtttctacgacctcgagcctgagtttgtagaaactgttaaaacacgtttcctgaatcaccaccgtatatggaccgtcggaccgttgctcccctttaaagctggcgttgaccgtggcggacaaagctcaatcccgccggcgaaagtctcggcttggttagattcgtgccccgaggataactccgtcgtatacgtcggttttggaagccagatccggctcacggcggagcaaacagctgctttagcggcggcgttggagaaaagcagtgtgcgtttcatatgggcggtgagagacgcagctaagaaggtgaactccagcgataactccgttgaggaagatgtgatcccggcgggatttgaagagagagtgaaggagaaaggactcgtgataagaggatgggccccacaaactatgattcttgagcatcgagccgttggatcttacctaactcatttgggttggggttcggttctggaaggaatggtcggaggagttatgttgctagcgtggccgatgcaagcagaccatttctttaacacgacgctcatcgttgataaactaagagccgcagtgcgagttggagagaacagagactcggttcctgactcggacaagctcgctaggattttggctgagtcggcgagagaggacttgccggagagagttacgttgatgaagctgagggagaaagctatggaggccattaaagaaggtgggagctcttacaagaacttggatgagctcgttgcagagatgtgtttgtaataaatatcctcttctcttgctttttaagatttgtttgtttaagagagtcaataagcaaatggggtaagaaaattgttatttattttcctgttatttttctttcttaatttgatatgacaacgattaactcgatttagagttcgttagtcaatgttttctagtatgatgatggcaataatactaag

SEQ ID NO: 85733 - protein, 465 aa, Arabidopsis thaliana; identical to SEQ ID NO: 25896
  peptide (1)..(465): Ceres Seq. ID no. 12682853
  misc_feature (31)..(465): Homolog of NCBI NO: 18390599 NR Description: expressed protein; protein id: At1g06000.1, by cDNA: 1040., supported by cDNA: gi_20260467 [Arabidopsis
  misc_feature (31)..(465): Homolog of NCBI NO: 21536579 NR Description: unknown [Arabidopsis thaliana]
  misc_feature (194)..(465): Homolog of NCBI NO: 25406301 NR Description: protein glucosyltransferase F2P9.25 [imported] - thaliana >gi|12325153|gb|AAG52529.1|AC016662_23 putative
  misc_feature (38)..(189): Homolog of NCBI NO: 25406301 NR Description: protein glucosyltransferase F2P9.25 [imported] - thaliana >gi|12325153|gb|AAG52529.1|AC016662_23 putative
  misc_feature (194)..(460): Homolog of NCBI NO: 22330612 NR Description: putative glucosyltransferase; protein id:
  misc_feature (38)..(189): Homolog of NCBI NO: 22330612 NR Description: putative glucosyltransferase; protein id:
  misc_feature (194)..(460): Homolog of NCBI NO: 20260128 NR Description: putative glucosyltransferase [Arabidopsis
  misc_feature (52)..(189): Homolog of NCBI NO: 20260128 NR Description: putative glucosyltransferase [Arabidopsis
  misc_feature (201)..(463): Homolog of NCBI NO: 2232354 NR Description: UDPG glucosyltransferase [Solanum berthaultii]
  misc_feature (40)..(186): Homolog of NCBI NO: 2232354 NR Description: UDPG glucosyltransferase [Solanum berthaultii]

SEQ ID NO: 85734 - protein, 435 aa, Arabidopsis thaliana; identical to SEQ ID NO: 25897
  peptide (1)..(435): Ceres Seq. ID no. 12682854
  misc_feature (1)..(435): Homolog of NCBI NO: 18390599 NR Description: expressed protein; protein id: At1g06000.1, by cDNA: 1040., supported by cDNA: gi_20260467 [Arabidopsis
  misc_feature (1)..(435): Homolog of NCBI NO: 21536579 NR Description: unknown [Arabidopsis thaliana]
  misc_feature (164)..(435): Homolog of NCBI NO: 25406301 NR Description: protein glucosyltransferase F2P9.25 [imported] - thaliana >gi|12325153|gb|AAG52529.1|AC016662_23 putative
  misc_feature (8)..(159): Homolog of NCBI NO: 25406301 NR Description: protein glucosyltransferase F2P9.25 [imported] - thaliana >gi|12325153|gb|AAG52529.1|AC016662_23 putative
  misc_feature (164)..(430): Homolog of NCBI NO: 22330612 NR Description: putative glucosyltransferase; protein id:
  misc_feature (8)..(159): Homolog of NCBI NO: 22330612 NR Description: putative glucosyltransferase; protein id:
  misc_feature (164)..(430): Homolog of NCBI NO: 20260128 NR Description: putative glucosyltransferase [Arabidopsis
  misc_feature (22)..(159): Homolog of NCBI NO: 20260128 NR Description: putative glucosyltransferase [Arabidopsis
  misc_feature (171)..(433): Homolog of NCBI NO: 2232354 NR Description: UDPG glucosyltransferase [Solanum berthaultii]
  misc_feature (10)..(156): Homolog of NCBI NO: 2232354 NR Description: UDPG glucosyltransferase [Solanum berthaultii]

SEQ ID NO: 85735 - protein, 414 aa, Arabidopsis thaliana; identical to SEQ ID NO: 25898
  peptide (1)..(414): Ceres Seq. ID no. 12682855
  misc_feature (1)..(414): Homolog of NCBI NO: 18390599 NR Description: expressed protein; protein id: At1g06000.1, by cDNA: 1040., supported by cDNA: gi_20260467 [Arabidopsis
  misc_feature (1)..(414): Homolog of NCBI NO: 21536579 NR Description: unknown [Arabidopsis thaliana]
  misc_feature (143)..(414): Homolog of NCBI NO: 25406301 NR Description: protein glucosyltransferase F2P9.25 [imported] - thaliana >gi|12325153|gb|AAG52529.1|AC016662_23 putative
  misc_feature (1)..(138): Homolog of NCBI NO: 25406301 NR Description: protein glucosyltransferase F2P9.25 [imported] - thaliana >gi|12325153|gb|AAG52529.1|AC016662_23 putative
  misc_feature (143)..(409): Homolog of NCBI NO: 22330612 NR Description: putative glucosyltransferase; protein id:
  misc_feature (1)..(138): Homolog of NCBI NO: 22330612 NR Description: putative glucosyltransferase; protein id:
  misc_feature (143)..(409): Homolog of NCBI NO: 20260128 NR Description: putative glucosyltransferase [Arabidopsis
  misc_feature (1)..(138): Homolog of NCBI NO: 20260128 NR Description: putative glucosyltransferase [Arabidopsis
  misc_feature (150)..(412): Homolog of NCBI NO: 2232354 NR Description: UDPG glucosyltransferase [Solanum berthaultii]
  misc_feature (1)..(135): Homolog of NCBI NO: 2232354 NR Description: UDPG glucosyltransferase [Solanum berthaultii]

SEQ ID NO: 85736 - DNA, 1158 bp, Arabidopsis thaliana
  misc_feature (1)..(1158): Ceres Seq. ID no. 12682883
  misc_feature: MA Experiment ID: 108572 Result: Up-regulated in Transcription
  misc_feature: MA Experiment 108572 PARAMETER Experiment Name: At_Drought_cDNA_P Parameter: Timepoint (hr) Value: 1
  misc_feature: MA Experiment 108572 PARAMETER Experiment Name: At_Drought_cDNA_P Parameter: Tissue Value: Aerial
  misc_feature: MA Experiment 108572 PARAMETER Experiment Name: At_Drought_cDNA_P Parameter: Treatment Value: Drought vs. No Drought
  misc_feature: MA Experiment ID: 108573 Result: Up-regulated in Transcription
  misc_feature: MA Experiment 108573 PARAMETER Experiment Name: At_Drought_cDNA_P Parameter: Timepoint (hr) Value: 6
  misc_feature: MA Experiment 108573 PARAMETER Experiment Name: At_Drought_cDNA_P Parameter: Tissue Value: Aerial
  misc_feature: MA Experiment 108573 PARAMETER Experiment Name: At_Drought_cDNA_P Parameter: Treatment Value: Drought vs. No Drought
  misc_feature: MA Experiment ID: 108577 Result: Up-regulated in Transcription
  misc_feature: MA Experiment 108577 PARAMETER Experiment Name: At_42deg_Heat_cDNA_P Parameter: Temperature (deg C) Value: 42 vs. 22
  misc_feature: MA Experiment 108577 PARAMETER Experiment Name: At_42deg_Heat_cDNA_P Parameter: Timepoint (hr) Value: 6
  misc_feature: MA Experiment 108577 PARAMETER Experiment Name: At_42deg_Heat_cDNA_P Parameter: Tissue Value: Aerial
  misc_feature: MA Experiment ID: 20000069 Result: Up-regulated in Transcription
  misc_feature: MA Experiment 20000069 PARAMETER Experiment Name: At_100uM_ABA_Mutants_cDNA_P Parameter: Plant Line Value: CS23
  misc_feature: MA Experiment 20000069 PARAMETER Experiment Name: At_100uM_ABA_Mutants_cDNA_P Parameter: Timepoint (hr) Value: 6
  misc_feature: MA Experiment 20000069 PARAMETER Experiment Name: At_100uM_ABA_Mutants_cDNA_P Parameter: Tissue Value: Aerial
  misc_feature: MA Experiment 20000069 PARAMETER Experiment Name: At_100uM_ABA_Mutants_cDNA_P Parameter: Treatment Value: 100uM ABA vs. No Treatment
  misc_feature: MA Experiment ID: 20000070 Result: Up-regulated in Transcription
  misc_feature: MA Experiment 20000070 PARAMETER Experiment Name: At_100uM_ABA_Mutants_cDNA_P Parameter: Plant Line Value: CS24
  misc_feature: MA Experiment 20000070 PARAMETER Experiment Name: At_100uM_ABA_Mutants_cDNA_P Parameter: Timepoint (hr) Value: 6
  misc_feature: MA Experiment 20000070 PARAMETER Experiment Name: At_100uM_ABA_Mutants_cDNA_P Parameter: Tissue Value: Aerial
  misc_feature: MA Experiment 20000070 PARAMETER Experiment Name: At_100uM_ABA_Mutants_cDNA_P Parameter: Treatment Value: 100uM ABA vs. No Treatment
  misc_feature: MA Experiment ID: 20000071 Result: Up-regulated in Transcription
  misc_feature: MA Experiment 20000071 PARAMETER Experiment Name: At_100uM_ABA_Mutants_cDNA_P Parameter: Plant Line Value: CS8104
  misc_feature: MA Experiment 20000071 PARAMETER Experiment Name: At_100uM_ABA_Mutants_cDNA_P Parameter: Timepoint (hr) Value: 6
  misc_feature: MA Experiment 20000071 PARAMETER Experiment Name: At_100uM_ABA_Mutants_cDNA_P Parameter: Tissue Value: Aerial
  misc_feature: MA Experiment 20000071 PARAMETER Experiment Name: At_100uM_ABA_Mutants_cDNA_P Parameter: Treatment Value: 100uM ABA vs. No Treatment
  misc_feature: MA Experiment ID: 20000072 Result: Up-regulated in Transcription
  misc_feature: MA Experiment 20000072 PARAMETER Experiment Name: At_100uM_ABA_Mutants_cDNA_P Parameter: Plant Line Value: CS8105
  misc_feature: MA Experiment 20000072 PARAMETER Experiment Name: At_100uM_ABA_Mutants_cDNA_P Parameter: Timepoint (hr) Value: 6
  misc_feature: MA Experiment 20000072 PARAMETER Experiment Name: At_100uM_ABA_Mutants_cDNA_P Parameter: Tissue Value: Aerial
  misc_feature: MA Experiment 20000072 PARAMETER Experiment Name: At_100uM_ABA_Mutants_cDNA_P Parameter: Treatment Value: 100uM ABA vs. No Treatment
  misc_feature: MA Experiment ID: 20000086 Result: Up-regulated in Transcription
  misc_feature: MA Experiment 20000086 PARAMETER Experiment Name: At_100uM_ABA_Mutants_cDNA_P Parameter: Plant Line Value: CS22
  misc_feature: MA Experiment 20000086 PARAMETER Experiment Name: At_100uM_ABA_Mutants_cDNA_P Parameter: Timepoint (hr) Value: 6
  misc_feature: MA Experiment 20000086 PARAMETER Experiment Name: At_100uM_ABA_Mutants_cDNA_P Parameter: Tissue Value: Aerial
  misc_feature: MA Experiment 20000086 PARAMETER Experiment Name: At_100uM_ABA_Mutants_cDNA_P Parameter: Treatment Value: 100uM ABA vs. No Treatment
  misc_feature: MA Experiment ID: 20000087 Result: Up-regulated in Transcription
  misc_feature: MA Experiment 20000087 PARAMETER Experiment Name: At_100uM_ABA_Mutants_cDNA_P Parameter: Plant Line Value: WS
  misc_feature: MA Experiment 20000087 PARAMETER Experiment Name: At_100uM_ABA_Mutants_cDNA_P Parameter: Timepoint (hr) Value: 6
  misc_feature: MA Experiment 20000087 PARAMETER Experiment Name: At_100uM_ABA_Mutants_cDNA_P Parameter: Tissue Value: Aerial
  misc_feature: MA Experiment 20000087 PARAMETER Experiment Name: At_100uM_ABA_Mutants_cDNA_P Parameter: Treatment Value: 100uM ABA vs. No Treatment
  misc_feature: MA Experiment ID: 20000088 Result: Up-regulated in Transcription
  misc_feature: MA Experiment 20000088 PARAMETER Experiment Name: At_100uM_ABA_Mutants_cDNA_P Parameter: Plant Line Value: Landsberg
  misc_feature: MA Experiment 20000088 PARAMETER Experiment Name: At_100uM_ABA_Mutants_cDNA_P Parameter: Timepoint (hr) Value: 6
  misc_feature: MA Experiment 20000088 PARAMETER Experiment Name: At_100uM_ABA_Mutants_cDNA_P Parameter: Tissue Value: Aerial
  misc_feature: MA Experiment 20000088 PARAMETER Experiment Name: At_100uM_ABA_Mutants_cDNA_P Parameter: Treatment Value: 100uM ABA vs. No Treatment
  misc_feature: MA Experiment ID: 20000089 Result: Up-regulated in Transcription
  misc_feature: MA Experiment ID: 20000111 Result: Up-regulated in Transcription
  misc_feature: MA Experiment 20000111 PARAMETER Experiment Name: At_42deg_Heat_cDNA_P Parameter: Temperature (deg C) Value: 42 vs. 22
  misc_feature: MA Experiment 20000111 PARAMETER Experiment Name: At_42deg_Heat_cDNA_P Parameter: Timepoint (hr) Value: 6
  misc_feature: MA Experiment 20000111 PARAMETER Experiment Name: At_42deg_Heat_cDNA_P Parameter: Tissue Value: Aerial
  misc_feature: MA Experiment ID: 20000112 Result: Up-regulated in Transcription
  misc_feature: MA Experiment 20000112 PARAMETER Experiment Name: At_42deg_Heat_cDNA_P Parameter: Temperature (deg C) Value: 42 vs. 22
  misc_feature: MA Experiment 20000112 PARAMETER Experiment Name: At_42deg_Heat_cDNA_P Parameter: Timepoint (hr) Value: 2
  misc_feature: MA Experiment 20000112 PARAMETER Experiment Name: At_42deg_Heat_cDNA_P Parameter: Tissue Value: Aerial
  misc_feature: MA Experiment ID: 20000113 Result: Up-regulated in Transcription
  misc_feature: MA Experiment 20000113 PARAMETER Experiment Name: At_42deg_Heat_cDNA_P Parameter: Temperature (deg C) Value: 42 vs. 22
  misc_feature: MA Experiment 20000113 PARAMETER Experiment Name: At_42deg_Heat_cDNA_P Parameter: Timepoint (hr) Value: 8
  misc_feature: MA Experiment 20000113 PARAMETER Experiment Name: At_42deg_Heat_cDNA_P Parameter: Tissue Value: Aerial
  misc_feature: MA Experiment ID: 20000117 Result: Up-regulated in Transcription
  misc_feature: MA Experiment 20000117 PARAMETER Experiment Name: At_100uM_ABA_Mutants_cDNA_P Parameter: Plant Line Value: Columbia
  misc_feature: MA Experiment 20000117 PARAMETER Experiment Name: At_100uM_ABA_Mutants_cDNA_P Parameter: Timepoint (hr) Value: 6
  misc_feature: MA Experiment 20000117 PARAMETER Experiment Name: At_100uM_ABA_Mutants_cDNA_P Parameter: Tissue Value: Aerial
  misc_feature: MA Experiment 20000117 PARAMETER Experiment Name: At_100uM_ABA_Mutants_cDNA_P Parameter: Treatment Value: 100uM ABA vs. No Treatment
  misc_feature: MA Experiment ID: 20000144 Result: Up-regulated in Transcription
  misc_feature: MA Experiment 20000144 PARAMETER Experiment Name: At_42deg_Heat_cDNA_P Parameter: Temperature (deg C) Value: 42 vs. 22
  misc_feature: MA Experiment 20000144 PARAMETER Experiment Name: At_42deg_Heat_cDNA_P Parameter: Timepoint (hr) Value: 1
  misc_feature: MA Experiment 20000144 PARAMETER Experiment Name: At_42deg_Heat_cDNA_P Parameter: Tissue Value: Aerial
  misc_feature: MA Experiment ID: 20000224 Result: Up-regulated in Transcription
atgcctttgtcacggtccctcctttcgcggaggatctcgaactcttttaggtttcatcagggagagacaacgacggcaccggaatccgaatcgattcctccgccgtcgaatatggccggttcttcgtcatggtcggcgatgctccctgaattattaggcgagatcattcgtcgcgtggaggagactgaggaccgttggcctcaacgtcgtgatgtagttacttgcgcttgcgtttctaagaaatggagagaaatcactcacgatttcgctagatcctctcttaactctggcaaaattactttcccttcttgcctcaaattgccaggtcctagagacttttctaatcagtgcttgataaagaggaacaagaagacatcaacgttttacttgtatcttgctctaacaccatcattcactgataagggaaagtttcttctggcggcgcggaggtttaggaccggtgcttacactgagtacatcatatcacttgatgctgatgatttctctcaaggaagtaatgcctacgtcggaaaattaagatcagattttcttgggaccaactttacagtatacgatagccaaccaccacacaacggagcaaaaccttcaaatggcaaagccagtcgcagatttgcatcaaagcagataagccctcaagttccagcaggcaactttgaagtcggtcatgtttcttataaattcaaccttttgaaatcaagaggtccaagaagaatggtaagcacactccgatgcccatcaccatcaccttcatcatcatccgctggactctcgtctgaccaaaagccatgtgatgtaaccaagataatgaaaaaacccaacaaggatggttccagcttgacaatactaaagaacaaagctcctagatggcacgagcacttgcagtgctggtgtctgaacttccatggacgagttactgttgcttcggtcaagaactttcagctggttgcgaccgttgaccaaagtcaaccgagcggtaaaggcgatgaagaaacagttcttctacagtttggtaaagtgggagatgacactttcactatggattatagacagcctctctctgcatttcaggcttttgctatctgtctcacaagtttcggcactaaacttgcctgcgagtgaaacccaacaaaaggcaac

SEQ ID NO: 85737 - protein, 379 aa, Arabidopsis thaliana; identical to SEQ ID NO: 22139
  peptide (1)..(379): Ceres Seq. ID no. 12682884
  misc_feature (108)..(181): Pfam Name: Tub family Pfam Description: Tub family
  misc_feature (1)..(379): Homolog of NCBI NO: 18404413 NR Description: F-box containing tubby family protein; protein At1g53320.1, supported by cDNA: gi_13877766, supported by cDNA: [Arabidopsis thaliana] >gi|13877767|gb|AAK43961.1|AF370146_1
  misc_feature (169)..(379): Homolog of NCBI NO: 7769867 NR Description: F12M16.22 [Arabidopsis thaliana]
  misc_feature (1)..(181): Homolog of NCBI NO: 7769867 NR Description: F12M16.22 [Arabidopsis thaliana]
  misc_feature (107)..(379): Homolog of NCBI NO: 34911070 NR Description: putative tubby-like protein [Oryza sativa
  misc_feature (44)..(106): Homolog of NCBI NO: 34911070 NR Description: putative tubby-like protein [Oryza sativa
  misc_feature (17)..(245): Homolog of NCBI NO: 30690823 NR Description: F-box containing tubby family protein thaliana] >gi|18377640|gb|AAL66970.1| putative tubby protein thaliana] >gi|20465543|gb|AAM20254.1| putative tubby protein
  misc_feature (281)..(379): Homolog of NCBI NO: 30690823 NR Description: F-box containing tubby family protein thaliana] >gi|18377640|gb|AAL66970.1| putative tubby protein thaliana] >gi|20465543|gb|AAM20254.1| putative tubby protein
  misc_feature (39)..(377): Homolog of NCBI NO: 34909710 NR Description: putative Tub family protein [Oryza sativa
  misc_feature (17)..(245): Homolog of NCBI NO: 25409071 NR Description: probable Tub family protein [imported] - thaliana >gi|3738302|gb|AAC63644.1| putative tubby protein thaliana] >gi|20197552|gb|AAM15124.1| putative tubby protein
  misc_feature (281)..(379): Homolog of NCBI NO: 25409071 NR Description: probable Tub family protein [imported] - thaliana >gi|3738302|gb|AAC63644.1| putative tubby protein thaliana] >gi|20197552|gb|AAM15124.1| putative tubby protein

SEQ ID NO: 85738 - protein, 342 aa, Arabidopsis thaliana; identical to SEQ ID NO: 22140
  peptide (1)..(342): Ceres Seq. ID no. 12682885
  misc_feature (71)..(144): Pfam Name: Tub family Pfam Description: Tub family
  misc_feature (1)..(342): Homolog of NCBI NO: 18404413 NR Description: F-box containing tubby family protein; protein At1g53320.1, supported by cDNA: gi_13877766, supported by cDNA: [Arabidopsis thaliana] >gi|13877767|gb|AAK43961.1|AF370146_1
  misc_feature (132)..(342): Homolog of NCBI NO: 7769867 NR Description: F12M16.22 [Arabidopsis thaliana]
  misc_feature (1)..(144): Homolog of NCBI NO: 7769867 NR Description: F12M16.22 [Arabidopsis thaliana]
  misc_feature (70)..(342): Homolog of NCBI NO: 34911070 NR Description: putative tubby-like protein [Oryza sativa
  misc_feature (7)..(69): Homolog of NCBI NO: 34911070 NR Description: putative tubby-like protein [Oryza sativa
  misc_feature (1)..(208): Homolog of NCBI NO: 30690823 NR Description: F-box containing tubby family protein thaliana] >gi|18377640|gb|AAL66970.1| putative tubby protein thaliana] >gi|20465543|gb|AAM20254.1| putative tubby protein
  misc_feature (244)..(342): Homolog of NCBI NO: 30690823 NR Description: F-box containing tubby family protein thaliana] >gi|18377640|gb|AAL66970.1| putative tubby protein thaliana] >gi|20465543|gb|AAM20254.1| putative tubby protein
  misc_feature (2)..(340): Homolog of NCBI NO: 34909710 NR Description: putative Tub family protein [Oryza sativa
  misc_feature (1)..(208): Homolog of NCBI NO: 25409071 NR Description: probable Tub family protein [imported] - thaliana >gi|3738302|gb|AAC63644.1| putative tubby protein thaliana] >gi|20197552|gb|AAM15124.1| putative tubby protein
  misc_feature (244)..(342): Homolog of NCBI NO: 25409071 NR Description: probable Tub family protein [imported] - thaliana >gi|3738302|gb|AAC63644.1| putative tubby protein thaliana] >gi|20197552|gb|AAM15124.1| putative tubby protein

SEQ ID NO: 85739 - protein, 333 aa, Arabidopsis thaliana
  peptide (1)..(333): Ceres Seq. ID no. 12682886
  misc_feature (62)..(135): Pfam Name: Tub family Pfam Description: Tub family
  misc_feature (1)..(333): Homolog of NCBI NO: 18404413 NR Description: F-box containing tubby family protein; protein At1g53320.1, supported by cDNA: gi_13877766, supported by cDNA: [Arabidopsis thaliana] >gi|13877767|gb|AAK43961.1|AF370146_1
  misc_feature (123)..(333): Homolog of NCBI NO: 7769867 NR Description: F12M16.22 [Arabidopsis thaliana]
  misc_feature (1)..(135): Homolog of NCBI NO: 7769867 NR Description: F12M16.22 [Arabidopsis thaliana]
  misc_feature (61)..(333): Homolog of NCBI NO: 34911070 NR Description: putative tubby-like protein [Oryza sativa
  misc_feature (1)..(60): Homolog of NCBI NO: 34911070 NR Description: putative tubby-like protein [Oryza sativa
  misc_feature (1)..(199): Homolog of NCBI NO: 30690823 NR Description: F-box containing tubby family protein thaliana] >gi|18377640|gb|AAL66970.1| putative tubby protein thaliana] >gi|20465543|gb|AAM20254.1| putative tubby protein
  misc_feature (235)..(333): Homolog of NCBI NO: 30690823 NR Description: F-box containing tubby family protein thaliana] >gi|18377640|gb|AAL66970.1| putative tubby protein thaliana] >gi|20465543|gb|AAM20254.1| putative tubby protein
  misc_feature (1)..(331): Homolog of NCBI NO: 34909710 NR Description: putative Tub family protein [Oryza sativa
  misc_feature (1)..(199): Homolog of NCBI NO: 25409071 NR Description: probable Tub family protein [imported] - thaliana >gi|3738302|gb|AAC63644.1| putative tubby protein thaliana] >gi|20197552|gb|AAM15124.1| putative tubby protein
  misc_feature (235)..(333): Homolog of NCBI NO: 25409071 NR Description: probable Tub family protein [imported] - thaliana >gi|3738302|gb|AAC63644.1| putative tubby protein thaliana] >gi|20197552|gb|AAM15124.1| putative tubby protein
MLPELLGEIIRRVEETEDRWPQRRDVVTCACVSKKWREITHDFARSSLNSGKITFPSCLKLPGPRDFSNQCLIKRNKKTSTFYLYLALTPSFTDKGKFLLAARRFRTGAYTEYIISLDADDFSQGSNAYVGKLRSDFLGTNFTVYDSQPPHNGAKPSNGKASRRFASKQISPQVPAGNFEVGHVSYKFNLLKSRGPRRMVSTLRCPSPSPSSSSAGLSSDQKPCDVTKIMKKPNKDGSSLTILKNKAPRWHEHLQCWCLNFHGRVTVASVKNFQLVATVDQSQPSGKGDEETVLLQFGKVGDDTFTMDYRQPLSAFQAFAICLTSFGTKLACE

SEQ ID NO: 85740 - DNA, 2973 bp, Arabidopsis thaliana
  misc_feature (1)..(2973): Ceres Seq. ID no. 12682904
  misc_feature: MA Experiment ID: 20000171 Result: Down-regulated in Transcription
  misc_feature: MA Experiment 20000171 PARAMETER Experiment Name: At_42deg_Heat_P Parameter: Age (day) Value: 14
  misc_feature: MA Experiment 20000171 PARAMETER Experiment Name: At_42deg_Heat_P Parameter: Organism Value: A. thaliana
  misc_feature: MA Experiment 20000171 PARAMETER Experiment Name: At_42deg_Heat_P Parameter: Plant Line Value: WS
  misc_feature: MA Experiment 20000171 PARAMETER Experiment Name: At_42deg_Heat_P Parameter: Temperature (deg C) Value: 42 vs. 22
  misc_feature: MA Experiment 20000171 PARAMETER Experiment Name: At_42deg_Heat_P Parameter: Timepoint (hr) Value: 1
  misc_feature: MA Experiment 20000171 PARAMETER Experiment Name: At_42deg_Heat_P Parameter: Tissue Value: Aerial
  misc_feature: MA Experiment ID: 20000173 Result: Down-regulated in Transcription
  misc_feature: MA Experiment 20000173 PARAMETER Experiment Name: At_42deg_Heat_P Parameter: Age (day) Value: 14
  misc_feature: MA Experiment 20000173 PARAMETER Experiment Name: At_42deg_Heat_P Parameter: Organism Value: A. thaliana
  misc_feature: MA Experiment 20000173 PARAMETER Experiment Name: At_42deg_Heat_P Parameter: Plant Line Value: WS
  misc_feature: MA Experiment 20000173 PARAMETER Experiment Name: At_42deg_Heat_P Parameter: Temperature (deg C) Value: 42 vs. 22
  misc_feature: MA Experiment 20000173 PARAMETER Experiment Name: At_42deg_Heat_P Parameter: Timepoint (hr) Value: 6
  misc_feature: MA Experiment 20000173 PARAMETER Experiment Name: At_42deg_Heat_P Parameter: Tissue Value: Aerial
  misc_feature: MA Experiment ID: 20000180 Result: Up-regulated in Transcription
  misc_feature: MA Experiment 20000180 PARAMETER Experiment Name: At_Germinating_Seeds_P Parameter: Age (hr) Value: 24 vs. 0
  misc_feature: MA Experiment 20000180 PARAMETER Experiment Name: At_Germinating_Seeds_P Parameter: Tissue Value: Germinating Seeds
  misc_feature: MA Experiment ID: 20000184 Result: Down-regulated in Transcription
  misc_feature: MA Experiment 20000184 PARAMETER Experiment Name: At_Shoots__P Parameter: Age (day) Value: 7
  misc_feature: MA Experiment 20000184 PARAMETER Experiment Name: At_Shoots__P Parameter: Tissue Value: Shoots vs. Whole Plant
  misc_feature: MA Experiment ID: 20000213 Result: Up-regulated in Transcription
  misc_feature: MA Experiment 20000213 PARAMETER Experiment Name: At_4deg_Cold_P Parameter: Timepoint (hr) Value: 2
  misc_feature: MA Experiment ID: 20000227 Result: Down-regulated in Transcription
  misc_feature: MA Experiment 20000227 PARAMETER Experiment Name: At_Root-Tips-vs-Tops_P Parameter: Tissue Value: Root Tips vs. Root Tops
  misc_feature: MA Experiment ID: 20000235 Result: Down-regulated in Transcription
  misc_feature: MA Experiment 20000235 PARAMETER Experiment Name: At_Siliques_P Parameter: Age (day) Value: 21
  misc_feature: MA Experiment 20000235 PARAMETER Experiment Name: At_Siliques_P Parameter: Organism Value: A. thaliana
  misc_feature: MA Experiment 20000235 PARAMETER Experiment Name: At_Siliques_P Parameter: Plant Line Value: WS
  misc_feature: MA Experiment 20000235 PARAMETER Experiment Name: At_Siliques_P Parameter: Tissue Value: 5-10mm Siliques vs. Whole Plant
  misc_feature: MA Experiment ID: 20000268 Result: Down-regulated in Transcription
  misc_feature: MA Experiment 20000268 PARAMETER Experiment Name: At_100mM_NaCl__P Parameter: Age (day) Value: 14
  misc_feature: MA Experiment 20000268 PARAMETER Experiment Name: At_100mM_NaCl__P Parameter: Organism Value: A. thaliana
  misc_feature: MA Experiment 20000268 PARAMETER Experiment Name: At_100mM_NaCl__P Parameter: Plant Line Value: WS
  misc_feature: MA Experiment 20000268 PARAMETER Experiment Name: At_100mM_NaCl__P Parameter: Timepoint (hr) Value: 6
  misc_feature: MA Experiment 20000268 PARAMETER Experiment Name: At_100mM_NaCl__P Parameter: Tissue Value: Whole Plant
  misc_feature: MA Experiment 20000268 PARAMETER Experiment Name: At_100mM_NaCl__P Parameter: Treatment Value: 100mM NaCl vs. No Treatment
  misc_feature: MA Experiment ID: 20000436 Result: Down-regulated in Transcription
  misc_feature: MA Experiment 20000436 PARAMETER Experiment Name: At_Drought_P Parameter: Age (day) Value: 7
  misc_feature: MA Experiment 20000436 PARAMETER Experiment Name: At_Drought_P Parameter: Organism Value: A. thaliana
  misc_feature: MA Experiment 20000436 PARAMETER Experiment Name: At_Drought_P Parameter: Plant Line Value: WS
  misc_feature: MA Experiment 20000436 PARAMETER Experiment Name: At_Drought_P Parameter: Timepoint (hr) Value: 12
  misc_feature: MA Experiment 20000436 PARAMETER Experiment Name: At_Drought_P Parameter: Tissue Value: Whole Plant
  misc_feature: MA Experiment 20000436 PARAMETER Experiment Name: At_Drought_P Parameter: Treatment Value: Drought vs. No Drought
  misc_feature: MA Experiment ID: 20000437 Result: Down-regulated in Transcription
  misc_feature: MA Experiment 20000437 PARAMETER Experiment Name: At_Drought_P Parameter: Age (day) Value: 8
  misc_feature: MA Experiment 20000437 PARAMETER Experiment Name: At_Drought_P Parameter: Organism Value: A. thaliana
  misc_feature: MA Experiment 20000437 PARAMETER Experiment Name: At_Drought_P Parameter: Plant Line Value: WS
  misc_feature: MA Experiment 20000437 PARAMETER Experiment Name: At_Drought_P Parameter: Timepoint (hr) Value: 24
  misc_feature: MA Experiment 20000437 PARAMETER Experiment Name: At_Drought_P Parameter: Tissue Value: Whole Plant
  misc_feature: MA Experiment 20000437 PARAMETER Experiment Name: At_Drought_P Parameter: Treatment Value: Drought vs. No Drought
  misc_feature: MA Experiment ID: 20001247 Result: Up-regulated in Transcription
  misc_feature: MA Experiment 20001247 PARAMETER Experiment Name: At_Far-red-induction_P Parameter: Age (day) Value: 7
  misc_feature: MA Experiment 20001247 PARAMETER Experiment Name: At_Far-red-induction_P Parameter: Light Value: Far-red vs. White
  misc_feature: MA Experiment 20001247 PARAMETER Experiment Name: At_Far-red-induction_P Parameter: Organism Value: A. thaliana
  misc_feature: MA Experiment 20001247 PARAMETER Experiment Name: At_Far-red-induction_P Parameter: Plant Line Value: Columbia
  misc_feature: MA Experiment 20001247 PARAMETER Experiment Name: At_Far-red-induction_P Parameter: Timepoint (hr) Value: 1
  misc_feature: MA Experiment 20001247 PARAMETER Experiment Name: At_Far-red-induction_P Parameter: Tissue Value: Whole Plant
  misc_feature: MA Experiment ID: 20001555 Result: Down-regulated in Transcription
  misc_feature: MA Experiment 20001555 PARAMETER Experiment Name: At_Drought_Soil_Dry_P Parameter: Age (day) Value: 24
  misc_feature: MA Experiment 20001555 PARAMETER Experiment Name: At_Drought_Soil_Dry_P Parameter: Organism Value: A. thaliana
  misc_feature: MA Experiment 20001555 PARAMETER Experiment Name: At_Drought_Soil_Dry_P Parameter: Plant Line Value: WS
  misc_feature: MA Experiment 20001555 PARAMETER Experiment Name: At_Drought_Soil_Dry_P Parameter: Post Timepoint (hr) Value: None
  misc_feature: MA Experiment 20001555 PARAMETER Experiment Name: At_Drought_Soil_Dry_P Parameter: Post-Treatment Value: None
  misc_feature: MA Experiment 20001555 PARAMETER Experiment Name: At_Drought_Soil_Dry_P Parameter: Timepoint (day) Value: 10
  misc_feature: MA Experiment 20001555 PARAMETER Experiment Name: At_Drought_Soil_Dry_P Parameter: Treatment Value: Drought vs. No Drought
  misc_feature: MA Experiment ID: 20001904 Result: Down-regulated in Transcription
  misc_feature: MA Experiment 20001904 PARAMETER Experiment Name: At_Drought_Reproduction_P Parameter: Age (day) Value: 37
  misc_feature: MA Experiment 20001904 PARAMETER Experiment Name: At_Drought_Reproduction_P Parameter: Organism Value: A. thaliana
  misc_feature: MA Experiment 20001904 PARAMETER Experiment Name: At_Drought_Reproduction_P Parameter: Plant Line Value: WS
  misc_feature: MA Experiment 20001904 PARAMETER Experiment Name: At_Drought_Reproduction_P Parameter: Timepoint (day) Value: 7
  misc_feature: MA Experiment 20001904 PARAMETER Experiment Name: At_Drought_Reproduction_P Parameter: Tissue Value: Rosettes
  misc_feature: MA Experiment 20001904 PARAMETER Experiment Name: At_Drought_Reproduction_P Parameter: Treatment Value: Drought vs. No Drought
  misc_feature: MA Experiment ID: 20001910 Result: Down-regulated in Transcription
  misc_feature: MA Experiment 20001910 PARAMETER Experiment Name: At_Drought_Reproduction_P Parameter: Age (day) Value: 37
  misc_feature: MA Experiment 20001910 PARAMETER Experiment Name: At_Drought_Reproduction_P Parameter: Organism Value: A. thaliana
  misc_feature: MA Experiment 20001910 PARAMETER Experiment Name: At_Drought_Reproduction_P Parameter: Plant Line Value: WS
  misc_feature: MA Experiment 20001910 PARAMETER Experiment Name: At_Drought_Reproduction_P Parameter: Timepoint (day) Value: 7
  misc_feature: MA Experiment 20001910 PARAMETER Experiment Name: At_Drought_Reproduction_P Parameter: Tissue Value: Flowers
  misc_feature: MA Experiment 20001910 PARAMETER Experiment Name: At_Drought_Reproduction_P Parameter: Treatment Value: Drought vs. No Drought
atgggtttcatcttctcgaccgagaaagttgtgtatgttcttcttctcatcttcgtttgcttggaaaatttcggatcaaatgctcaacttttgcctgaagatgaagttcaaacattgcgaacgatctttagaaagcttcaaaaccaaacagtgaacatcgaaagaacttcttgttcggaccaaaactggaactttgttgtcgagtcagcctccaactcaccaaccagtaacattacctgcgactgtactttcaacgccagctcagtctgtcgtgtcacaaacatagatctttcgcggaactttctcaatggaacaatacctacgacattgtctcaaattccacttgaaatcttgtctgtaatcggaaaccgtctctcaggaccatttcctcctcaacttggagatattactacacttactgatgtgaatttggaaactaatttattcacaggaccacttcctcgaaacctagggaacttaagaagcttgaaagagttacttctctctgcaaacaacttcacgggtcaaatccctgagtccttaagtaatctcaagaatttgactgaatttcggattgatggaaactctctatctgggaaaatacctgattttattggaaactggactctgctggagaggctagaccttcaaggcacatcaatggaaggtccaattccaccttcaatatcaaacttgacgaacttgactgaattgaggataaccgatttgcgtggacaagcggccttttcttttccggacctgcgaaatctaatgaaaatgaaacgattggtactaagaaattgtttgataaggggacctatcccggaatacattggttccatgagtgagctgaagacactgtttttgaataataactcattgactggtccagttcctcagttcatcatcaacagtaaagaaaacctagatttatctgacaacaatttcactcagccacctactttaagctgtaatcagcttgatgtgaacttgatctccagctacccttcagtaaccgataactctgttcaatggtgcttgagagagggtcttccatgtccagaagatgctaaacagtcttccctgttcatcaactgtggaggaagcagactcaagattggaaaagacacttatacagatgacttgaacagtagaggacaatcaacattctcttctgtctctgaaagatggggatacagtagttctggagtttggttaggcaaggaggatgctggctacttagcaacagacagatttaacttgatcaatggatcaactccagagtattacaaaacagcccgtctctctccacagtcactcaagtactatggactatgcttgagaagaggaagttacaaactgcagctacattttgcagagataatgttctcaaatgaccagacttttaatagcttagggcggcgaatattcgacatttatgtccaagggaacttgttggagagggactttaacatagcagagagagcaggtggagttggtaaaccgttcataaggcaaattgatggagttcaagtgaatggaagtacgttagagattcatttgcagtggacagggaaaggcacaaacgtaataccaacaagaggtgtttacgggcctctcatatctgccataaccattacaccaaatttcaaggttgataccggaaaaccattgtccaatggagcagttgcaggcattgtaatcgcagcgtgtgcggttttcgggttgctggtacttgtaatcttgaggcttacaggttacttaggtggaaaagaagtagatgagaatgaagagcttcggggacttgatttgcagacaggatcgttcacattgaaacaaataaaacgtgctactaataactttgatccagaaaacaagattggtgaaggaggatttggaccggtttataagggtgttctcgctgatgggatgaccatagcggtgaagcagctttcatcaaaatctaagcaaggaaaccgagaatttgtgactgagatcggtatgatatctgcgctgcaacaccctaatcttgtgaaactttatggttgttgcatcgaagggaaagagctcttgcttgtgtatgagtacttagagaacaacagtctcgctcgcgcactctttggcacagagaaacagaggcttcacttggattggtcaacaaggaacaagatttgcatagggattgcgaaaggattggcctatctacacgaggaatcaaggctgaagattgttcatagagacataaaagcgacaaatgtgcttcttgatctgtctctaaacgctaagatctctgattttggtctagctaaactcaacgatgacgagaatacacatatcagcacaaggattgaacaatgtgaaggttacatggctcctgagtatgcaatgagaggttacttgacagacaaggcagatgtttacagctttggtgttgtctgtttagagattgttagtggaaagagcaacacaaattacagaccaaaggaagagtttgtttaccttctggattgggcatatgtcttgcaagaacaaggtagtcttctagaactcgttgatccggatctcggcacaagcttttcgaagaaagaagcgatgaggatgttgaacatagcattactctgcacgaacccatctccaacattgagaccaccaatgtcatctgttgtaagtatgttagaaggaaaaatcaaagtccaaccaccattggtgaaacgtgaagcagatccaagtggttcagcagcaatgaggtttaaggccttagagcttttgtcacaagacagtgagtcacaagtctcgacatatgcaagaaacagagagcaagacataagctcctcatcgatggacggtccttgggtagattcttccttctctgagcctgggaaagatgttagcctgcaacagcaagaagaaggacgttcatcatcttcgtcgaggaaacttttagatgatcttaccgatgtgaagattgagtaa

SEQ ID NO: 85741 - protein, 990 aa, Arabidopsis thaliana
  peptide (1)..(990): Ceres Seq. ID no. 12682905
  misc_feature (95)..(957): Homolog of NCBI NO: 15231938 NR Description: receptor-like serine/threonine kinase, putative;
  misc_feature (58)..(933): Homolog of NCBI NO: 9972372 NR Description: Putative receptor-like serine/threonine kinase -
  misc_feature (95)..(918): Homolog of NCBI NO: 15220545 NR Description: receptor-like serine/threonine kinase, putative;
  misc_feature (96)..(940): Homolog of NCBI NO: 15220901 NR Description: leucine-rich repeat transmembrane protein kinase,
  misc_feature (94)..(555): Homolog of NCBI NO: 25403088 NR Description: probable receptor-like serine/threonine kinase
  misc_feature (606)..(924): Homolog of NCBI NO: 25403088 NR Description: probable receptor-like serine/threonine kinase
  misc_feature (92)..(957): Homolog of NCBI NO: 11994595 NR Description: receptor-like serine/threonine kinase
  misc_feature (4)..(918): Homolog of NCBI NO: 12321409 NR Description: receptor protein kinase, putative [Arabidopsis
  misc_feature (21)..(947): Homolog of NCBI NO: 15222473 NR Description: leucine-rich repeat transmembrane protein kinase,
  misc_feature (86)..(949): Homolog of NCBI NO: 2465923 NR Description: receptor-like serine/threonine kinase
MGFIFSTEKVVYVLLLIFVCLENFGSNAQLLPEDEVQTLRTIFRKLQNQTVNIERTSCSDQNWNFVVESASNSPTSNITCDCTFNASSVCRVTNIDLSRNFLNGTIPTTLSQIPLEILSVIGNRLSGPFPPQLGDITTLTDVNLETNLFTGPLPRNLGNLRSLKELLLSANNFTGQIPESLSNLKNLTEFRIDGNSLSGKIPDFIGNWTLLERLDLQGTSMEGPIPPSISNLTNLTELRITDLRGQAAFSFPDLRNLMKMKRLVLRNCLIRGPIPEYIGSMSELKTLFLNNNSLTGPVPQFIINSKENLDLSDNNFTQPPTLSCNQLDVNLISSYPSVTDNSVQWCLREGLPCPEDAKQSSLFINCGGSRLKIGKDTYTDDLNSRGQSTFSSVSERWGYSSSGVWLGKEDAGYLATDRFNLINGSTPEYYKTARLSPQSLKYYGLCLRRGSYKLQLHFAEIMFSNDQTFNSLGRRIFDIYVQGNLLERDFNIAERAGGVGKPFIRQIDGVQVNGSTLEIHLQWTGKGTNVIPTRGVYGPLISAITITPNFKVDTGKPLSNGAVAGIVIAACAVFGLLVLVILRLTGYLGGKEVDENEELRGLDLQTGSFTLKQIKRATNNFDPENKIGEGGFGPVYKGVLADGMTIAVKQLSSKSKQGNREFVTEIGMISALQHPNLVKLYGCCIEGKELLLVYEYLENNSLARALFGTEKQRLHLDWSTRNKICIGIAKGLAYLHEESRLKIVHRDIKATNVLLDLSLNAKISDFGLAKLNDDENTHISTRIEQCEGYMAPEYAMRGYLTDKADVYSFGVVCLEIVSGKSNTNYRPKEEFVYLLDWAYVLQEQGSLLELVDPDLGTSFSKKEAMRMLNIALLCTNPSPTLRPPMSSVVSMLEGKIKVQPPLVKREADPSGSAAMRFKALELLSQDSESQVSTYARNREQDISSSSMDGPWVDSSFSEPGKDVSLQQQEEGRSSSSSRKLLDDLTDVKIE

SEQ ID NO: 85742 - protein, 770 aa, Arabidopsis thaliana
  peptide (1)..(770): Ceres Seq. ID no. 12682906
  misc_feature (1)..(737): Homolog of NCBI NO: 15231938 NR Description: receptor-like serine/threonine kinase, putative;
  misc_feature (1)..(713): Homolog of NCBI NO: 9972372 NR Description: Putative receptor-like serine/threonine kinase -
  misc_feature (1)..(698): Homolog of NCBI NO: 15220545 NR Description: receptor-like serine/threonine kinase, putative;
  misc_feature (1)..(720): Homolog of NCBI NO: 15220901 NR Description: leucine-rich repeat transmembrane protein kinase,
  misc_feature (1)..(335): Homolog of NCBI NO: 25403088 NR Description: probable receptor-like serine/threonine kinase
  misc_feature (386)..(704): Homolog of NCBI NO: 25403088 NR Description: probable receptor-like serine/threonine kinase
  misc_feature (1)..(737): Homolog of NCBI NO: 11994595 NR Description: receptor-like serine/threonine kinase
  misc_feature (1)..(698): Homolog of NCBI NO: 12321409 NR Description: receptor protein kinase, putative [Arabidopsis
  misc_feature (1)..(727): Homolog of NCBI NO: 15222473 NR Description: leucine-rich repeat transmembrane protein kinase,
  misc_feature (1)..(729): Homolog of NCBI NO: 2465923 NR Description: receptor-like serine/threonine kinase
MEGPIPPSISNLTNLTELRITDLRGQAAFSFPDLRNLMKMKRLVLRNCLIRGPIPEYIGSMSELKTLFLNNNSLTGPVPQFIINSKENLDLSDNNFTQPPTLSCNQLDVNLISSYPSVTDNSVQWCLREGLPCPEDAKQSSLFINCGGSRLKIGKDTYTDDLNSRGQSTFSSVSERWGYSSSGVWLGKEDAGYLATDRFNLINGSTPEYYKTARLSPQSLKYYGLCLRRGSYKLQLHFAEIMFSNDQTFNSLGRRIFDIYVQGNLLERDFNIAERAGGVGKPFIRQIDGVQVNGSTLEIHLQWTGKGTNVIPTRGVYGPLISAITITPNFKVDTGKPLSNGAVAGIVIAACAVFGLLVLVILRLTGYLGGKEVDENEELRGLDLQTGSFTLKQIKRATNNFDPENKIGEGGFGPVYKGVLADGMTIAVKQLSSKSKQGNREFVTEIGMISALQHPNLVKLYGCCIEGKELLLVYEYLENNSLARALFGTEKQRLHLDWSTRNKICIGIAKGLAYLHEESRLKIVHRDIKATNVLLDLSLNAKISDFGLAKLNDDENTHISTRIEQCEGYMAPEYAMRGYLTDKADVYSFGVVCLEIVSGKSNTNYRPKEEFVYLLDWAYVLQEQGSLLELVDPDLGTSFSKKEAMRMLNIALLCTNPSPTLRPPMSSVVSMLEGKIKVQPPLVKREADPSGSAAMRFKALELLSQDSESQVSTYARNREQDISSSSMDGPWVDSSFSEPGKDVSLQQQEEGRSSSSSRKLLDDLTDVKIE

SEQ ID NO: 85743 - protein, 733 aa, Arabidopsis thaliana
  peptide (1)..(733): Ceres Seq. ID no. 12682907
  misc_feature (1)..(700): Homolog of NCBI NO: 15231938 NR Description: receptor-like serine/threonine kinase, putative;
  misc_feature (1)..(676): Homolog of NCBI NO: 9972372 NR Description: Putative receptor-like serine/threonine kinase -
  misc_feature (1)..(661): Homolog of NCBI NO: 15220545 NR Description: receptor-like serine/threonine kinase, putative;
  misc_feature (1)..(683): Homolog of NCBI NO: 15220901 NR Description: leucine-rich repeat transmembrane protein kinase,
  misc_feature (1)..(298): Homolog of NCBI NO: 25403088 NR Description: probable receptor-like serine/threonine kinase
  misc_feature (349)..(667): Homolog of NCBI NO: 25403088 NR Description: probable receptor-like serine/threonine kinase
  misc_feature (1)..(700): Homolog of NCBI NO: 11994595 NR Description: receptor-like serine/threonine kinase
  misc_feature (1)..(661): Homolog of NCBI NO: 12321409 NR Description: receptor protein kinase, putative [Arabidopsis
  misc_feature (1)..(690): Homolog of NCBI NO: 15222473 NR Description: leucine-rich repeat transmembrane protein kinase,
  misc_feature (1)..(692): Homolog of NCBI NO: 2465923 NR Description: receptor-like serine/threonine kinase
MKMKRLVLRNCLIRGPIPEYIGSMSELKTLFLNNNSLTGPVPQFIINSKENLDLSDNNFTQPPTLSCNQLDVNLISSYPSVTDNSVQWCLREGLPCPEDAKQSSLFINCGGSRLKIGKDTYTDDLNSRGQSTFSSVSERWGYSSSGVWLGKEDAGYLATDRFNLINGSTPEYYKTARLSPQSLKYYGLCLRRGSYKLQLHFAEIMFSNDQTFNSLGRRIFDIYVQGNLLERDFNIAERAGGVGKPFIRQIDGVQVNGSTLEIHLQWTGKGTNVIPTRGVYGPLISAITITPNFKVDTGKPLSNGAVAGIVIAACAVFGLLVLVILRLTGYLGGKEVDENEELRGLDLQTGSFTLKQIKRATNNFDPENKIGEGGFGPVYKGVLADGMTIAVKQLSSKSKQGNREFVTEIGMISALQHPNLVKLYGCCIEGKELLLVYEYLENNSLARALFGTEKQRLHLDWSTRNKICIGIAKGLAYLHEESRLKIVHRDIKATNVLLDLSLNAKISDFGLAKLNDDENTHISTRIEQCEGYMAPEYAMRGYLTDKADVYSFGVVCLEIVSGKSNTNYRPKEEFVYLLDWAYVLQEQGSLLELVDPDLGTSFSKKEAMRMLNIALLCTNPSPTLRPPMSSVVSMLEGKIKVQPPLVKREADPSGSAAMRFKALELLSQDSESQVSTYARNREQDISSSSMDGPWVDSSFSEPGKDVSLQQQEEGRSSSSSRKLLDDLTDVKIE

SEQ ID NO: 85744 - DNA, 683 bp, Arabidopsis thaliana
  misc_feature (1)..(683): Ceres Seq. ID no. 12682928
  misc_feature: MA Experiment ID: 20000171 Result: Up-regulated in Transcription
  misc_feature: MA Experiment 20000171 PARAMETER Experiment Name: At_42deg_Heat_P Parameter: Age (day) Value: 14
  misc_feature: MA Experiment 20000171 PARAMETER Experiment Name: At_42deg_Heat_P Parameter: Organism Value: A. thaliana
  misc_feature: MA Experiment 20000171 PARAMETER Experiment Name: At_42deg_Heat_P Parameter: Plant Line Value: WS
  misc_feature: MA Experiment 20000171 PARAMETER Experiment Name: At_42deg_Heat_P Parameter: Temperature (deg C) Value: 42 vs. 22
  misc_feature: MA Experiment 20000171 PARAMETER Experiment Name: At_42deg_Heat_P Parameter: Timepoint (hr) Value: 1
  misc_feature: MA Experiment 20000171 PARAMETER Experiment Name: At_42deg_Heat_P Parameter: Tissue Value: Aerial
  misc_feature: MA Experiment ID: 20000173 Result: Up-regulated in Transcription
  misc_feature: MA Experiment 20000173 PARAMETER Experiment Name: At_42deg_Heat_P Parameter: Age (day) Value: 14
  misc_feature: MA Experiment 20000173 PARAMETER Experiment Name: At_42deg_Heat_P Parameter: Organism Value: A. thaliana
  misc_feature: MA Experiment 20000173 PARAMETER Experiment Name: At_42deg_Heat_P Parameter: Plant Line Value: WS
  misc_feature: MA Experiment 20000173 PARAMETER Experiment Name: At_42deg_Heat_P Parameter: Temperature (deg C) Value: 42 vs. 22
  misc_feature: MA Experiment 20000173 PARAMETER Experiment Name: At_42deg_Heat_P Parameter: Timepoint (hr) Value: 6
  misc_feature: MA Experiment 20000173 PARAMETER Experiment Name: At_42deg_Heat_P Parameter: Tissue Value: Aerial
  misc_feature: MA Experiment ID: 20000182 Result: Up-regulated in Transcription
  misc_feature: MA Experiment 20000182 PARAMETER Experiment Name: At_2mM_SA_P Parameter: Age (day) Value: 14
  misc_feature: MA Experiment 20000182 PARAMETER Experiment Name: At_2mM_SA_P Parameter: Organism Value: A. thaliana
  misc_feature: MA Experiment 20000182 PARAMETER Experiment Name: At_2mM_SA_P Parameter: Plant Line Value: WS
  misc_feature: MA Experiment 20000182 PARAMETER Experiment Name: At_2mM_SA_P Parameter: Timepoint (hr) Value: 6
  misc_feature: MA Experiment 20000182 PARAMETER Experiment Name: At_2mM_SA_P Parameter: Tissue Value: Aerial
  misc_feature: MA Experiment 20000182 PARAMETER Experiment Name: At_2mM_SA_P Parameter: Treatment Value: 2mM SA vs. No Treatment
  misc_feature: MA Experiment ID: 20000437 Result: Up-regulated in Transcription
  misc_feature: MA Experiment 20000437 PARAMETER Experiment Name: At_Drought_P Parameter: Age (day) Value: 8
  misc_feature: MA Experiment 20000437 PARAMETER Experiment Name: At_Drought_P Parameter: Organism Value: A. thaliana
  misc_feature: MA Experiment 20000437 PARAMETER Experiment Name: At_Drought_P Parameter: Plant Line Value: WS
  misc_feature: MA Experiment 20000437 PARAMETER Experiment Name: At_Drought_P Parameter: Timepoint (hr) Value: 24
  misc_feature: MA Experiment 20000437 PARAMETER Experiment Name: At_Drought_P Parameter: Tissue Value: Whole Plant
  misc_feature: MA Experiment 20000437 PARAMETER Experiment Name: At_Drought_P Parameter: Treatment Value: Drought vs. No Drought
  misc_feature: MA Experiment ID: 20000443 Result: Up-regulated in Transcription
  misc_feature: MA Experiment 20000443 PARAMETER Experiment Name: At_1uM_BR-BRZ__P Parameter: Tissue Value: Shoot Apices
  misc_feature: MA Experiment 20000443 PARAMETER Experiment Name: At_1uM_BR-BRZ__P Parameter: Treatment Value: 1uM BRZ vs. No Treatment
  misc_feature: MA Experiment ID: 20000709 Result: Up-regulated in Transcription
  misc_feature: MA Experiment 20000709 PARAMETER Experiment Name: At_15mM_NH4NO3_L-to-H_P Parameter: Age (hr) Value: 14
  misc_feature: MA Experiment 20000709 PARAMETER Experiment Name: At_15mM_NH4NO3_L-to-H_P Parameter: Organism Value: A. thaliana
  misc_feature: MA Experiment 20000709 PARAMETER Experiment Name: At_15mM_NH4NO3_L-to-H_P Parameter: Plant Line Value: WS
  misc_feature: MA Experiment 20000709 PARAMETER Experiment Name: At_15mM_NH4NO3_L-to-H_P Parameter: Timepoint (hr) Value: 4
  misc_feature: MA Experiment 20000709 PARAMETER Experiment Name: At_15mM_NH4NO3_L-to-H_P Parameter: Tissue Value: Aerial
  misc_feature: MA Experiment 20000709 PARAMETER Experiment Name: At_15mM_NH4NO3_L-to-H_P Parameter: Treatment Value: 15mM NH4NO3 vs. 30mM Mannitol
  misc_feature: MA Experiment ID: 20001248 Result: Down-regulated in Transcription
  misc_feature: MA Experiment 20001248 PARAMETER Experiment Name: At_Far-red-induction_P Parameter: Age (day) Value: 7
  misc_feature: MA Experiment 20001248 PARAMETER Experiment Name: At_Far-red-induction_P Parameter: Light Value: Far-red vs. White
  misc_feature: MA Experiment 20001248 PARAMETER Experiment Name: At_Far-red-induction_P Parameter: Organism Value: A. thaliana
  misc_feature: MA Experiment 20001248 PARAMETER Experiment Name: At_Far-red-induction_P Parameter: Plant Line Value: Columbia
  misc_feature: MA Experiment 20001248 PARAMETER Experiment Name: At_Far-red-induction_P Parameter: Timepoint (hr) Value: 4
  misc_feature: MA Experiment 20001248 PARAMETER Experiment Name: At_Far-red-induction_P Parameter: Tissue Value: Whole Plant
  misc_feature: MA Experiment ID: 20001555 Result: Up-regulated in Transcription
  misc_feature: MA Experiment 20001555 PARAMETER Experiment Name: At_Drought_Soil_Dry_P Parameter: Age (day) Value: 24
  misc_feature: MA Experiment 20001555 PARAMETER Experiment Name: At_Drought_Soil_Dry_P Parameter: Organism Value: A. thaliana
  misc_feature: MA Experiment 20001555 PARAMETER Experiment Name: At_Drought_Soil_Dry_P Parameter: Plant Line Value: WS
  misc_feature: MA Experiment 20001555 PARAMETER Experiment Name: At_Drought_Soil_Dry_P Parameter: Post Timepoint (hr) Value: None
  misc_feature: MA Experiment 20001555 PARAMETER Experiment Name: At_Drought_Soil_Dry_P Parameter: Post-Treatment Value: None
  misc_feature: MA Experiment 20001555 PARAMETER Experiment Name: At_Drought_Soil_Dry_P Parameter: Timepoint (day) Value: 10
  misc_feature: MA Experiment 20001555 PARAMETER Experiment Name: At_Drought_Soil_Dry_P Parameter: Treatment Value: Drought vs. No Drought
  misc_feature: MA Experiment ID: 20001556 Result: Up-regulated in Transcription
  misc_feature: MA Experiment 20001556 PARAMETER Experiment Name: At_Drought_Soil_Dry_P Parameter: Age (day) Value: 26
  misc_feature: MA Experiment 20001556 PARAMETER Experiment Name: At_Drought_Soil_Dry_P Parameter: Organism Value: A. thaliana
  misc_feature: MA Experiment 20001556 PARAMETER Experiment Name: At_Drought_Soil_Dry_P Parameter: Plant Line Value: WS
  misc_feature: MA Experiment 20001556 PARAMETER Experiment Name: At_Drought_Soil_Dry_P Parameter: Post Timepoint (hr) Value: None
  misc_feature: MA Experiment 20001556 PARAMETER Experiment Name: At_Drought_Soil_Dry_P Parameter: Post-Treatment Value: None
  misc_feature: MA Experiment 20001556 PARAMETER Experiment Name: At_Drought_Soil_Dry_P Parameter: Timepoint (day) Value: 12
  misc_feature: MA Experiment 20001556 PARAMETER Experiment Name: At_Drought_Soil_Dry_P Parameter: Treatment Value: Drought vs. No Drought
  misc_feature: MA Experiment ID: 20001558 Result: Up-regulated in Transcription
  misc_feature: MA Experiment 20001558 PARAMETER Experiment Name: At_Drought_Soil_Dry_P Parameter: Age (day) Value: 27
  misc_feature: MA Experiment 20001558 PARAMETER Experiment Name: At_Drought_Soil_Dry_P Parameter: Organism Value: A. thaliana
  misc_feature: MA Experiment 20001558 PARAMETER Experiment Name: At_Drought_Soil_Dry_P Parameter: Plant Line Value: WS
  misc_feature: MA Experiment 20001558 PARAMETER Experiment Name: At_Drought_Soil_Dry_P Parameter: Post Timepoint (hr) Value: 6
  misc_feature: MA Experiment 20001558 PARAMETER Experiment Name: At_Drought_Soil_Dry_P Parameter: Post-Treatment Value: Re-Water vs. No Drought
  misc_feature: MA Experiment 20001558 PARAMETER Experiment Name: At_Drought_Soil_Dry_P Parameter: Timepoint (day) Value: 13
  misc_feature: MA Experiment 20001558 PARAMETER Experiment Name: At_Drought_Soil_Dry_P Parameter: Treatment Value: Drought vs. No Drought
  misc_feature: MA Experiment ID: 20001772 Result: Up-regulated in Transcription
  misc_feature: MA Experiment 20001772 PARAMETER Experiment Name: At_Far-red-enriched-adult_P Parameter: Age (day) Value: 29
  misc_feature: MA Experiment 20001772 PARAMETER Experiment Name: At_Far-red-enriched-adult_P Parameter: Light Value: Far-red enriched vs. White
  misc_feature: MA Experiment 20001772 PARAMETER Experiment Name: At_Far-red-enriched-adult_P Parameter: Organism Value: A. thaliana
  misc_feature: MA Experiment 20001772 PARAMETER Experiment Name: At_Far-red-enriched-adult_P Parameter: Plant Line Value: Columbia
  misc_feature: MA Experiment 20001772 PARAMETER Experiment Name: At_Far-red-enriched-adult_P Parameter: Timepoint (hr) Value: 24
  misc_feature: MA Experiment 20001772 PARAMETER Experiment Name: At_Far-red-enriched-adult_P Parameter: Tissue Value: Aerial
  misc_feature: MA Experiment ID: 20001773 Result: Up-regulated in Transcription
  misc_feature: MA Experiment 20001773 PARAMETER Experiment Name: At_Far-red-enriched-adult_P Parameter: Age (day) Value: 30
  misc_feature: MA Experiment 20001773 PARAMETER Experiment Name: At_Far-red-enriched-adult_P Parameter: Light Value: Far-red enriched vs. White
  misc_feature: MA Experiment 20001773 PARAMETER Experiment Name: At_Far-red-enriched-adult_P Parameter: Organism Value: A. thaliana
  misc_feature: MA Experiment 20001773 PARAMETER Experiment Name: At_Far-red-enriched-adult_P Parameter: Plant Line Value: Columbia
  misc_feature: MA Experiment 20001773 PARAMETER Experiment Name: At_Far-red-enriched-adult_P Parameter: Timepoint (hr) Value: 48
  misc_feature: MA Experiment 20001773 PARAMETER Experiment Name: At_Far-red-enriched-adult_P Parameter: Tissue Value: Aerial
  misc_feature: MA Experiment ID: 20001774 Result: Up-regulated in Transcription
  misc_feature: MA Experiment 20001774 PARAMETER Experiment Name: At_Far-red-enriched-adult_P Parameter: Age (day) Value: 31
  misc_feature: MA Experiment 20001774 PARAMETER Experiment Name: At_Far-red-enriched-adult_P Parameter: Light Value: Far-red enriched vs. White
  misc_feature: MA Experiment 20001774 PARAMETER Experiment Name: At_Far-red-enriched-adult_P Parameter: Organism Value: A. thaliana
  misc_feature: MA Experiment 20001774 PARAMETER Experiment Name: At_Far-red-enriched-adult_P Parameter: Plant Line Value: Columbia
  misc_feature: MA Experiment 20001774 PARAMETER Experiment Name: At_Far-red-enriched-adult_P Parameter: Timepoint (hr) Value: 72
  misc_feature: MA Experiment 20001774 PARAMETER Experiment Name: At_Far-red-enriched-adult_P Parameter: Tissue Value: Aerial
  misc_feature: MA Experiment ID: 20001904 Result: Up-regulated in Transcription
  misc_feature: MA Experiment 20001904 PARAMETER Experiment Name: At_Drought_Reproduction_P Parameter: Age (day) Value: 37
  misc_feature: MA Experiment 20001904 PARAMETER Experiment Name: At_Drought_Reproduction_P Parameter: Organism Value: A. thaliana
  misc_feature: MA Experiment 20001904 PARAMETER Experiment Name: At_Drought_Reproduction_P Parameter: Plant Line Value: WS
  misc_feature: MA Experiment 20001904 PARAMETER Experiment Name: At_Drought_Reproduction_P Parameter: Timepoint (day) Value: 7
  misc_feature: MA Experiment 20001904 PARAMETER Experiment Name: At_Drought_Reproduction_P Parameter: Tissue Value: Rosettes
  misc_feature: MA Experiment 20001904 PARAMETER Experiment Name: At_Drought_Reproduction_P Parameter: Treatment Value: Drought vs. No Drought
aacaaggagcaaagagttcatagcaaagcaaagcttcaaaacagagcaaacgcaaagagtagcaatcacaagaggaagtgaaacgatgtctctaattccaagcatcttcggaggaagaagaacaaacgttttcgatccgttctcgctggatgttttcgatccgttcgaaggtttcttgacgccgtcaggattggcaaacgcacccgctatggatgtggcagcgttcacaaacgctaaagtggattggagggagacacctgaggcgcacgtgttcaaggcggatttaccgggactgaggaaggaagaggtgaaagtggaggttgaggatggcaacatacttcagataagtggagagaggagcaatgagaatgaagagaagaatgacaagtggcaccgtgtggagcggtcgagtgggaagttcacgaggaggtttaggctgccggagaatgctaagatggaggaaatcaaagccagtatggaaaatggtgtgttgtcggttaccgtgcccaaggtgccagagaaaaagccagaggttaagtccattgatatctctggttaaagggaattgtttaagaccaaaaatgtgtgatggtagtgaaataattggtgtgtgatgtgtttttcttgtaatcatgaatctcgttgtatcattatcataaaatcttaataagagtgtgctttgt

SEQ ID NO: 85745 - protein, 185 aa, Arabidopsis thaliana; identical to SEQ ID NO: 44122
  peptide (1)..(185): Ceres Seq. ID no. 12682929
  misc_feature (1)..(185): Homolog of NCBI NO: 8671873 NR Description: Contains similarity to 17.6 KD class I heat shock from Arabidopsis thaliana gi|P13853 and contains Hsp20/alpha PF|00011 and signal peptidase I PF|00461 domains. ESTs
  misc_feature (29)..(185): Homolog of NCBI NO: 15220832 NR Description: 17.6 kDa heat shock protein (AA 1-156); protein At1g53540.1 [Arabidopsis thaliana]
  misc_feature (29)..(185): Homolog of NCBI NO: 81639 NR Description: heat shock protein 17 - Arabidopsis thaliana
  misc_feature (29)..(185): Homolog of NCBI NO: 7441319 NR Description: heat-shock protein 17.6, low molecular weight -
  misc_feature (29)..(185): Homolog of NCBI NO: 15231372 NR Description: heat shock protein 17; protein id: At3g46230.1, by cDNA: gi_15294149 [Arabidopsis thaliana]
  misc_feature (29)..(185): Homolog of NCBI NO: 15294150 NR Description: AT3g46230/F12M12_200 [Arabidopsis thaliana]
  misc_feature (29)..(185): Homolog of NCBI NO: 8250119 NR Description: HSP17.7-a protein [Brassica oleracea]
  misc_feature (29)..(185): Homolog of NCBI NO: 21618106 NR Description: heat shock protein 18 [Arabidopsis thaliana]
  misc_feature (29)..(185): Homolog of NCBI NO: 15238509 NR Description: heat shock protein 18; protein id: At5g59720.1, by cDNA: 97197. [Arabidopsis thaliana]
  misc_feature (29)..(185): Homolog of NCBI NO: 11276924 NR Description: heat-shock protein, low molecular weight

SEQ ID NO: 85746 - protein, 157 aa, Arabidopsis thaliana; identical to SEQ ID NO: 44123
  peptide (1)..(157): Ceres Seq. ID no. 12682930
  misc_feature (1)..(157): Homolog of NCBI NO: 8671873 NR Description: Contains similarity to 17.6 KD class I heat shock from Arabidopsis thaliana gi|P13853 and contains Hsp20/alpha PF|00011 and signal peptidase I PF|00461 domains. ESTs
  misc_feature (1)..(157): Homolog of NCBI NO: 15220832 NR Description: 17.6 kDa heat shock protein (AA 1-156); protein At1g53540.1 [Arabidopsis thaliana]
  misc_feature (1)..(157): Homolog of NCBI NO: 81639 NR Description: heat shock protein 17 - Arabidopsis thaliana
  misc_feature (1)..(157): Homolog of NCBI NO: 7441319 NR Description: heat-shock protein 17.6, low molecular weight -
  misc_feature (1)..(157): Homolog of NCBI NO: 15231372 NR Description: heat shock protein 17; protein id: At3g46230.1, by cDNA: gi_15294149 [Arabidopsis thaliana]
  misc_feature (1)..(157): Homolog of NCBI NO: 15294150 NR Description: AT3g46230/F12M12_200 [Arabidopsis thaliana]
  misc_feature (1)..(157): Homolog of NCBI NO: 8250119 NR Description: HSP17.7-a protein [Brassica oleracea]
  misc_feature (1)..(157): Homolog of NCBI NO: 21618106 NR Description: heat shock protein 18 [Arabidopsis thaliana]
  misc_feature (1)..(157): Homolog of NCBI NO: 15238509 NR Description: heat shock protein 18; protein id: At5g59720.1, by cDNA: 97197. [Arabidopsis thaliana]
  misc_feature (1)..(157): Homolog of NCBI NO: 11276924 NR Description: heat-shock protein, low molecular weight

SEQ ID NO: 85747 - protein, 116 aa, Arabidopsis thaliana; identical to SEQ ID NO: 44124
  peptide (1)..(116): Ceres Seq. ID no. 12682931
  misc_feature (1)..(116): Homolog of NCBI NO: 8671873 NR Description: Contains similarity to 17.6 KD class I heat shock from Arabidopsis thaliana gi|P13853 and contains Hsp20/alpha PF|00011 and signal peptidase I PF|00461 domains. ESTs
  misc_feature (1)..(116): Homolog of NCBI NO: 15220832 NR Description: 17.6 kDa heat shock protein (AA 1-156); protein At1g53540.1 [Arabidopsis thaliana]
  misc_feature (1)..(116): Homolog of NCBI NO: 81639 NR Description: heat shock protein 17 - Arabidopsis thaliana
  misc_feature (1)..(116): Homolog of NCBI NO: 7441319 NR Description: heat-shock protein 17.6, low molecular weight -
  misc_feature (1)..(116): Homolog of NCBI NO: 15231372 NR Description: heat shock protein 17; protein id: At3g46230.1, by cDNA: gi_15294149 [Arabidopsis thaliana]
  misc_feature (1)..(116): Homolog of NCBI NO: 15294150 NR Description: AT3g46230/F12M12_200 [Arabidopsis thaliana]
  misc_feature (1)..(116): Homolog of NCBI NO: 8250119 NR Description: HSP17.7-a protein [Brassica oleracea]
  misc_feature (1)..(116): Homolog of NCBI NO: 21618106 NR Description: heat shock protein 18 [Arabidopsis thaliana]
  misc_feature (1)..(116): Homolog of NCBI NO: 15238509 NR Description: heat shock protein 18; protein id: At5g59720.1, by cDNA: 97197. [Arabidopsis thaliana]
  misc_feature (1)..(116): Homolog of NCBI NO: 11276924 NR Description: heat-shock protein, low molecular weight

SEQ ID NO: 85748 - DNA, 1081 bp, Arabidopsis thaliana
  misc_feature (1)..(1081): Ceres Seq. ID no. 12682936
  misc_feature: MA Experiment ID: 20000166 Result: Up-regulated in Transcription
  misc_feature: MA Experiment 20000166 PARAMETER Experiment Name: At_100uM_ABA_P Parameter: Age (day) Value: 14
  misc_feature: MA Experiment 20000166 PARAMETER Experiment Name: At_100uM_ABA_P Parameter: Organism Value: A. thaliana
  misc_feature: MA Experiment 20000166 PARAMETER Experiment Name: At_100uM_ABA_P Parameter: Plant Line Value: WS
  misc_feature: MA Experiment 20000166 PARAMETER Experiment Name: At_100uM_ABA_P Parameter: Timepoint (hr) Value: 1
  misc_feature: MA Experiment 20000166 PARAMETER Experiment Name: At_100uM_ABA_P Parameter: Tissue Value: Aerial
  misc_feature: MA Experiment 20000166 PARAMETER Experiment Name: At_100uM_ABA_P Parameter: Treatment Value: 100uM ABA vs. No Treatment
  misc_feature: MA Experiment ID: 20000169 Result: Up-regulated in Transcription
  misc_feature: MA Experiment 20000169 PARAMETER Experiment Name: At_100uM_ABA_P Parameter: Age (day) Value: 14
  misc_feature: MA Experiment 20000169 PARAMETER Experiment Name: At_100uM_ABA_P Parameter: Organism Value: A. thaliana
  misc_feature: MA Experiment 20000169 PARAMETER Experiment Name: At_100uM_ABA_P Parameter: Plant Line Value: WS
  misc_feature: MA Experiment 20000169 PARAMETER Experiment Name: At_100uM_ABA_P Parameter: Timepoint (hr) Value: 6
  misc_feature: MA Experiment 20000169 PARAMETER Experiment Name: At_100uM_ABA_P Parameter: Tissue Value: Aerial
  misc_feature: MA Experiment 20000169 PARAMETER Experiment Name: At_100uM_ABA_P Parameter: Treatment Value: 100uM ABA vs. No Treatment
  misc_feature: MA Experiment ID: 20000184 Result: Down-regulated in Transcription
  misc_feature: MA Experiment 20000184 PARAMETER Experiment Name: At_Shoots__P Parameter: Age (day) Value: 7
  misc_feature: MA Experiment 20000184 PARAMETER Experiment Name: At_Shoots__P Parameter: Tissue Value: Shoots vs. Whole Plant
  misc_feature: MA Experiment ID: 20000214 Result: Down-regulated in Transcription
  misc_feature: MA Experiment 20000214 PARAMETER Experiment Name: At_4deg_Cold_P Parameter: Timepoint (hr) Value: 6
  misc_feature: MA Experiment ID: 20000234 Result: Down-regulated in Transcription
  misc_feature: MA Experiment 20000234 PARAMETER Experiment Name: At_Siliques_P Parameter: Age (day) Value: 21
  misc_feature: MA Experiment 20000234 PARAMETER Experiment Name: At_Siliques_P Parameter: Organism Value: A. thaliana
  misc_feature: MA Experiment 20000234 PARAMETER Experiment Name: At_Siliques_P Parameter: Plant Line Value: WS
  misc_feature: MA Experiment 20000234 PARAMETER Experiment Name: At_Siliques_P Parameter: Tissue Value: Less Than 5mm Siliques vs. Whole Plant
  misc_feature: MA Experiment ID: 20000235 Result: Down-regulated in Transcription
  misc_feature: MA Experiment 20000235 PARAMETER Experiment Name: At_Siliques_P Parameter: Age (day) Value: 21
  misc_feature: MA Experiment 20000235 PARAMETER Experiment Name: At_Siliques_P Parameter: Organism Value: A. thaliana
  misc_feature: MA Experiment 20000235 PARAMETER Experiment Name: At_Siliques_P Parameter: Plant Line Value: WS
  misc_feature: MA Experiment 20000235 PARAMETER Experiment Name: At_Siliques_P Parameter: Tissue Value: 5-10mm Siliques vs. Whole Plant
  misc_feature: MA Experiment ID: 20000265 Result: Down-regulated in Transcription
  misc_feature: MA Experiment 20000265 PARAMETER Experiment Name: At_Open_Flower_P Parameter: Age (day) Value: 21
  misc_feature: MA Experiment 20000265 PARAMETER Experiment Name: At_Open_Flower_P Parameter: Plant Line Value: WS
  misc_feature: MA Experiment 20000265 PARAMETER Experiment Name: At_Open_Flower_P Parameter: Tissue Value: Closed Flower vs. Whole Plant
  misc_feature: MA Experiment ID: 20000286 Result: Down-regulated in Transcription
  misc_feature: MA Experiment 20000286 PARAMETER Experiment Name: At_Open_Flower_P Parameter: Age (day) Value: 21
  misc_feature: MA Experiment 20000286 PARAMETER Experiment Name: At_Open_Flower_P Parameter: Plant Line Value: WS
  misc_feature: MA Experiment 20000286 PARAMETER Experiment Name: At_Open_Flower_P Parameter: Tissue Value: Half Open vs. Whole Plant
  misc_feature: MA Experiment ID: 20000436 Result: Up-regulated in Transcription
  misc_feature: MA Experiment 20000436 PARAMETER Experiment Name: At_Drought_P Parameter: Age (day) Value: 7
  misc_feature: MA Experiment 20000436 PARAMETER Experiment Name: At_Drought_P Parameter: Organism Value: A. thaliana
  misc_feature: MA Experiment 20000436 PARAMETER Experiment Name: At_Drought_P Parameter: Plant Line Value: WS
  misc_feature: MA Experiment 20000436 PARAMETER Experiment Name: At_Drought_P Parameter: Timepoint (hr) Value: 12
  misc_feature: MA Experiment 20000436 PARAMETER Experiment Name: At_Drought_P Parameter: Tissue Value: Whole Plant
  misc_feature: MA Experiment 20000436 PARAMETER Experiment Name: At_Drought_P Parameter: Treatment Value: Drought vs. No Drought
  misc_feature: MA Experiment ID: 20000437 Result: Up-regulated in Transcription
  misc_feature: MA Experiment 20000437 PARAMETER Experiment Name: At_Drought_P Parameter: Age (day) Value: 8
  misc_feature: MA Experiment 20000437 PARAMETER Experiment Name: At_Drought_P Parameter: Organism Value: A. thaliana
  misc_feature: MA Experiment 20000437 PARAMETER Experiment Name: At_Drought_P Parameter: Plant Line Value: WS
  misc_feature: MA Experiment 20000437 PARAMETER Experiment Name: At_Drought_P Parameter: Timepoint (hr) Value: 24
  misc_feature: MA Experiment 20000437 PARAMETER Experiment Name: At_Drought_P Parameter: Tissue Value: Whole Plant
  misc_feature: MA Experiment 20000437 PARAMETER Experiment Name: At_Drought_P Parameter: Treatment Value: Drought vs. No Drought
  misc_feature: MA Experiment ID: 20000453 Result: Up-regulated in Transcription
  misc_feature: MA Experiment 20000453 PARAMETER Experiment Name: At_100uM_ABA_P Parameter: Age (day) Value: 15
  misc_feature: MA Experiment 20000453 PARAMETER Experiment Name: At_100uM_ABA_P Parameter: Organism Value: A. thaliana
  misc_feature: MA Experiment 20000453 PARAMETER Experiment Name: At_100uM_ABA_P Parameter: Plant Line Value: WS
  misc_feature: MA Experiment 20000453 PARAMETER Experiment Name: At_100uM_ABA_P Parameter: Timepoint (hr) Value: 24
  misc_feature: MA Experiment 20000453 PARAMETER Experiment Name: At_100uM_ABA_P Parameter: Tissue Value: Aerial
  misc_feature: MA Experiment 20000453 PARAMETER Experiment Name: At_100uM_ABA_P Parameter: Treatment Value: 100uM ABA vs. No Treatment
  misc_feature: MA Experiment ID: 20000794 Result: Up-regulated in Transcription
  misc_feature: MA Experiment 20000794 PARAMETER Experiment Name: At_Petals_P Parameter: Age (day) Value: 23-25 days
  misc_feature: MA Experiment 20000794 PARAMETER Experiment Name: At_Petals_P Parameter: Plant Line Value: WS
  misc_feature: MA Experiment 20000794 PARAMETER Experiment Name: At_Petals_P Parameter: Tissue Value: Petals vs. Whole plant
  misc_feature: MA Experiment ID: 20001450 Result: Up-regulated in Transcription
  misc_feature: MA Experiment 20001450 PARAMETER Experiment Name: At_Far-red-induction_P Parameter: Age (day) Value: 7
  misc_feature: MA Experiment 20001450 PARAMETER Experiment Name: At_Far-red-induction_P Parameter: Light Value: Far-red vs. White
  misc_feature: MA Experiment 20001450 PARAMETER Experiment Name: At_Far-red-induction_P Parameter: Organism Value: A. thaliana
  misc_feature: MA Experiment 20001450 PARAMETER Experiment Name: At_Far-red-induction_P Parameter: Plant Line Value: Columbia
  misc_feature: MA Experiment 20001450 PARAMETER Experiment Name: At_Far-red-induction_P Parameter: Timepoint (hr) Value: 8
  misc_feature: MA Experiment 20001450 PARAMETER Experiment Name: At_Far-red-induction_P Parameter: Tissue Value: Whole Plant
  misc_feature: MA Experiment ID: 20001451 Result: Up-regulated in Transcription
  misc_feature: MA Experiment 20001451 PARAMETER Experiment Name: At_Far-red-induction_P Parameter: Age (day) Value: 7
  misc_feature: MA Experiment 20001451 PARAMETER Experiment Name: At_Far-red-induction_P Parameter: Light Value: Far-red vs. White
  misc_feature: MA Experiment 20001451 PARAMETER Experiment Name: At_Far-red-induction_P Parameter: Organism Value: A. thaliana
  misc_feature: MA Experiment 20001451 PARAMETER Experiment Name: At_Far-red-induction_P Parameter: Plant Line Value: Columbia
  misc_feature: MA Experiment 20001451 PARAMETER Experiment Name: At_Far-red-induction_P Parameter: Timepoint (hr) Value: 24
  misc_feature: MA Experiment 20001451 PARAMETER Experiment Name: At_Far-red-induction_P Parameter: Tissue Value: Whole Plant
  misc_feature: MA Experiment ID: 20001554 Result: Up-regulated in Transcription
  misc_feature: MA Experiment 20001554 PARAMETER Experiment Name: At_Drought_Soil_Dry_P Parameter: Age (day) Value: 21
  misc_feature: MA Experiment 20001554 PARAMETER Experiment Name: At_Drought_Soil_Dry_P Parameter: Organism Value: A. thaliana
  misc_feature: MA Experiment 20001554 PARAMETER Experiment Name: At_Drought_Soil_Dry_P Parameter: Plant Line Value: WS
  misc_feature: MA Experiment 20001554 PARAMETER Experiment Name: At_Drought_Soil_Dry_P Parameter: Post Timepoint (hr) Value: None
  misc_feature: MA Experiment 20001554 PARAMETER Experiment Name: At_Drought_Soil_Dry_P Parameter: Post-Treatment Value: None
  misc_feature: MA Experiment 20001554 PARAMETER Experiment Name: At_Drought_Soil_Dry_P Parameter: Timepoint (day) Value: 7
  misc_feature: MA Experiment 20001554 PARAMETER Experiment Name: At_Drought_Soil_Dry_P Parameter: Treatment Value: Drought vs. No Drought
  misc_feature: MA Experiment ID: 20001555 Result: Up-regulated in Transcription
  misc_feature: MA Experiment 20001555 PARAMETER Experiment Name: At_Drought_Soil_Dry_P Parameter: Age (day) Value: 24
  misc_feature: MA Experiment 20001555 PARAMETER Experiment Name: At_Drought_Soil_Dry_P Parameter: Organism Value: A. thaliana
  misc_feature: MA Experiment 20001555 PARAMETER Experiment Name: At_Drought_Soil_Dry_P Parameter: Plant Line Value: WS
  misc_feature: MA Experiment 20001555 PARAMETER Experiment Name: At_Drought_Soil_Dry_P Parameter: Post Timepoint (hr) Value: None
  misc_feature: MA Experiment 20001555 PARAMETER Experiment Name: At_Drought_Soil_Dry_P Parameter: Post-Treatment Value: None
  misc_feature: MA Experiment 20001555 PARAMETER Experiment Name: At_Drought_Soil_Dry_P Parameter: Timepoint (day) Value: 10
  misc_feature: MA Experiment 20001555 PARAMETER Experiment Name: At_Drought_Soil_Dry_P Parameter: Treatment Value: Drought vs. No Drought
  misc_feature: MA Experiment ID: 20001559 Result: Up-regulated in Transcription
  misc_feature: MA Experiment 20001559 PARAMETER Experiment Name: At_Drought_Soil_Dry_P Parameter: Age (day) Value: 28
  misc_feature: MA Experiment 20001559 PARAMETER Experiment Name: At_Drought_Soil_Dry_P Parameter: Organism Value: A. thaliana
  misc_feature: MA Experiment 20001559 PARAMETER Experiment Name: At_Drought_Soil_Dry_P Parameter: Plant Line Value: WS
  misc_feature: MA Experiment 20001559 PARAMETER Experiment Name: At_Drought_Soil_Dry_P Parameter: Post Timepoint (hr) Value: 29
  misc_feature: MA Experiment 20001559 PARAMETER Experiment Name: At_Drought_Soil_Dry_P Parameter: Post-Treatment Value: Re-Water vs. No Drought
  misc_feature: MA Experiment 20001559 PARAMETER Experiment Name: At_Drought_Soil_Dry_P Parameter: Timepoint (day) Value: 14
  misc_feature: MA Experiment 20001559 PARAMETER Experiment Name: At_Drought_Soil_Dry_P Parameter: Treatment Value: Drought vs. No Drought
  misc_feature: MA Experiment ID: 20001904 Result: Up-regulated in Transcription
  misc_feature: MA Experiment 20001904 PARAMETER Experiment Name: At_Drought_Reproduction_P Parameter: Age (day) Value: 37
  misc_feature: MA Experiment 20001904 PARAMETER Experiment Name: At_Drought_Reproduction_P Parameter: Organism Value: A. thaliana
  misc_feature: MA Experiment 20001904 PARAMETER Experiment Name: At_Drought_Reproduction_P Parameter: Plant Line Value: WS
  misc_feature: MA Experiment 20001904 PARAMETER Experiment Name: At_Drought_Reproduction_P Parameter: Timepoint (day) Value: 7
  misc_feature: MA Experiment 20001904 PARAMETER Experiment Name: At_Drought_Reproduction_P Parameter: Tissue Value: Rosettes
  misc_feature: MA Experiment 20001904 PARAMETER Experiment Name: At_Drought_Reproduction_P Parameter: Treatment Value: Drought vs. No Drought
  misc_feature: MA Experiment ID: 20001905 Result: Up-regulated in Transcription
  misc_feature: MA Experiment 20001905 PARAMETER Experiment Name: At_Drought_Reproduction_P Parameter: Age (day) Value: 40
  misc_feature: MA Experiment 20001905 PARAMETER Experiment Name: At_Drought_Reproduction_P Parameter: Organism Value: A. thaliana
  misc_feature: MA Experiment 20001905 PARAMETER Experiment Name: At_Drought_Reproduction_P Parameter: Plant Line Value: WS
  misc_feature: MA Experiment 20001905 PARAMETER Experiment Name: At_Drought_Reproduction_P Parameter: Timepoint (day) Value: 10
  misc_feature: MA Experiment 20001905 PARAMETER Experiment Name: At_Drought_Reproduction_P Parameter: Tissue Value: Rosettes
  misc_feature: MA Experiment 20001905 PARAMETER Experiment Name: At_Drought_Reproduction_P Parameter: Treatment Value: Drought vs. No Drought
  misc_feature: MA Experiment ID: 20001911 Result: Up-regulated in Transcription
  misc_feature: MA Experiment 20001911 PARAMETER Experiment Name: At_Drought_Reproduction_P Parameter: Age (day) Value: 40
  misc_feature: MA Experiment 20001911 PARAMETER Experiment Name: At_Drought_Reproduction_P Parameter: Organism Value: A. thaliana
  misc_feature: MA Experiment 20001911 PARAMETER Experiment Name: At_Drought_Reproduction_P Parameter: Plant Line Value: WS
  misc_feature: MA Experiment 20001911 PARAMETER Experiment Name: At_Drought_Reproduction_P Parameter: Timepoint (day) Value: 10
  misc_feature: MA Experiment 20001911 PARAMETER Experiment Name: At_Drought_Reproduction_P Parameter: Tissue Value: Flowers
  misc_feature: MA Experiment 20001911 PARAMETER Experiment Name: At_Drought_Reproduction_P Parameter: Treatment Value: Drought vs. No Drought
atggtgatgacacatttttcacgtctccgacaacttcttcttctccaacccaaattcctctcttctcaacctcgtcctctccgttctcctcctccaacatttctccgatcagtgatgggttcgtcttcttctttctcctcttcttcctcgaagcttctctttcgtcaactctttgagaacgaatcttccacctttacttatcttctcgccgacgtttctcatcctgataaacctgctttgttgattgatccggtggacaagactgtggatagagacttgaaactgattgatgagttaggactaaagcttatctatgctatgaacactcatgttcatgctgatcatgtcactggtactggacttcttaagacgaagctcccgggtgtgaaatccgttatttcgaaagcaagtggttccaaagctgatttgtttcttgaacctggtgacaaagtatctattggtgatatataccttgaggttcgtgctacacctggacacactgcaggatgtgttacatatgtgactggtgaaggagctgatcagccccaaccaagaatggcttttaccggggatgctgtactcatccgtggttgtgggaggactgactttcaggaaggaagctcagatcaactctacgagtctgtacattcacagatatttacattgccaaaggacacattgatctatcctgctcacgactacaaaggtttcgaggtaagtacagttggagaagagatgcaacacaacccgcgtctaactaaagataaagaaacattcaaaaccattatgtcaaatctgaatctgtcgtatccgaagatgattgatgttgcagtaccagcaaatatggtctgtgggttacaagatgtgccttctcaagccaactaaaaaaaactcttacatataatgtttgtctttttatcgatgtcattctatatttaccaaagccaataaaaactcttgagagtaatttctacaataagatttgcttccgttgtagataagttcattagaaaattgtgtaaattagattgaacatgtggaatttgttatgaagatgaagacagtatttgcgtgttcgact

SEQ ID NO: 85749 - protein, 294 aa, Arabidopsis thaliana; identical to SEQ ID NO: 28788
  peptide (1)..(294): Ceres Seq. ID no. 12682937
  misc_feature (63)..(232): Pfam Name: Metallo-beta-lactamase superfamily Pfam Description: Metallo-beta-lactamase superfamily
  misc_feature (3)..(294): Homolog of NCBI NO: 25405648 NR Description: probable glyoxalase II, 78941-80643 [imported] -
  misc_feature (3)..(239): Homolog of NCBI NO: 8671869 NR Description: Contains similarity to an unknown glyoxalase II
  misc_feature (238)..(294): Homolog of NCBI NO: 8671869 NR Description: Contains similarity to an unknown glyoxalase II
  misc_feature (39)..(294): Homolog of NCBI NO: 18404530 NR Description: glyoxalase II, putative (hydroxyacylglutathione protein id: At1g53580.1, supported by cDNA: gi_15450394, by cDNA: gi_1644426, supported by cDNA: gi_16648756 [Arabidopsis
  misc_feature (39)..(294): Homolog of NCBI NO: 1644427 NR Description: glyoxalase II [Arabidopsis thaliana]
  misc_feature (32)..(290): Homolog of NCBI NO: 34910930 NR Description: putative glyoxalase II [Oryza sativa (japonica group)] >gi|20161580|dbj|BAB90501.1| putative glyoxalase II
  misc_feature (36)..(288): Homolog of NCBI NO: 27371293 NR Description: Similar to RIKEN cDNA 0610025L15 gene [Xenopus
  misc_feature (35)..(287): Homolog of NCBI NO: 14198377 NR Description: Similar to RIKEN cDNA 0610025L15 gene [Homo
  misc_feature (43)..(291): Homolog of NCBI NO: 12963539 NR Description: HSCO protein [Mus musculus] HSCO protein [Mus musculus] >gi|14714875|gb|AAH10592.1| RIKEN
  misc_feature (43)..(291): Homolog of NCBI NO: 27676450 NR Description: similar to HSCO protein [Mus musculus] [Rattus

SEQ ID NO: 85750 - protein, 292 aa, Arabidopsis thaliana; identical to SEQ ID NO: 28789
  peptide (1)..(292): Ceres Seq. ID no. 12682938
  misc_feature (61)..(230): Pfam Name: Metallo-beta-lactamase superfamily Pfam Description: Metallo-beta-lactamase superfamily
  misc_feature (1)..(292): Homolog of NCBI NO: 25405648 NR Description: probable glyoxalase II, 78941-80643 [imported] -
  misc_feature (1)..(237): Homolog of NCBI NO: 8671869 NR Description: Contains similarity to an unknown glyoxalase II
  misc_feature (236)..(292): Homolog of NCBI NO: 8671869 NR Description: Contains similarity to an unknown glyoxalase II
  misc_feature (37)..(292): Homolog of NCBI NO: 18404530 NR Description: glyoxalase II, putative (hydroxyacylglutathione protein id: At1g53580.1, supported by cDNA: gi_15450394, by cDNA: gi_1644426, supported by cDNA: gi_16648756 [Arabidopsis
  misc_feature (37)..(292): Homolog of NCBI NO: 1644427 NR Description: glyoxalase II [Arabidopsis thaliana]
  misc_feature (30)..(288): Homolog of NCBI NO: 34910930 NR Description: putative glyoxalase II [Oryza sativa (japonica group)] >gi|20161580|dbj|BAB90501.1| putative glyoxalase II
  misc_feature (34)..(286): Homolog of NCBI NO: 27371293 NR Description: Similar to RIKEN cDNA 0610025L15 gene [Xenopus
  misc_feature (33)..(285): Homolog of NCBI NO: 14198377 NR Description: Similar to RIKEN cDNA 0610025L15 gene [Homo
  misc_feature (41)..(289): Homolog of NCBI NO: 12963539 NR Description: HSCO protein [Mus musculus] HSCO protein [Mus musculus] >gi|14714875|gb|AAH10592.1| RIKEN
  misc_feature (41)..(289): Homolog of NCBI NO: 27676450 NR Description: similar to HSCO protein [Mus musculus] [Rattus

SEQ ID NO: 85751 - protein, 256 aa, Arabidopsis thaliana; identical to SEQ ID NO: 28790
  peptide (1)..(256): Ceres Seq. ID no. 12682939
  misc_feature (25)..(194): Pfam Name: Metallo-beta-lactamase superfamily Pfam Description: Metallo-beta-lactamase superfamily
  misc_feature (1)..(256): Homolog of NCBI NO: 25405648 NR Description: probable glyoxalase II, 78941-80643 [imported] -
  misc_feature (1)..(201): Homolog of NCBI NO: 8671869 NR Description: Contains similarity to an unknown glyoxalase II
  misc_feature (200)..(256): Homolog of NCBI NO: 8671869 NR Description: Contains similarity to an unknown glyoxalase II
  misc_feature (1)..(256): Homolog of NCBI NO: 18404530 NR Description: glyoxalase II, putative (hydroxyacylglutathione protein id: At1g53580.1, supported by cDNA: gi_15450394, by cDNA: gi_1644426, supported by cDNA: gi_16648756 [Arabidopsis
  misc_feature (1)..(256): Homolog of NCBI NO: 1644427 NR Description: glyoxalase II [Arabidopsis thaliana]
  misc_feature (1)..(252): Homolog of NCBI NO: 34910930 NR Description: putative glyoxalase II [Oryza sativa (japonica group)] >gi|20161580|dbj|BAB90501.1| putative glyoxalase II
  misc_feature (1)..(250): Homolog of NCBI NO: 27371293 NR Description: Similar to RIKEN cDNA 0610025L15 gene [Xenopus
  misc_feature (1)..(249): Homolog of NCBI NO: 14198377 NR Description: Similar to RIKEN cDNA 0610025L15 gene [Homo
  misc_feature (5)..(253): Homolog of NCBI NO: 12963539 NR Description: HSCO protein [Mus musculus] HSCO protein [Mus musculus] >gi|14714875|gb|AAH10592.1| RIKEN
  misc_feature (5)..(253): Homolog of NCBI NO: 27676450 NR Description: similar to HSCO protein [Mus musculus] [Rattus

SEQ ID NO: 85752 - DNA, 633 bp, Arabidopsis thaliana
  misc_feature (1)..(633): Ceres Seq. ID no. 12682961
  misc_feature: MA Experiment ID: 108434 Result: Down-regulated in Transcription
  misc_feature: MA Experiment 108434 PARAMETER Experiment Name: At_Root_Tips_cDNA_P Parameter: Tissue Value: Root Tips
  misc_feature: MA Experiment ID: 108435 Result: Down-regulated in Transcription
  misc_feature: MA Experiment 108435 PARAMETER Experiment Name: At_stm_Mutants_cDNA_P Parameter: Plant Line Value: wt Landsburg vs stm
  misc_feature: MA Experiment 108435 PARAMETER Experiment Name: At_stm_Mutants_cDNA_P Parameter: Tissue Value: Shoot Apical Meristem Region
  misc_feature: MA Experiment ID: 108462 Result: Up-regulated in Transcription
  misc_feature: MA Experiment 108462 PARAMETER Experiment Name: At_Germinating_Seeds_cDNA_P Parameter: Age (day) Value: 2 vs. 0
  misc_feature: MA Experiment 108462 PARAMETER Experiment Name: At_Germinating_Seeds_cDNA_P Parameter: Tissue Value: Germinating Seeds
  misc_feature: MA Experiment ID: 108463 Result: Up-regulated in Transcription
  misc_feature: MA Experiment 108463 PARAMETER Experiment Name: At_Germinating_Seeds_cDNA_P Parameter: Age (day) Value: 3 vs. 0
  misc_feature: MA Experiment 108463 PARAMETER Experiment Name: At_Germinating_Seeds_cDNA_P Parameter: Tissue Value: Germinating Seeds
  misc_feature: MA Experiment ID: 108464 Result: Up-regulated in Transcription
  misc_feature: MA Experiment 108464 PARAMETER Experiment Name: At_Germinating_Seeds_cDNA_P Parameter: Age (day) Value: 4 vs. 0
  misc_feature: MA Experiment 108464 PARAMETER Experiment Name: At_Germinating_Seeds_cDNA_P Parameter: Tissue Value: Germinating Seeds
  misc_feature: MA Experiment ID: 108577 Result: Up-regulated in Transcription
  misc_feature: MA Experiment 108577 PARAMETER Experiment Name: At_42deg_Heat_cDNA_P Parameter: Temperature (deg C) Value: 42 vs. 22
  misc_feature: MA Experiment 108577 PARAMETER Experiment Name: At_42deg_Heat_cDNA_P Parameter: Timepoint (hr) Value: 6
  misc_feature: MA Experiment 108577 PARAMETER Experiment Name: At_42deg_Heat_cDNA_P Parameter: Tissue Value: Aerial
  misc_feature: MA Experiment ID: 108594 Result: Down-regulated in Transcription
  misc_feature: MA Experiment 108594 PARAMETER Experiment Name: At_Ler-rhl_Root_cDNA_P Parameter: Plant Line Value: null
  misc_feature: MA Experiment ID: 108595 Result: Down-regulated in Transcription
  misc_feature: MA Experiment 108595 PARAMETER Experiment Name: At_Ler-pi_Ovule_cDNA_P Parameter: Plant Line Value: null
  misc_feature: MA Experiment ID: 20000090 Result: Down-regulated in Transcription
  misc_feature: MA Experiment ID: 20000111 Result: Up-regulated in Transcription
  misc_feature: MA Experiment 20000111 PARAMETER Experiment Name: At_42deg_Heat_cDNA_P Parameter: Temperature (deg C) Value: 42 vs. 22
  misc_feature: MA Experiment 20000111 PARAMETER Experiment Name: At_42deg_Heat_cDNA_P Parameter: Timepoint (hr) Value: 6
  misc_feature: MA Experiment 20000111 PARAMETER Experiment Name: At_42deg_Heat_cDNA_P Parameter: Tissue Value: Aerial
  misc_feature: MA Experiment ID: 20000113 Result: Up-regulated in Transcription
  misc_feature: MA Experiment 20000113 PARAMETER Experiment Name: At_42deg_Heat_cDNA_P Parameter: Temperature (deg C) Value: 42 vs. 22
  misc_feature: MA Experiment 20000113 PARAMETER Experiment Name: At_42deg_Heat_cDNA_P Parameter: Timepoint (hr) Value: 8
  misc_feature: MA Experiment 20000113 PARAMETER Experiment Name: At_42deg_Heat_cDNA_P Parameter: Tissue Value: Aerial
atggcttcttctactagattaactattatacaatcaagcttcgtctccgcaagaacaagactcaattacgtctccaagacaaatcattctgggttcgcttgtcgttctctttcaaaacccagaaacttgagtctctctgtttattctatgggttcttctagttcttctccgaaaccagacaacgtccaagaggctgagaagaatgagtttgcttctctaagtgaaaatgaatggaagaaacggctaacaccagaacagtactacatcactagacagaagggcacagagagagctttcactggggagtattggaactcaaagacccctggagtatataattgtgtatgttgcgacacacctctatttgattcatcaacaaagtttgatagtggaacagggtggccatcttactaccaaccaattggaaacaatgtgaagacaaagctagacctctctatcatcttcatgcctagacaagaagttgtctgtgctgtttgtaacgcccatcttggtcatgtctttgacgacggtccacgcccaaccggaaaacgatattgcctcaacaggtttatcattcatcctgatctatttattaaatttgcaaaaagagtatcagaacatcgttacttgtga

SEQ ID NO: 85753 - protein, 210 aa, Arabidopsis thaliana
  peptide (1)..(210): Ceres Seq. ID no. 12682962
  misc_feature (75)..(188): Pfam Name: SelR domain Pfam Description: SelR domain
  misc_feature (1)..(188): Homolog of NCBI NO: 30695559 NR Description: transcriptional regulator -related [Arabidopsis
  misc_feature (50)..(188): Homolog of NCBI NO: 21593253 NR Description: transcriptional regulator, putative [Arabidopsis >gi|26449723|dbj|BAC41985.1| putative transcriptional regulator
  misc_feature (74)..(188): Homolog of NCBI NO: 22298757 NR Description: ORF_ID:tlr1214~hypothetical protein
  misc_feature (74)..(188): Homolog of NCBI NO: 37523588 NR Description: hypothetical protein gll4019 [Gloeobacter
  misc_feature (74)..(188): Homolog of NCBI NO: 23040381 NR Description: hypothetical protein [Trichodesmium erythraeum
  misc_feature (74)..(188): Homolog of NCBI NO: 33597872 NR Description: peptide methionine sulfoxide reductase parapertussis] >gi|33602775|ref|NP_890335.1| peptide methionine reductase [Bordetella bronchiseptica]
  misc_feature (74)..(188): Homolog of NCBI NO: 33594433 NR Description: peptide methionine sulfoxide reductase pertussis] >gi|33564508|emb|CAE43823.1| peptide methionine
  misc_feature (35)..(188): Homolog of NCBI NO: 37620216 NR Description: hypothetical protein LOC253827 [Homo sapiens]
  misc_feature (74)..(188): Homolog of NCBI NO: 39997546 NR Description: PilB-related protein [Geobacter sulfurreducens
  misc_feature (77)..(188): Homolog of NCBI NO: 23472103 NR Description: hypothetical protein [Pseudomonas syringae pv.
MASSTRLTIIQSSFVSARTRLNYVSKTNHSGFACRSLSKPRNLSLSVYSMGSSSSSPKPDNVQEAEKNEFASLSENEWKKRLTPEQYYITRQKGTERAFTGEYWNSKTPGVYNCVCCDTPLFDSSTKFDSGTGWPSYYQPIGNNVKTKLDLSIIFMPRQEVVCAVCNAHLGHVFDDGPRPTGKRYCLNRFIIHPDLFIKFAKRVSEHRYL

SEQ ID NO: 85754 - protein, 161 aa, Arabidopsis thaliana
  peptide (1)..(161): Ceres Seq. ID no. 12682963
  misc_feature (26)..(139): Pfam Name: SelR domain Pfam Description: SelR domain
  misc_feature (1)..(139): Homolog of NCBI NO: 30695559 NR Description: transcriptional regulator -related [Arabidopsis
  misc_feature (1)..(139): Homolog of NCBI NO: 21593253 NR Description: transcriptional regulator, putative [Arabidopsis >gi|26449723|dbj|BAC41985.1| putative transcriptional regulator
  misc_feature (25)..(139): Homolog of NCBI NO: 22298757 NR Description: ORF_ID:tlr1214~hypothetical protein
  misc_feature (25)..(139): Homolog of NCBI NO: 37523588 NR Description: hypothetical protein gll4019 [Gloeobacter
  misc_feature (25)..(139): Homolog of NCBI NO: 23040381 NR Description: hypothetical protein [Trichodesmium erythraeum
  misc_feature (25)..(139): Homolog of NCBI NO: 33597872 NR Description: peptide methionine sulfoxide reductase parapertussis] >gi|33602775|ref|NP_890335.1| peptide methionine reductase [Bordetella bronchiseptica]
  misc_feature (25)..(139): Homolog of NCBI NO: 33594433 NR Description: peptide methionine sulfoxide reductase pertussis] >gi|33564508|emb|CAE43823.1| peptide methionine
  misc_feature (1)..(139): Homolog of NCBI NO: 37620216 NR Description: hypothetical protein LOC253827 [Homo sapiens]
  misc_feature (25)..(139): Homolog of NCBI NO: 39997546 NR Description: PilB-related protein [Geobacter sulfurreducens
  misc_feature (28)..(139): Homolog of NCBI NO: 23472103 NR Description: hypothetical protein [Pseudomonas syringae pv.
MGSSSSSPKPDNVQEAEKNEFASLSENEWKKRLTPEQYYITRQKGTERAFTGEYWNSKTPGVYNCVCCDTPLFDSSTKFDSGTGWPSYYQPIGNNVKTKLDLSIIFMPRQEVVCAVCNAHLGHVFDDGPRPTGKRYCLNRFIIHPDLFIKFAKRVSEHRYL

SEQ ID NO: 85755 - DNA, 1929 bp, Arabidopsis thaliana
  misc_feature (1)..(1929): Ceres Seq. ID no. 12682973
  misc_feature: MA Experiment ID: 20000171 Result: Up-regulated in Transcription
  misc_feature: MA Experiment 20000171 PARAMETER Experiment Name: At_42deg_Heat_P Parameter: Age (day) Value: 14
  misc_feature: MA Experiment 20000171 PARAMETER Experiment Name: At_42deg_Heat_P Parameter: Organism Value: A. thaliana
  misc_feature: MA Experiment 20000171 PARAMETER Experiment Name: At_42deg_Heat_P Parameter: Plant Line Value: WS
  misc_feature: MA Experiment 20000171 PARAMETER Experiment Name: At_42deg_Heat_P Parameter: Temperature (deg C) Value: 42 vs. 22
  misc_feature: MA Experiment 20000171 PARAMETER Experiment Name: At_42deg_Heat_P Parameter: Timepoint (hr) Value: 1
  misc_feature: MA Experiment 20000171 PARAMETER Experiment Name: At_42deg_Heat_P Parameter: Tissue Value: Aerial
  misc_feature: MA Experiment ID: 20000173 Result: Up-regulated in Transcription
  misc_feature: MA Experiment 20000173 PARAMETER Experiment Name: At_42deg_Heat_P Parameter: Age (day) Value: 14
  misc_feature: MA Experiment 20000173 PARAMETER Experiment Name: At_42deg_Heat_P Parameter: Organism Value: A. thaliana
  misc_feature: MA Experiment 20000173 PARAMETER Experiment Name: At_42deg_Heat_P Parameter: Plant Line Value: WS
  misc_feature: MA Experiment 20000173 PARAMETER Experiment Name: At_42deg_Heat_P Parameter: Temperature (deg C) Value: 42 vs. 22
  misc_feature: MA Experiment 20000173 PARAMETER Experiment Name: At_42deg_Heat_P Parameter: Timepoint (hr) Value: 6
  misc_feature: MA Experiment 20000173 PARAMETER Experiment Name: At_42deg_Heat_P Parameter: Tissue Value: Aerial
  misc_feature: MA Experiment ID: 20000439 Result: Up-regulated in Transcription
  misc_feature: MA Experiment 20000439 PARAMETER Experiment Name: At_Roots__P Parameter: Age (day) Value: 14 vs. 21
  misc_feature: MA Experiment 20000439 PARAMETER Experiment Name: At_Roots__P Parameter: Organism Value: A. thaliana
  misc_feature: MA Experiment 20000439 PARAMETER Experiment Name: At_Roots__P Parameter: Tissue Value: Roots vs. Whole Plant
  misc_feature: MA Experiment ID: 20001558 Result: Up-regulated in Transcription
  misc_feature: MA Experiment 20001558 PARAMETER Experiment Name: At_Drought_Soil_Dry_P Parameter: Age (day) Value: 27
  misc_feature: MA Experiment 20001558 PARAMETER Experiment Name: At_Drought_Soil_Dry_P Parameter: Organism Value: A. thaliana
  misc_feature: MA Experiment 20001558 PARAMETER Experiment Name: At_Drought_Soil_Dry_P Parameter: Plant Line Value: WS
  misc_feature: MA Experiment 20001558 PARAMETER Experiment Name: At_Drought_Soil_Dry_P Parameter: Post Timepoint (hr) Value: 6
  misc_feature: MA Experiment 20001558 PARAMETER Experiment Name: At_Drought_Soil_Dry_P Parameter: Post-Treatment Value: Re-Water vs. No Drought
  misc_feature: MA Experiment 20001558 PARAMETER Experiment Name: At_Drought_Soil_Dry_P Parameter: Timepoint (day) Value: 13
  misc_feature: MA Experiment 20001558 PARAMETER Experiment Name: At_Drought_Soil_Dry_P Parameter: Treatment Value: Drought vs. No Drought
  misc_feature: MA Experiment ID: 20001906 Result: Down-regulated in Transcription
  misc_feature: MA Experiment 20001906 PARAMETER Experiment Name: At_Drought_Reproduction_P Parameter: Age (day) Value: 35
  misc_feature: MA Experiment 20001906 PARAMETER Experiment Name: At_Drought_Reproduction_P Parameter: Organism Value: A. thaliana
  misc_feature: MA Experiment 20001906 PARAMETER Experiment Name: At_Drought_Reproduction_P Parameter: Plant Line Value: WS
  misc_feature: MA Experiment 20001906 PARAMETER Experiment Name: At_Drought_Reproduction_P Parameter: Timepoint (day) Value: 5
  misc_feature: MA Experiment 20001906 PARAMETER Experiment Name: At_Drought_Reproduction_P Parameter: Tissue Value: Siliques
  misc_feature: MA Experiment 20001906 PARAMETER Experiment Name: At_Drought_Reproduction_P Parameter: Treatment Value: Drought vs. No Drought
atgagggagaattgggcggtggtggctctgtttacactatgcattgtagggtttgagcttagattcatccatggagctactgatgcatcagacacttcagcattgaacacattgttcagtggtatgcattctccagctcagctaacacaatggactgcagcagctggtgatccttgtggccagaattggagaggcgtcacttgttccggctcacgagttactcaaataaagttgtcaggtcttgagctctctggaactcttggaggatacatgcttgataaattgacttctcttaccgagcttgatctaagcagcaataatcttggaggtgatttaccatatcagtttcctccaaatctgcaacgattgaaccttgcgaataatcaattcactggagctgcttcgtactcactttctcagattacaccacttaagtatctcaatcttggtcacaatcagtttaaggggcagatagctatcgacttctccaagctcgactctctcacaaccttggacttctctttcaattctttcacgaactctttaccggcaacgttttcctctctaacaagtttaaaatcactataccttcagaacaatcagttctcaggcacagtcgatgtcttagccggtcttcctcttgagactctgaacattgcgaacaatgacttcacggggtggatccccagttctttaaagggcatcacattaataagaaaaaaatcaaagaggtcatcacccatggacattgagaaaaccgataaccagcctttcactcttgcttcaaacgactttcacgaaaacaattccattcagagttcttcatcagttgagacaaagaaactggacacttcattgtctattaatcttcgacctccaccaattgatagaaacaaatcatttgatgatgaagattcgacaagaaagcctattgctgtcaagaaatccacagtggtggttccttcaaatgtgagactctattcagttgcagatctccaaattgctactggcagtttcagcgtagataatcttcttggagaagggacttttggacgagtatacagagctgagtttgatgatggaaaggttcttgctgtgaagaaaattgattcgtctgctctcccacatggcatgaccgatgatttcattgaaatggtatcgaaaatagccaatttggatcatccaaatgtgaccaagcttgttggttactgtgctgagcacggacaacatctcgtggtctatgaattccacaaaaatggatcattacatgacttcttacacttatcagaagaggaaagtaaagcattggtgtggaattcacgagtcaagatcgctcttgggactgcacgcgcattggagtatctgcatgaagtttgctcaccgtctatagtggacaagaatatcaaatcagctaatattttactcgattcagagctgaatcctcacttatcagattctggtctcgcaagcttccttcccacagctaatgagttattaaaccaaaccgatgaagggtatagcgcacctgaagtatcaatgtcaggccaatattctttgaagagtgacatttacagttttggagtagtgatgcttgaacttttaactgggagaaaaccatttgacagcacaaggtcaagatctgagcagtcactggttcgatgggcgacaccacaacttcacgacattgatgctttagccaaaatggttgatccagctcttaaagggctttatcctgtcaaatccctttctcgatttgcagatgttatcgctctctgtgtccagccggagccggagtttagaccaccaatgtctgaagttgtgcaggctctagttgtgttagtgcagagagctaacatgagcaagagaactgtcggagttgatccatcgcaacgtgctggtagtgccgacacgaccagtgattacatgtaa

SEQ ID NO: 85756 - protein, 642 aa, Arabidopsis thaliana
  peptide (1)..(642): Ceres Seq. ID no. 12682974
  misc_feature (237)..(636): Homolog of NCBI NO: 7489783 NR Description: leucine-rich repeat transmembrane protein kinase
  misc_feature (28)..(276): Homolog of NCBI NO: 7489783 NR Description: leucine-rich repeat transmembrane protein kinase
  misc_feature (231)..(641): Homolog of NCBI NO: 30017524 NR Description: putative leucine-rich repeat transmembrane
  misc_feature (27)..(257): Homolog of NCBI NO: 30017524 NR Description: putative leucine-rich repeat transmembrane
  misc_feature (94)..(642): Homolog of NCBI NO: 30683104 NR Description: leucine-rich repeat transmembrane protein kinase, [Arabidopsis thaliana] >gi|9279582|dbj|BAB01040.1|
  misc_feature (362)..(636): Homolog of NCBI NO: 37533916 NR Description: putative leucine-rich repeat transmembrane
  misc_feature (5)..(227): Homolog of NCBI NO: 37533916 NR Description: putative leucine-rich repeat transmembrane
  misc_feature (69)..(642): Homolog of NCBI NO: 15217283 NR Description: Putative leucine-rich repeat transmembrane
  misc_feature (74)..(636): Homolog of NCBI NO: 29367551 NR Description: putative leucine-rich repeat transmembrane
  misc_feature (55)..(636): Homolog of NCBI NO: 7489784 NR Description: leucine-rich repeat transmembrane protein kinase
MRENWAVVALFTLCIVGFELRFIHGATDASDTSALNTLFSGMHSPAQLTQWTAAAGDPCGQNWRGVTCSGSRVTQIKLSGLELSGTLGGYMLDKLTSLTELDLSSNNLGGDLPYQFPPNLQRLNLANNQFTGAASYSLSQITPLKYLNLGHNQFKGQIAIDFSKLDSLTTLDFSFNSFTNSLPATFSSLTSLKSLYLQNNQFSGTVDVLAGLPLETLNIANNDFTGWIPSSLKGITLIRKKSKRSSPMDIEKTDNQPFTLASNDFHENNSIQSSSSVETKKLDTSLSINLRPPPIDRNKSFDDEDSTRKPIAVKKSTVVVPSNVRLYSVADLQIATGSFSVDNLLGEGTFGRVYRAEFDDGKVLAVKKIDSSALPHGMTDDFIEMVSKIANLDHPNVTKLVGYCAEHGQHLVVYEFHKNGSLHDFLHLSEEESKALVWNSRVKIALGTARALEYLHEVCSPSIVDKNIKSANILLDSELNPHLSDSGLASFLPTANELLNQTDEGYSAPEVSMSGQYSLKSDIYSFGVVMLELLTGRKPFDSTRSRSEQSLVRWATPQLHDIDALAKMVDPALKGLYPVKSLSRFADVIALCVQPEPEFRPPMSEVVQALVVLVQRANMSKRTVGVDPSQRAGSADTTSDYM

SEQ ID NO: 85757 - protein, 601 aa, Arabidopsis thaliana
  peptide (1)..(601): Ceres Seq. ID no. 12682975
  misc_feature (196)..(595): Homolog of NCBI NO: 7489783 NR Description: leucine-rich repeat transmembrane protein kinase
  misc_feature (1)..(235): Homolog of NCBI NO: 7489783 NR Description: leucine-rich repeat transmembrane protein kinase
  misc_feature (190)..(600): Homolog of NCBI NO: 30017524 NR Description: putative leucine-rich repeat transmembrane
  misc_feature (1)..(216): Homolog of NCBI NO: 30017524 NR Description: putative leucine-rich repeat transmembrane
  misc_feature (53)..(601): Homolog of NCBI NO: 30683104 NR Description: leucine-rich repeat transmembrane protein kinase, [Arabidopsis thaliana] >gi|9279582|dbj|BAB01040.1|
  misc_feature (321)..(595): Homolog of NCBI NO: 37533916 NR Description: putative leucine-rich repeat transmembrane
  misc_feature (1)..(186): Homolog of NCBI NO: 37533916 NR Description: putative leucine-rich repeat transmembrane
  misc_feature (28)..(601): Homolog of NCBI NO: 15217283 NR Description: Putative leucine-rich repeat transmembrane
  misc_feature (33)..(595): Homolog of NCBI NO: 29367551 NR Description: putative leucine-rich repeat transmembrane
  misc_feature (14)..(595): Homolog of NCBI NO: 7489784 NR Description: leucine-rich repeat transmembrane protein kinase
MHSPAQLTQWTAAAGDPCGQNWRGVTCSGSRVTQIKLSGLELSGTLGGYMLDKLTSLTELDLSSNNLGGDLPYQFPPNLQRLNLANNQFTGAASYSLSQITPLKYLNLGHNQFKGQIAIDFSKLDSLTTLDFSFNSFTNSLPATFSSLTSLKSLYLQNNQFSGTVDVLAGLPLETLNIANNDFTGWIPSSLKGITLIRKKSKRSSPMDIEKTDNQPFTLASNDFHENNSIQSSSSVETKKLDTSLSINLRPPPIDRNKSFDDEDSTRKPIAVKKSTVVVPSNVRLYSVADLQIATGSFSVDNLLGEGTFGRVYRAEFDDGKVLAVKKIDSSALPHGMTDDFIEMVSKIANLDHPNVTKLVGYCAEHGQHLVVYEFHKNGSLHDFLHLSEEESKALVWNSRVKIALGTARALEYLHEVCSPSIVDKNIKSANILLDSELNPHLSDSGLASFLPTANELLNQTDEGYSAPEVSMSGQYSLKSDIYSFGVVMLELLTGRKPFDSTRSRSEQSLVRWATPQLHDIDALAKMVDPALKGLYPVKSLSRFADVIALCVQPEPEFRPPMSEVVQALVVLVQRANMSKRTVGVDPSQRAGSADTTSDYM

SEQ ID NO: 85758 - protein, 552 aa, Arabidopsis thaliana
  peptide (1)..(552): Ceres Seq. ID no. 12682976
  misc_feature (147)..(546): Homolog of NCBI NO: 7489783 NR Description: leucine-rich repeat transmembrane protein kinase
  misc_feature (1)..(186): Homolog of NCBI NO: 7489783 NR Description: leucine-rich repeat transmembrane protein kinase
  misc_feature (141)..(551): Homolog of NCBI NO: 30017524 NR Description: putative leucine-rich repeat transmembrane
  misc_feature (1)..(167): Homolog of NCBI NO: 30017524 NR Description: putative leucine-rich repeat transmembrane
  misc_feature (4)..(552): Homolog of NCBI NO: 30683104 NR Description: leucine-rich repeat transmembrane protein kinase, [Arabidopsis thaliana] >gi|9279582|dbj|BAB01040.1|
  misc_feature (272)..(546): Homolog of NCBI NO: 37533916 NR Description: putative leucine-rich repeat transmembrane
  misc_feature (1)..(137): Homolog of NCBI NO: 37533916 NR Description: putative leucine-rich repeat transmembrane
  misc_feature (1)..(552): Homolog of NCBI NO: 15217283 NR Description: Putative leucine-rich repeat transmembrane
  misc_feature (1)..(546): Homolog of NCBI NO: 29367551 NR Description: putative leucine-rich repeat transmembrane
  misc_feature (1)..(546): Homolog of NCBI NO: 7489784 NR Description: leucine-rich repeat transmembrane protein kinase
MLDKLTSLTELDLSSNNLGGDLPYQFPPNLQRLNLANNQFTGAASYSLSQITPLKYLNLGHNQFKGQIAIDFSKLDSLTTLDFSFNSFTNSLPATFSSLTSLKSLYLQNNQFSGTVDVLAGLPLETLNIANNDFTGWIPSSLKGITLIRKKSKRSSPMDIEKTDNQPFTLASNDFHENNSIQSSSSVETKKLDTSLSINLRPPPIDRNKSFDDEDSTRKPIAVKKSTVVVPSNVRLYSVADLQIATGSFSVDNLLGEGTFGRVYRAEFDDGKVLAVKKIDSSALPHGMTDDFIEMVSKIANLDHPNVTKLVGYCAEHGQHLVVYEFHKNGSLHDFLHLSEEESKALVWNSRVKIALGTARALEYLHEVCSPSIVDKNIKSANILLDSELNPHLSDSGLASFLPTANELLNQTDEGYSAPEVSMSGQYSLKSDIYSFGVVMLELLTGRKPFDSTRSRSEQSLVRWATPQLHDIDALAKMVDPALKGLYPVKSLSRFADVIALCVQPEPEFRPPMSEVVQALVVLVQRANMSKRTVGVDPSQRAGSADTTSDYM

SEQ ID NO: 85759 - DNA, 1581 bp, Arabidopsis thaliana
  misc_feature (1)..(1581): Ceres Seq. ID no. 12682977
  misc_feature: MA Experiment ID: 108461 Result: Down-regulated in Transcription
  misc_feature: MA Experiment 108461 PARAMETER Experiment Name: At_Germinating_Seeds_cDNA_P Parameter: Age (day) Value: 1 vs. 0
  misc_feature: MA Experiment 108461 PARAMETER Experiment Name: At_Germinating_Seeds_cDNA_P Parameter: Tissue Value: Germinating Seeds
  misc_feature: MA Experiment ID: 108462 Result: Down-regulated in Transcription
  misc_feature: MA Experiment 108462 PARAMETER Experiment Name: At_Germinating_Seeds_cDNA_P Parameter: Age (day) Value: 2 vs. 0
  misc_feature: MA Experiment 108462 PARAMETER Experiment Name: At_Germinating_Seeds_cDNA_P Parameter: Tissue Value: Germinating Seeds
  misc_feature: MA Experiment ID: 108463 Result: Down-regulated in Transcription
  misc_feature: MA Experiment 108463 PARAMETER Experiment Name: At_Germinating_Seeds_cDNA_P Parameter: Age (day) Value: 3 vs. 0
  misc_feature: MA Experiment 108463 PARAMETER Experiment Name: At_Germinating_Seeds_cDNA_P Parameter: Tissue Value: Germinating Seeds
  misc_feature: MA Experiment ID: 108573 Result: Up-regulated in Transcription
  misc_feature: MA Experiment 108573 PARAMETER Experiment Name: At_Drought_cDNA_P Parameter: Timepoint (hr) Value: 6
  misc_feature: MA Experiment 108573 PARAMETER Experiment Name: At_Drought_cDNA_P Parameter: Tissue Value: Aerial
  misc_feature: MA Experiment 108573 PARAMETER Experiment Name: At_Drought_cDNA_P Parameter: Treatment Value: Drought vs. No Drought
  misc_feature: MA Experiment ID: 108585 Result: Up-regulated in Transcription
  misc_feature: MA Experiment 108585 PARAMETER Experiment Name: At_5mM_NaNP_cDNA_P Parameter: Timepoint (hr) Value: 6
  misc_feature: MA Experiment 108585 PARAMETER Experiment Name: At_5mM_NaNP_cDNA_P Parameter: Tissue Value: Aerial
  misc_feature: MA Experiment 108585 PARAMETER Experiment Name: At_5mM_NaNP_cDNA_P Parameter: Treatment Value: null
  misc_feature: MA Experiment ID: 20000179 Result: Down-regulated in Transcription
  misc_feature: MA Experiment 20000179 PARAMETER Experiment Name: At_Germinating_Seeds_P Parameter: Age (hr) Value: 6 vs. 0
  misc_feature: MA Experiment 20000179 PARAMETER Experiment Name: At_Germinating_Seeds_P Parameter: Tissue Value: Germinating Seeds
aaattagaacttctttaccctttcgagaaaaaagaaaagaaaaaagaacttgttttcctcttcagcaagacacataaatcgtaatccattttctctcaactttaggaatctcaaatctccgatttggaaatccggcgacaatggtgagagatattgaagatgagattagagacgagaagaatcctcgtcctcttgatgaagatgatatcgctctcctcaagacttatgggttagggccttactctgcacctatcaagaaagtggagaaagaaattaaggatctcgccaagaagatcaacgatctatgtggtatcaaggagtctgatactggtttagctcctcccagtcaatgggatcttgtatctgataagcaaatgatgcaagaagagcaacctctgcaggttgcgagatgcacaaagattataagtccaaacactgaagacgccaaatacgtcataaatgtcaaacaaattgctaagtttgttgttggacttggcgataaagtttctcccactgatattgaggaaggcatgcgtgttggagttgatcggaataaatatcagattcagattcctctacctcccaaaatcgatcctagcgtgaccatgatgactgtcgaagagaaacctgatgtaacttacaatgatgttggtggatgcaaggagcagattgagaagatgcgagaggttgttgaactgccaatgcttcatccagagaaatttgtgaagcttggaatagatcctcccaagggtgttctctgctacggacctcctggtactggtaaaactcttctggctagagctgtggccaacagaaccgatgcttgctttatcagggttattggaagtgagcttgttcagaagtatgttggtgaaggagctaggatggttcgtgaactgtttcagatggcacggtccaagaaagcctgcattgtgttctttgacgaagttgatgccattggtggtgcaagatttgatgatggtgttggtggtgataacgaagtccaacgtactatgcttgagattgtgaatcagcttgatgggtttgacgcacgtggtaacatcaaggttcttatggcaacaaacaggcctgacacactagacccagctcttttacgtcctggacgtcttgaccgtaaggttgagtttggtctacctgacctggagagcagaacacagatcttcaagattcacacaagaaccatgaactgcgaaagagacatccgtttcgaactccttgctcgcctctgcccaaactcaacgggagctgatattcgaagtgtatgcactgaagcaggaatgtacgcaatcagagctaggagaaagactgtgactgagaaagactttctagacgcagtgaacaaagtcattaaaggttaccaaaagttcagtgccactcccaagtatatggtctacaattagagagattgagacagatagaagaactccgaaataaaactccgaaacactctttgttctttgtttgtgtctcttcccttcaagctcttttgtagtacttgtttcacaacttattccagtaactcgggtttatcttcttcaatgtctactacttttggattca

SEQ ID NO: 85760 - protein, 426 aa, Arabidopsis thaliana; identical to SEQ ID NO: 23448
  peptide (1)..(426): Ceres Seq. ID no. 12682978
  misc_feature (204)..(391): Pfam Name: ATPase family associated with various cellular Pfam Description: ATPase family associated with various cellular
  misc_feature (1)..(426): Homolog of NCBI NO: 15220930 NR Description: 26S proteasome AAA-ATPase subunit RPT1a; protein At1g53750.1, supported by cDNA: 36419., supported by cDNA: supported by cDNA: gi_6652877 [Arabidopsis thaliana] (26S
  misc_feature (1)..(426): Homolog of NCBI NO: 6652878 NR Description: 26S proteasome AAA-ATPase subunit RPT1a
  misc_feature (1)..(426): Homolog of NCBI NO: 28558165 NR Description: 26S protease regulatory subunit 7 (26S proteasome
  misc_feature (1)..(426): Homolog of NCBI NO: 2492519 NR Description: 26S protease regulatory subunit 7 (26S proteasome
  misc_feature (7)..(426): Homolog of NCBI NO: 3914449 NR Description: 26S protease regulatory subunit 7 (26S proteasome
  misc_feature (33)..(425): Homolog of NCBI NO: 15220933 NR Description: 26S proteasome ATPase subunit, putative; protein
  misc_feature (33)..(425): Homolog of NCBI NO: 25289951 NR Description: hypothetical protein T18A20.2 [imported] - thaliana >gi|6056389|gb|AAF02853.1|AC009324_2 Putative 26S
  misc_feature (4)..(426): Homolog of NCBI NO: 28829138 NR Description: similar to Oryza sativa (Rice). 26S proteasome
  misc_feature (3)..(426): Homolog of NCBI NO: 20532410 NR Description: 26S protease regulatory subunit 7 (MSS1 protein) unnamed protein product [Mus musculus] proteasome (prosome, macropain) 26S subunit, ATPase 2 [Mus
  misc_feature (3)..(426): Homolog of NCBI NO: 33859604 NR Description: proteasome (prosome, macropain) 26S subunit,

SEQ ID NO: 85761 - protein, 348 aa, Arabidopsis thaliana; identical to SEQ ID NO: 23449
  peptide (1)..(348): Ceres Seq. ID no. 12682979
  misc_feature (126)..(313): Pfam Name: ATPase family associated with various cellular Pfam Description: ATPase family associated with various cellular
  misc_feature (1)..(348): Homolog of NCBI NO: 15220930 NR Description: 26S proteasome AAA-ATPase subunit RPT1a; protein At1g53750.1, supported by cDNA: 36419., supported by cDNA: supported by cDNA: gi_6652877 [Arabidopsis thaliana] (26S
  misc_feature (1)..(348): Homolog of NCBI NO: 6652878 NR Description: 26S proteasome AAA-ATPase subunit RPT1a
  misc_feature (1)..(348): Homolog of NCBI NO: 28558165 NR Description: 26S protease regulatory subunit 7 (26S proteasome
  misc_feature (1)..(348): Homolog of NCBI NO: 2492519 NR Description: 26S protease regulatory subunit 7 (26S proteasome
  misc_feature (1)..(348): Homolog of NCBI NO: 3914449 NR Description: 26S protease regulatory subunit 7 (26S proteasome
  misc_feature (1)..(347): Homolog of NCBI NO: 15220933 NR Description: 26S proteasome ATPase subunit, putative; protein
  misc_feature (1)..(347): Homolog of NCBI NO: 25289951 NR Description: hypothetical protein T18A20.2 [imported] - thaliana >gi|6056389|gb|AAF02853.1|AC009324_2 Putative 26S
  misc_feature (1)..(348): Homolog of NCBI NO: 28829138 NR Description: similar to Oryza sativa (Rice). 26S proteasome
  misc_feature (1)..(348): Homolog of NCBI NO: 20532410 NR Description: 26S protease regulatory subunit 7 (MSS1 protein) unnamed protein product [Mus musculus] proteasome (prosome, macropain) 26S subunit, ATPase 2 [Mus
  misc_feature (1)..(348): Homolog of NCBI NO: 33859604 NR Description: proteasome (prosome, macropain) 26S subunit,

SEQ ID NO: 85762 - protein, 347 aa, Arabidopsis thaliana; identical to SEQ ID NO: 23450
  peptide (1)..(347): Ceres Seq. ID no. 12682980
  misc_feature (125)..(312): Pfam Name: ATPase family associated with various cellular Pfam Description: ATPase family associated with various cellular
  misc_feature (1)..(347): Homolog of NCBI NO: 15220930 NR Description: 26S proteasome AAA-ATPase subunit RPT1a; protein At1g53750.1, supported by cDNA: 36419., supported by cDNA: supported by cDNA: gi_6652877 [Arabidopsis thaliana] (26S
  misc_feature (1)..(347): Homolog of NCBI NO: 6652878 NR Description: 26S proteasome AAA-ATPase subunit RPT1a
  misc_feature (1)..(347): Homolog of NCBI NO: 28558165 NR Description: 26S protease regulatory subunit 7 (26S proteasome
  misc_feature (1)..(347): Homolog of NCBI NO: 2492519 NR Description: 26S protease regulatory subunit 7 (26S proteasome
  misc_feature (1)..(347): Homolog of NCBI NO: 3914449 NR Description: 26S protease regulatory subunit 7 (26S proteasome
  misc_feature (1)..(346): Homolog of NCBI NO: 15220933 NR Description: 26S proteasome ATPase subunit, putative; protein
  misc_feature (1)..(346): Homolog of NCBI NO: 25289951 NR Description: hypothetical protein T18A20.2 [imported] - thaliana >gi|6056389|gb|AAF02853.1|AC009324_2 Putative 26S
  misc_feature (1)..(347): Homolog of NCBI NO: 28829138 NR Description: similar to Oryza sativa (Rice). 26S proteasome
  misc_feature (1)..(347): Homolog of NCBI NO: 20532410 NR Description: 26S protease regulatory subunit 7 (MSS1 protein) unnamed protein product [Mus musculus] proteasome (prosome, macropain) 26S subunit, ATPase 2 [Mus
  misc_feature (1)..(347): Homolog of NCBI NO: 33859604 NR Description: proteasome (prosome, macropain) 26S subunit,

SEQ ID NO: 85763 - DNA, 1437 bp, Arabidopsis thaliana
  misc_feature (1)..(1437): Ceres Seq. ID no. 12682984
  misc_feature: MA Experiment ID: 20000307 Result: Down-regulated in Transcription
  misc_feature: MA Experiment 20000307 PARAMETER Experiment Name: At_Germinating_Seeds_Sub_P Parameter: Age (hr) Value: 24 vs. 0
  misc_feature: MA Experiment 20000307 PARAMETER Experiment Name: At_Germinating_Seeds_Sub_P Parameter: Organism Value: A. thaliana
  misc_feature: MA Experiment 20000307 PARAMETER Experiment Name: At_Germinating_Seeds_Sub_P Parameter: Plant Line Value: WS
  misc_feature: MA Experiment 20000307 PARAMETER Experiment Name: At_Germinating_Seeds_Sub_P Parameter: Tissue Value: Germinating Seeds
atggctagttttggagaaaatctcaatgcttcccagttttatatcacactttgtgatgatctagactgtcttgatgggaaatacactgtgtttgggaagattaccagcgggtttgaaactttgacttgtatagccaaagcttctgttgatgcgaagaacagaccaaataaagatatcaggatacgacacacatatatacttacagatccatttgatgatcccccacaactggctaagatgataccagacgagccttactctgcacgcataaagaaagtagagaaagaaatcaatgagctcgccgagaagatctgcaatcttggtatcaaggagtccgatactggtttagctcctcccaatcaatgggatcttgtatctgataagcaaatgatgcaagaggagcaacctctgcttgttgcgacatgcacacagataatcagtccaaacactgaagatgcaaagtatgtcgttgatatcaaaaagataggcaagtatgttgttggacttggcgataaagcttctcccactgacatagaagcaggaatgcgtgtgggagttgatcagaagaaatatcagatacagattcctctacctccaaagattgatcctagtgtgaccatgatgacggttgaagagaaacctgatgcaacttacagtgatatcggtggctgcaaggagcagattgagaagattagagaggtcgttgaactgccaatgcttcatccagagaaatttgtgaggcttggaatagatcctcccaagggtgttctttgctatggtcctcctggtagcggaaaaacccttgtcgctagagctgtggcgaatagaactggtgcttgctttatcagggttgttggcagtgagctcgttcagaagtacattggtgaaggagctaggatggttcgtgaactgtttcagatggcacggtcaaagaaagcttgcattttgttctttgacgaaattgatgccattggcggtgcaagatttgatgacggtgtaggcagtgataatgaagtccaacgtaccatgcttgagattttgtatcagcttgatgggtttgacgcacgtggtaacatcaaggttcttatggcaacaaacaggcctgacatactagacccagctcttttacgtcctggacgtcttgaccgcaaggttgagttttgtctgcctgatctggagggcagaacacagatcttcaagattcacacacgaacaatgagttgtgaaagagacatccggtttgaactccttgctggcctctgcccaaactcaaccggagctgatatcagaagtgtatgcatagaagccggaatgtatgcaatcggagctaggagaaagtctgtgactgagaaggactttctggacgcagtgaacaaagttgttaaaggttatcaaaagttcagtgcaacacccaagtatatggcctactacatttag

SEQ ID NO: 85764 - protein, 478 aa, Arabidopsis thaliana
  peptide (1)..(478): Ceres Seq. ID no. 12682985
  misc_feature (255)..(442): Pfam Name: ATPase family associated with various cellular Pfam Description: ATPase family associated with various cellular
  misc_feature (83)..(478): Homolog of NCBI NO: 15220933 NR Description: 26S proteasome ATPase subunit, putative; protein
  misc_feature (73)..(478): Homolog of NCBI NO: 25289951 NR Description: hypothetical protein T18A20.2 [imported] - thaliana >gi|6056389|gb|AAF02853.1|AC009324_2 Putative 26S
  misc_feature (70)..(476): Homolog of NCBI NO: 28558165 NR Description: 26S protease regulatory subunit 7 (26S proteasome
  misc_feature (70)..(476): Homolog of NCBI NO: 15220930 NR Description: 26S proteasome AAA-ATPase subunit RPT1a; protein At1g53750.1, supported by cDNA: 36419., supported by cDNA: supported by cDNA: gi_6652877 [Arabidopsis thaliana] (26S
  misc_feature (70)..(476): Homolog of NCBI NO: 6652878 NR Description: 26S proteasome AAA-ATPase subunit RPT1a
  misc_feature (70)..(476): Homolog of NCBI NO: 2492519 NR Description: 26S protease regulatory subunit 7 (26S proteasome
  misc_feature (70)..(476): Homolog of NCBI NO: 3914449 NR Description: 26S protease regulatory subunit 7 (26S proteasome
  misc_feature (77)..(476): Homolog of NCBI NO: 1172640 NR Description: 26S PROTEASE REGULATORY SUBUNIT 7 (MSS1 PROTEIN)
  misc_feature (77)..(476): Homolog of NCBI NO: 4506209 NR Description: proteasome 26S ATPase subunit 2; proteasome 26S
  misc_feature (77)..(476): Homolog of NCBI NO: 33859604 NR Description: proteasome (prosome, macropain) 26S subunit,
MASFGENLNASQFYITLCDDLDCLDGKYTVFGKITSGFETLTCIAKASVDAKNRPNKDIRIRHTYILTDPFDDPPQLAKMIPDEPYSARIKKVEKEINELAEKICNLGIKESDTGLAPPNQWDLVSDKQMMQEEQPLLVATCTQIISPNTEDAKYVVDIKKIGKYVVGLGDKASPTDIEAGMRVGVDQKKYQIQIPLPPKIDPSVTMMTVEEKPDATYSDIGGCKEQIEKIREVVELPMLHPEKFVRLGIDPPKGVLCYGPPGSGKTLVARAVANRTGACFIRVVGSELVQKYIGEGARMVRELFQMARSKKACILFFDEIDAIGGARFDDGVGSDNEVQRTMLEILYQLDGFDARGNIKVLMATNRPDILDPALLRPGRLDRKVEFCLPDLEGRTQIFKIHTRTMSCERDIRFELLAGLCPNSTGADIRSVCIEAGMYAIGARRKSVTEKDFLDAVNKVVKGYQKFSATPKYMAYYI

SEQ ID NO: 85765 - protein, 399 aa, Arabidopsis thaliana
  peptide (1)..(399): Ceres Seq. ID no. 12682986
  misc_feature (176)..(363): Pfam Name: ATPase family associated with various cellular Pfam Description: ATPase family associated with various cellular
  misc_feature (4)..(399): Homolog of NCBI NO: 15220933 NR Description: 26S proteasome ATPase subunit, putative; protein
  misc_feature (1)..(399): Homolog of NCBI NO: 25289951 NR Description: hypothetical protein T18A20.2 [imported] - thaliana >gi|6056389|gb|AAF02853.1|AC009324_2 Putative 26S
  misc_feature (1)..(397): Homolog of NCBI NO: 28558165 NR Description: 26S protease regulatory subunit 7 (26S proteasome
  misc_feature (1)..(397): Homolog of NCBI NO: 15220930 NR Description: 26S proteasome AAA-ATPase subunit RPT1a; protein At1g53750.1, supported by cDNA: 36419., supported by cDNA: supported by cDNA: gi_6652877 [Arabidopsis thaliana] (26S
  misc_feature (1)..(397): Homolog of NCBI NO: 6652878 NR Description: 26S proteasome AAA-ATPase subunit RPT1a
  misc_feature (1)..(397): Homolog of NCBI NO: 2492519 NR Description: 26S protease regulatory subunit 7 (26S proteasome
  misc_feature (1)..(397): Homolog of NCBI NO: 3914449 NR Description: 26S protease regulatory subunit 7 (26S proteasome
  misc_feature (1)..(397): Homolog of NCBI NO: 1172640 NR Description: 26S PROTEASE REGULATORY SUBUNIT 7 (MSS1 PROTEIN)
  misc_feature (1)..(397): Homolog of NCBI NO: 4506209 NR Description: proteasome 26S ATPase subunit 2; proteasome 26S
  misc_feature (1)..(397): Homolog of NCBI NO: 33859604 NR Description: proteasome (prosome, macropain) 26S subunit,
MIPDEPYSARIKKVEKEINELAEKICNLGIKESDTGLAPPNQWDLVSDKQMMQEEQPLLVATCTQIISPNTEDAKYVVDIKKIGKYVVGLGDKASPTDIEAGMRVGVDQKKYQIQIPLPPKIDPSVTMMTVEEKPDATYSDIGGCKEQIEKIREVVELPMLHPEKFVRLGIDPPKGVLCYGPPGSGKTLVARAVANRTGACFIRVVGSELVQKYIGEGARMVRELFQMARSKKACILFFDEIDAIGGARFDDGVGSDNEVQRTMLEILYQLDGFDARGNIKVLMATNRPDILDPALLRPGRLDRKVEFCLPDLEGRTQIFKIHTRTMSCERDIRFELLAGLCPNSTGADIRSVCIEAGMYAIGARRKSVTEKDFLDAVNKVVKGYQKFSATPKYMAYYI

SEQ ID NO: 85766 - protein, 349 aa, Arabidopsis thaliana
  peptide (1)..(349): Ceres Seq. ID no. 12682987
  misc_feature (126)..(313): Pfam Name: ATPase family associated with various cellular Pfam Description: ATPase family associated with various cellular
  misc_feature (1)..(349): Homolog of NCBI NO: 15220933 NR Description: 26S proteasome ATPase subunit, putative; protein
  misc_feature (1)..(349): Homolog of NCBI NO: 25289951 NR Description: hypothetical protein T18A20.2 [imported] - thaliana >gi|6056389|gb|AAF02853.1|AC009324_2 Putative 26S
  misc_feature (1)..(347): Homolog of NCBI NO: 28558165 NR Description: 26S protease regulatory subunit 7 (26S proteasome
  misc_feature (1)..(347): Homolog of NCBI NO: 15220930 NR Description: 26S proteasome AAA-ATPase subunit RPT1a; protein At1g53750.1, supported by cDNA: 36419., supported by cDNA: supported by cDNA: gi_6652877 [Arabidopsis thaliana] (26S
  misc_feature (1)..(347): Homolog of NCBI NO: 6652878 NR Description: 26S proteasome AAA-ATPase subunit RPT1a
  misc_feature (1)..(347): Homolog of NCBI NO: 2492519 NR Description: 26S protease regulatory subunit 7 (26S proteasome
  misc_feature (1)..(347): Homolog of NCBI NO: 3914449 NR Description: 26S protease regulatory subunit 7 (26S proteasome
  misc_feature (1)..(347): Homolog of NCBI NO: 1172640 NR Description: 26S PROTEASE REGULATORY SUBUNIT 7 (MSS1 PROTEIN)
  misc_feature (1)..(347): Homolog of NCBI NO: 4506209 NR Description: proteasome 26S ATPase subunit 2; proteasome 26S
  misc_feature (1)..(347): Homolog of NCBI NO: 33859604 NR Description: proteasome (prosome, macropain) 26S subunit,
MMQEEQPLLVATCTQIISPNTEDAKYVVDIKKIGKYVVGLGDKASPTDIEAGMRVGVDQKKYQIQIPLPPKIDPSVTMMTVEEKPDATYSDIGGCKEQIEKIREVVELPMLHPEKFVRLGIDPPKGVLCYGPPGSGKTLVARAVANRTGACFIRVVGSELVQKYIGEGARMVRELFQMARSKKACILFFDEIDAIGGARFDDGVGSDNEVQRTMLEILYQLDGFDARGNIKVLMATNRPDILDPALLRPGRLDRKVEFCLPDLEGRTQIFKIHTRTMSCERDIRFELLAGLCPNSTGADIRSVCIEAGMYAIGARRKSVTEKDFLDAVNKVVKGYQKFSATPKYMAYYI

SEQ ID NO: 85767 - DNA, 1566 bp, Arabidopsis thaliana
  misc_feature (1)..(1566): Ceres Seq. ID no. 12683013
  misc_feature: MA Experiment ID: 108434 Result: Down-regulated in Transcription
  misc_feature: MA Experiment 108434 PARAMETER Experiment Name: At_Root_Tips_cDNA_P Parameter: Tissue Value: Root Tips
  misc_feature: MA Experiment ID: 108488 Result: Down-regulated in Transcription
  misc_feature: MA Experiment ID: 108605 Result: Up-regulated in Transcription
  misc_feature: MA Experiment 108605 PARAMETER Experiment Name: At_100uM_ABA_cDNA_P Parameter: Timepoint (hr) Value: 6
  misc_feature: MA Experiment 108605 PARAMETER Experiment Name: At_100uM_ABA_cDNA_P Parameter: Tissue Value: Aerial
  misc_feature: MA Experiment 108605 PARAMETER Experiment Name: At_100uM_ABA_cDNA_P Parameter: Treatment Value: 100uM ABA vs. No Treatment
  misc_feature: MA Experiment ID: 20000070 Result: Up-regulated in Transcription
  misc_feature: MA Experiment 20000070 PARAMETER Experiment Name: At_100uM_ABA_Mutants_cDNA_P Parameter: Plant Line Value: CS24
  misc_feature: MA Experiment 20000070 PARAMETER Experiment Name: At_100uM_ABA_Mutants_cDNA_P Parameter: Timepoint (hr) Value: 6
  misc_feature: MA Experiment 20000070 PARAMETER Experiment Name: At_100uM_ABA_Mutants_cDNA_P Parameter: Tissue Value: Aerial
  misc_feature: MA Experiment 20000070 PARAMETER Experiment Name: At_100uM_ABA_Mutants_cDNA_P Parameter: Treatment Value: 100uM ABA vs. No Treatment
  misc_feature: MA Experiment ID: 20000088 Result: Up-regulated in Transcription
  misc_feature: MA Experiment 20000088 PARAMETER Experiment Name: At_100uM_ABA_Mutants_cDNA_P Parameter: Plant Line Value: Landsberg
  misc_feature: MA Experiment 20000088 PARAMETER Experiment Name: At_100uM_ABA_Mutants_cDNA_P Parameter: Timepoint (hr) Value: 6
  misc_feature: MA Experiment 20000088 PARAMETER Experiment Name: At_100uM_ABA_Mutants_cDNA_P Parameter: Tissue Value: Aerial
  misc_feature: MA Experiment 20000088 PARAMETER Experiment Name: At_100uM_ABA_Mutants_cDNA_P Parameter: Treatment Value: 100uM ABA vs. No Treatment
  misc_feature: MA Experiment ID: 20000117 Result: Up-regulated in Transcription
  misc_feature: MA Experiment 20000117 PARAMETER Experiment Name: At_100uM_ABA_Mutants_cDNA_P Parameter: Plant Line Value: Columbia
  misc_feature: MA Experiment 20000117 PARAMETER Experiment Name: At_100uM_ABA_Mutants_cDNA_P Parameter: Timepoint (hr) Value: 6
  misc_feature: MA Experiment 20000117 PARAMETER Experiment Name: At_100uM_ABA_Mutants_cDNA_P Parameter: Tissue Value: Aerial
  misc_feature: MA Experiment 20000117 PARAMETER Experiment Name: At_100uM_ABA_Mutants_cDNA_P Parameter: Treatment Value: 100uM ABA vs. No Treatment
  misc_feature: MA Experiment ID: 20000234 Result: Down-regulated in Transcription
  misc_feature: MA Experiment 20000234 PARAMETER Experiment Name: At_Siliques_P Parameter: Age (day) Value: 21
  misc_feature: MA Experiment 20000234 PARAMETER Experiment Name: At_Siliques_P Parameter: Organism Value: A. thaliana
  misc_feature: MA Experiment 20000234 PARAMETER Experiment Name: At_Siliques_P Parameter: Plant Line Value: WS
  misc_feature: MA Experiment 20000234 PARAMETER Experiment Name: At_Siliques_P Parameter: Tissue Value: Less Than 5mm Siliques vs. Whole Plant
  misc_feature: MA Experiment ID: 20000235 Result: Down-regulated in Transcription
  misc_feature: MA Experiment 20000235 PARAMETER Experiment Name: At_Siliques_P Parameter: Age (day) Value: 21
  misc_feature: MA Experiment 20000235 PARAMETER Experiment Name: At_Siliques_P Parameter: Organism Value: A. thaliana
  misc_feature: MA Experiment 20000235 PARAMETER Experiment Name: At_Siliques_P Parameter: Plant Line Value: WS
  misc_feature: MA Experiment 20000235 PARAMETER Experiment Name: At_Siliques_P Parameter: Tissue Value: 5-10mm Siliques vs. Whole Plant
  misc_feature: MA Experiment ID: 20000436 Result: Up-regulated in Transcription
  misc_feature: MA Experiment 20000436 PARAMETER Experiment Name: At_Drought_P Parameter: Age (day) Value: 7
  misc_feature: MA Experiment 20000436 PARAMETER Experiment Name: At_Drought_P Parameter: Organism Value: A. thaliana
  misc_feature: MA Experiment 20000436 PARAMETER Experiment Name: At_Drought_P Parameter: Plant Line Value: WS
  misc_feature: MA Experiment 20000436 PARAMETER Experiment Name: At_Drought_P Parameter: Timepoint (hr) Value: 12
  misc_feature: MA Experiment 20000436 PARAMETER Experiment Name: At_Drought_P Parameter: Tissue Value: Whole Plant
  misc_feature: MA Experiment 20000436 PARAMETER Experiment Name: At_Drought_P Parameter: Treatment Value: Drought vs. No Drought
  misc_feature: MA Experiment ID: 20000437 Result: Up-regulated in Transcription
  misc_feature: MA Experiment 20000437 PARAMETER Experiment Name: At_Drought_P Parameter: Age (day) Value: 8
  misc_feature: MA Experiment 20000437 PARAMETER Experiment Name: At_Drought_P Parameter: Organism Value: A. thaliana
  misc_feature: MA Experiment 20000437 PARAMETER Experiment Name: At_Drought_P Parameter: Plant Line Value: WS
  misc_feature: MA Experiment 20000437 PARAMETER Experiment Name: At_Drought_P Parameter: Timepoint (hr) Value: 24
  misc_feature: MA Experiment 20000437 PARAMETER Experiment Name: At_Drought_P Parameter: Tissue Value: Whole Plant
  misc_feature: MA Experiment 20000437 PARAMETER Experiment Name: At_Drought_P Parameter: Treatment Value: Drought vs. No Drought
  misc_feature: MA Experiment ID: 20000438 Result: Down-regulated in Transcription
  misc_feature: MA Experiment 20000438 PARAMETER Experiment Name: At_Shoots__P Parameter: Age (day) Value: 14
  misc_feature: MA Experiment 20000438 PARAMETER Experiment Name: At_Shoots__P Parameter: Tissue Value: Shoots vs. Whole Plant
  misc_feature: MA Experiment ID: 20001904 Result: Up-regulated in Transcription
  misc_feature: MA Experiment 20001904 PARAMETER Experiment Name: At_Drought_Reproduction_P Parameter: Age (day) Value: 37
  misc_feature: MA Experiment 20001904 PARAMETER Experiment Name: At_Drought_Reproduction_P Parameter: Organism Value: A. thaliana
  misc_feature: MA Experiment 20001904 PARAMETER Experiment Name: At_Drought_Reproduction_P Parameter: Plant Line Value: WS
  misc_feature: MA Experiment 20001904 PARAMETER Experiment Name: At_Drought_Reproduction_P Parameter: Timepoint (day) Value: 7
  misc_feature: MA Experiment 20001904 PARAMETER Experiment Name: At_Drought_Reproduction_P Parameter: Tissue Value: Rosettes
  misc_feature: MA Experiment 20001904 PARAMETER Experiment Name: At_Drought_Reproduction_P Parameter: Treatment Value: Drought vs. No Drought
  misc_feature: MA Experiment ID: 20001905 Result: Up-regulated in Transcription
  misc_feature: MA Experiment 20001905 PARAMETER Experiment Name: At_Drought_Reproduction_P Parameter: Age (day) Value: 40
  misc_feature: MA Experiment 20001905 PARAMETER Experiment Name: At_Drought_Reproduction_P Parameter: Organism Value: A. thaliana
  misc_feature: MA Experiment 20001905 PARAMETER Experiment Name: At_Drought_Reproduction_P Parameter: Plant Line Value: WS
  misc_feature: MA Experiment 20001905 PARAMETER Experiment Name: At_Drought_Reproduction_P Parameter: Timepoint (day) Value: 10
  misc_feature: MA Experiment 20001905 PARAMETER Experiment Name: At_Drought_Reproduction_P Parameter: Tissue Value: Rosettes
  misc_feature: MA Experiment 20001905 PARAMETER Experiment Name: At_Drought_Reproduction_P Parameter: Treatment Value: Drought vs. No Drought
  misc_feature: MA Experiment ID: 20001911 Result: Up-regulated in Transcription
  misc_feature: MA Experiment 20001911 PARAMETER Experiment Name: At_Drought_Reproduction_P Parameter: Age (day) Value: 40
  misc_feature: MA Experiment 20001911 PARAMETER Experiment Name: At_Drought_Reproduction_P Parameter: Organism Value: A. thaliana
  misc_feature: MA Experiment 20001911 PARAMETER Experiment Name: At_Drought_Reproduction_P Parameter: Plant Line Value: WS
  misc_feature: MA Experiment 20001911 PARAMETER Experiment Name: At_Drought_Reproduction_P Parameter: Timepoint (day) Value: 10
  misc_feature: MA Experiment 20001911 PARAMETER Experiment Name: At_Drought_Reproduction_P Parameter: Tissue Value: Flowers
  misc_feature: MA Experiment 20001911 PARAMETER Experiment Name: At_Drought_Reproduction_P Parameter: Treatment Value: Drought vs. No Drought
aaaacaacaaagcaaagcgttgaagagagaagaagaagcaaagatataacccccaaaagtatcaattagtttccattttcgccgctaagattctgttttcgaacatttacaccctcaagaatcgccgccatgtgtggaggagctataatatccgatttcattccaccgccgaggtctcgccgtgttactagcgagtttatttggccggatctgaagaagaatttgaaaggatcgaagaaaagctcgaagaatcgttcgaatttcttcgattttgacgctgagttcgaagctgatttccaaggtttcaaagatgattcgtctatcgattgcgatgatgatttcgacgtcggtgatgttttcgccgatgtgaaaccattcgttttcacttcgactccaaaacccgccgtctccgccgctgcggaaggttcagtttttggtaagaaagttactggcttggatggggacgctgagaaatctgcaaataggaagaggaagaatcagtaccgagggattaggcaacgtccttggggaaaatgggctgctgagatacgtgatccaagggaaggtgctagaatctggcttggaacgttcaagacagctgaggaagctgctagagcttacgatgctgcagcgcggagaatccgtggatctaaagctaaggtgaatttccctgaagaaaacatgaaggctaattctcagaaacgctctgtgaaggctaatcttcagaaaccagtggctaaacctaaccctaacccaagtccagctttggttcagaactcgaacatctcctttgaaaatatgtgtttcatggaggagaaacaccaagtgagcaacaacaacaacaaccagtttgggatgacaaactccgttgatgctggatgtaatgggtatcagtatttcagctctgaccagggtagtaattctttcgattgttcggagtttggttggagcgatcaagctccgataactcccgacatctcttctgcggttatcaacaacaacaactcagctctgttctttgaggaagccaatccagctaagaagctcaagtctatggatttcgagacaccttacaacaacactgaatgggacgcttcactggatttcctcaacgaagatgctgtaacgactcaggacaatggtgcaaaccctatggacctatggagtattgatgaaattcattccatgattggaggagtcttctgaagagatccagtttcatgtaaataaggctgcatgtttgtgagtttcccgcatcgttcgtttatcaacctccaaaactttctaatgtctgttacttgcatcttcttctgctgtctctgtctgtctctctcaggagttcctgtttgcattgcgagaagccatgagcctctatcttgagggtagttgtgatgaagttaagtagaggcttatttttaggggttgtggtagtttttgttttagtgaatcttttgaattcgtttgtgttttgtttttgttactttatgccccaaaactcctttaacatttgtcataatgtgtttgaacctctcatctgtttaatcaaataaatcttctttgtatgct

SEQ ID NO: 85768 - protein, 358 aa, Arabidopsis thaliana; identical to SEQ ID NO: 37879
  peptide (1)..(358): Ceres Seq. ID no. 12683014
  misc_feature (122)..(186): Pfam Name: AP2 domain Pfam Description: AP2 domain
  misc_feature (1)..(358): Homolog of NCBI NO: 15220971 NR Description: AP2 domain protein RAP2.12; protein id: supported by cDNA: 42960., supported by cDNA: gi_14335161, by cDNA: gi_15982875 [Arabidopsis thaliana]
  misc_feature (1)..(358): Homolog of NCBI NO: 21593779 NR Description: AP2 domain containing protein, putative
  misc_feature (42)..(358): Homolog of NCBI NO: 2281649 NR Description: AP2 domain containing protein RAP2.12
  misc_feature (1)..(339): Homolog of NCBI NO: 30683064 NR Description: AP2 domain protein RAP2.2 [Arabidopsis thaliana]
  misc_feature (1)..(339): Homolog of NCBI NO: 30683059 NR Description: AP2 domain protein RAP2.2 [Arabidopsis thaliana]
  misc_feature (1)..(339): Homolog of NCBI NO: 18400321 NR Description: AP2 domain protein RAP2.2; protein id:
  misc_feature (1)..(325): Homolog of NCBI NO: 21553709 NR Description: DNA-binding protein [Arabidopsis thaliana]
  misc_feature (1)..(308): Homolog of NCBI NO: 30961941 NR Description: C-repeat/DRE-binding factor [Nicotiana tabacum]
  misc_feature (277)..(358): Homolog of NCBI NO: 30961941 NR Description: C-repeat/DRE-binding factor [Nicotiana tabacum]
  misc_feature (1)..(318): Homolog of NCBI NO: 38343926 NR Description: ethylene transcription factor [Fagus sylvatica]

SEQ ID NO: 85769 - DNA, 1179 bp, Arabidopsis thaliana
  misc_feature (1)..(1179): Ceres Seq. ID no. 12683040
  misc_feature: MA Experiment ID: 108434 Result: Down-regulated in Transcription
  misc_feature: MA Experiment 108434 PARAMETER Experiment Name: At_Root_Tips_cDNA_P Parameter: Tissue Value: Root Tips
  misc_feature: MA Experiment ID: 108461 Result: Up-regulated in Transcription
  misc_feature: MA Experiment 108461 PARAMETER Experiment Name: At_Germinating_Seeds_cDNA_P Parameter: Age (day) Value: 1 vs. 0
  misc_feature: MA Experiment 108461 PARAMETER Experiment Name: At_Germinating_Seeds_cDNA_P Parameter: Tissue Value: Germinating Seeds
  misc_feature: MA Experiment ID: 108501 Result: Up-regulated in Transcription
  misc_feature: MA Experiment 108501 PARAMETER Experiment Name: At_ap2_floral_buds_cDNA_P Parameter: Plant Line Value: ap2 (Ler.)
  misc_feature: MA Experiment 108501 PARAMETER Experiment Name: At_ap2_floral_buds_cDNA_P Parameter: Tissue Value: Closed Flower
  misc_feature: MA Experiment ID: 108569 Result: Up-regulated in Transcription
  misc_feature: MA Experiment 108569 PARAMETER Experiment Name: At_0.001%_MeJA__cDNA_P Parameter: Timepoint (hr) Value: 6
  misc_feature: MA Experiment 108569 PARAMETER Experiment Name: At_0.001%_MeJA__cDNA_P Parameter: Tissue Value: Aerial
  misc_feature: MA Experiment 108569 PARAMETER Experiment Name: At_0.001%_MeJA__cDNA_P Parameter: Treatment Value: 0.001% MeJA vs. No Treatment
  misc_feature: MA Experiment ID: 108594 Result: Down-regulated in Transcription
  misc_feature: MA Experiment 108594 PARAMETER Experiment Name: At_Ler-rhl_Root_cDNA_P Parameter: Plant Line Value: null
  misc_feature: MA Experiment ID: 20000068 Result: Up-regulated in Transcription
  misc_feature: MA Experiment ID: 20000112 Result: Down-regulated in Transcription
  misc_feature: MA Experiment 20000112 PARAMETER Experiment Name: At_42deg_Heat_cDNA_P Parameter: Temperature (deg C) Value: 42 vs. 22
  misc_feature: MA Experiment 20000112 PARAMETER Experiment Name: At_42deg_Heat_cDNA_P Parameter: Timepoint (hr) Value: 2
  misc_feature: MA Experiment 20000112 PARAMETER Experiment Name: At_42deg_Heat_cDNA_P Parameter: Tissue Value: Aerial
  misc_feature: MA Experiment ID: 20000171 Result: Down-regulated in Transcription
  misc_feature: MA Experiment 20000171 PARAMETER Experiment Name: At_42deg_Heat_P Parameter: Age (day) Value: 14
  misc_feature: MA Experiment 20000171 PARAMETER Experiment Name: At_42deg_Heat_P Parameter: Organism Value: A. thaliana
  misc_feature: MA Experiment 20000171 PARAMETER Experiment Name: At_42deg_Heat_P Parameter: Plant Line Value: WS
  misc_feature: MA Experiment 20000171 PARAMETER Experiment Name: At_42deg_Heat_P Parameter: Temperature (deg C) Value: 42 vs. 22
  misc_feature: MA Experiment 20000171 PARAMETER Experiment Name: At_42deg_Heat_P Parameter: Timepoint (hr) Value: 1
  misc_feature: MA Experiment 20000171 PARAMETER Experiment Name: At_42deg_Heat_P Parameter: Tissue Value: Aerial
  misc_feature: MA Experiment ID: 20000173 Result: Down-regulated in Transcription
  misc_feature: MA Experiment 20000173 PARAMETER Experiment Name: At_42deg_Heat_P Parameter: Age (day) Value: 14
  misc_feature: MA Experiment 20000173 PARAMETER Experiment Name: At_42deg_Heat_P Parameter: Organism Value: A. thaliana
  misc_feature: MA Experiment 20000173 PARAMETER Experiment Name: At_42deg_Heat_P Parameter: Plant Line Value: WS
  misc_feature: MA Experiment 20000173 PARAMETER Experiment Name: At_42deg_Heat_P Parameter: Temperature (deg C) Value: 42 vs. 22
  misc_feature: MA Experiment 20000173 PARAMETER Experiment Name: At_42deg_Heat_P Parameter: Timepoint (hr) Value: 6
  misc_feature: MA Experiment 20000173 PARAMETER Experiment Name: At_42deg_Heat_P Parameter: Tissue Value: Aerial
  misc_feature: MA Experiment ID: 20000185 Result: Up-regulated in Transcription
  misc_feature: MA Experiment 20000185 PARAMETER Experiment Name: At_Roots__P Parameter: Age (day) Value: 7 vs. 21
  misc_feature: MA Experiment 20000185 PARAMETER Experiment Name: At_Roots__P Parameter: Organism Value: A. thaliana
  misc_feature: MA Experiment 20000185 PARAMETER Experiment Name: At_Roots__P Parameter: Tissue Value: Roots vs. Whole Plant
  misc_feature: MA Experiment ID: 20000224 Result: Up-regulated in Transcription
  misc_feature: MA Experiment ID: 20000234 Result: Up-regulated in Transcription
  misc_feature: MA Experiment 20000234 PARAMETER Experiment Name: At_Siliques_P Parameter: Age (day) Value: 21
  misc_feature: MA Experiment 20000234 PARAMETER Experiment Name: At_Siliques_P Parameter: Organism Value: A. thaliana
  misc_feature: MA Experiment 20000234 PARAMETER Experiment Name: At_Siliques_P Parameter: Plant Line Value: WS
  misc_feature: MA Experiment 20000234 PARAMETER Experiment Name: At_Siliques_P Parameter: Tissue Value: Less Than 5mm Siliques vs. Whole Plant
  misc_feature: MA Experiment ID: 20000439 Result: Up-regulated in Transcription
  misc_feature: MA Experiment 20000439 PARAMETER Experiment Name: At_Roots__P Parameter: Age (day) Value: 14 vs. 21
  misc_feature: MA Experiment 20000439 PARAMETER Experiment Name: At_Roots__P Parameter: Organism Value: A. thaliana
  misc_feature: MA Experiment 20000439 PARAMETER Experiment Name: At_Roots__P Parameter: Tissue Value: Roots vs. Whole Plant
atggcgattctcaaatctcacttcttcttactcttccctcttcttcttctccactttcacactgtctcctttgctcagacgctctttgtgttcggagatggtctttacgacgccggaaacaaacagtttctctctcagaaccgagttgacgcaagctttcctccttatggagtcactgtaggacaagccaccggacggtggtccgatggttctatcgttcctgattatcttgctaaattcatgggaattcctaaaatctctccgattctcctaaccacggcggatttttctcacggagctaatttcgccatcgccgacgctaccgttcttggctctcctccggagacgatgactttgtcacaacaagtgaagaaattctcggaaaacaagaataagtggacaaatcaaacacgttctgaagctatctacttgatctacattggttctgatgattacttgagctatgctaagagtaatccaagtccatcagatactcagaaacaagcttttgttgatcaagtcatcactaccataaaagcagaaataaaggtggtttacgggtctggcggaaggaaattcgcattccagaacttggcaccgttaggttgcttaccggccgtgaaacaagcaagcggaaatgttcaagaatgtgtgaaattgccttcggaaatggctgctttgcataacaagaaacttttgcagctcttggttgaactatcaagagaactaaatggtttccagtactcgttttacgacttctttagctcgatccaaaacagagttatcaagtctaagacttatacattcgagacaggaaacgctgcttgttgtggaactggctctatcaacgggagtaattgctcagctaaaaatgtatgcgccaagcctgaagagtatatcttctttgatggtaagcatttgacgcaagaagccaaccttcaggtcgggcatttgatgtggggagcagatccggaagtgattggaccgaacaatatcagggagcttatggtccttcctctagacattacagtcatcttagctggtatacaagaagctatggctgccatgagaccgagacagagcaacattgagagtctctatgatatcaagaagatggagtcagagatggataatcattggctttatcaagttgacaaagctatctcctttatgatataa

SEQ ID NO: 85770 - protein, 392 aa, Arabidopsis thaliana; identical to SEQ ID NO: 25251
  peptide (1)..(392): Ceres Seq. ID no. 12683041
  misc_feature (28)..(319): Pfam Name: GDSL-like Lipase/Acylhydrolase Pfam Description: GDSL-like Lipase/Acylhydrolase
  misc_feature (1)..(392): Homolog of NCBI NO: 15221023 NR Description: myrosinase-associated protein, putative; protein
  misc_feature (1)..(392): Homolog of NCBI NO: 25405684 NR Description: hypothetical protein F15I1.11 [imported] - thaliana >gi|4587544|gb|AAD25775.1|AC006577_11 Belongs to the
  misc_feature (1)..(392): Homolog of NCBI NO: 21593567 NR Description: myrosinase-associated protein, putative
  misc_feature (28)..(344): Homolog of NCBI NO: 15231805 NR Description: myrosinase-associated protein, putative; protein At3g14210.1, supported by cDNA: gi_15450434, supported by cDNA: supported by cDNA: gi_17065227 [Arabidopsis thaliana]
  misc_feature (28)..(344): Homolog of NCBI NO: 15450435 NR Description: AT3g14210/MAG2_18 [Arabidopsis thaliana]
  misc_feature (28)..(361): Homolog of NCBI NO: 18404748 NR Description: myrosinase-associated protein, putative; protein At1g54010.1, supported by cDNA: 101419., supported by cDNA:
  misc_feature (28)..(361): Homolog of NCBI NO: 21618218 NR Description: myrosinase-associated protein, putative
  misc_feature (28)..(341): Homolog of NCBI NO: 21592973 NR Description: myrosinase-associated protein, putative
  misc_feature (28)..(364): Homolog of NCBI NO: 25336315 NR Description: hypothetical protein F15I1.9 [imported] - thaliana >gi|4587542|gb|AAD25773.1|AC006577_9 Belongs to the
  misc_feature (28)..(341): Homolog of NCBI NO: 15221019 NR Description: myrosinase-associated protein, putative; protein

SEQ ID NO: 85771 - protein, 312 aa, Arabidopsis thaliana; identical to SEQ ID NO: 25252
  peptide (1)..(312): Ceres Seq. ID no. 12683042
  misc_feature (1)..(239): Pfam Name: GDSL-like Lipase/Acylhydrolase Pfam Description: GDSL-like Lipase/Acylhydrolase
  misc_feature (1)..(312): Homolog of NCBI NO: 15221023 NR Description: myrosinase-associated protein, putative; protein
  misc_feature (1)..(312): Homolog of NCBI NO: 25405684 NR Description: hypothetical protein F15I1.11 [imported] - thaliana >gi|4587544|gb|AAD25775.1|AC006577_11 Belongs to the
  misc_feature (1)..(312): Homolog of NCBI NO: 21593567 NR Description: myrosinase-associated protein, putative
  misc_feature (1)..(264): Homolog of NCBI NO: 15231805 NR Description: myrosinase-associated protein, putative; protein At3g14210.1, supported by cDNA: gi_15450434, supported by cDNA: supported by cDNA: gi_17065227 [Arabidopsis thaliana]
  misc_feature (1)..(264): Homolog of NCBI NO: 15450435 NR Description: AT3g14210/MAG2_18 [Arabidopsis thaliana]
  misc_feature (1)..(281): Homolog of NCBI NO: 18404748 NR Description: myrosinase-associated protein, putative; protein At1g54010.1, supported by cDNA: 101419., supported by cDNA:
  misc_feature (1)..(281): Homolog of NCBI NO: 21618218 NR Description: myrosinase-associated protein, putative
  misc_feature (1)..(261): Homolog of NCBI NO: 21592973 NR Description: myrosinase-associated protein, putative
  misc_feature (1)..(284): Homolog of NCBI NO: 25336315 NR Description: hypothetical protein F15I1.9 [imported] - thaliana >gi|4587542|gb|AAD25773.1|AC006577_9 Belongs to the
  misc_feature (1)..(261): Homolog of NCBI NO: 15221019 NR Description: myrosinase-associated protein, putative; protein

SEQ ID NO: 85772 - protein, 276 aa, Arabidopsis thaliana
  peptide (1)..(276): Ceres Seq. ID no. 12683043
  misc_feature (1)..(203): Pfam Name: GDSL-like Lipase/Acylhydrolase Pfam Description: GDSL-like Lipase/Acylhydrolase
  misc_feature (1)..(276): Homolog of NCBI NO: 15221023 NR Description: myrosinase-associated protein, putative; protein
  misc_feature (1)..(276): Homolog of NCBI NO: 25405684 NR Description: hypothetical protein F15I1.11 [imported] - thaliana >gi|4587544|gb|AAD25775.1|AC006577_11 Belongs to the
  misc_feature (1)..(276): Homolog of NCBI NO: 21593567 NR Description: myrosinase-associated protein, putative
  misc_feature (1)..(228): Homolog of NCBI NO: 15231805 NR Description: myrosinase-associated protein, putative; protein At3g14210.1, supported by cDNA: gi_15450434, supported by cDNA: supported by cDNA: gi_17065227 [Arabidopsis thaliana]
  misc_feature (1)..(228): Homolog of NCBI NO: 15450435 NR Description: AT3g14210/MAG2_18 [Arabidopsis thaliana]
  misc_feature (1)..(245): Homolog of NCBI NO: 18404748 NR Description: myrosinase-associated protein, putative; protein At1g54010.1, supported by cDNA: 101419., supported by cDNA:
  misc_feature (1)..(245): Homolog of NCBI NO: 21618218 NR Description: myrosinase-associated protein, putative
  misc_feature (1)..(225): Homolog of NCBI NO: 21592973 NR Description: myrosinase-associated protein, putative
  misc_feature (1)..(248): Homolog of NCBI NO: 25336315 NR Description: hypothetical protein F15I1.9 [imported] - thaliana >gi|4587542|gb|AAD25773.1|AC006577_9 Belongs to the
  misc_feature (1)..(225): Homolog of NCBI NO: 15221019 NR Description: myrosinase-associated protein, putative; protein
MTLSQQVKKFSENKNKWTNQTRSEAIYLIYIGSDDYLSYAKSNPSPSDTQKQAFVDQVITTIKAEIKVVYGSGGRKFAFQNLAPLGCLPAVKQASGNVQECVKLPSEMAALHNKKLLQLLVELSRELNGFQYSFYDFFSSIQNRVIKSKTYTFETGNAACCGTGSINGSNCSAKNVCAKPEEYIFFDGKHLTQEANLQVGHLMWGADPEVIGPNNIRELMVLPLDITVILAGIQEAMAAMRPRQSNIESLYDIKKMESEMDNHWLYQVDKAISFMI

SEQ ID NO: 85773 - DNA, 1344 bp, Arabidopsis thaliana
  misc_feature (1)..(1344): Ceres Seq. ID no. 12683135
  misc_feature: MA Experiment ID: 108461 Result: Up-regulated in Transcription
  misc_feature: MA Experiment 108461 PARAMETER Experiment Name: At_Germinating_Seeds_cDNA_P Parameter: Age (day) Value: 1 vs. 0
  misc_feature: MA Experiment 108461 PARAMETER Experiment Name: At_Germinating_Seeds_cDNA_P Parameter: Tissue Value: Germinating Seeds
  misc_feature: MA Experiment ID: 108462 Result: Up-regulated in Transcription
  misc_feature: MA Experiment 108462 PARAMETER Experiment Name: At_Germinating_Seeds_cDNA_P Parameter: Age (day) Value: 2 vs. 0
  misc_feature: MA Experiment 108462 PARAMETER Experiment Name: At_Germinating_Seeds_cDNA_P Parameter: Tissue Value: Germinating Seeds
  misc_feature: MA Experiment ID: 108463 Result: Up-regulated in Transcription
  misc_feature: MA Experiment 108463 PARAMETER Experiment Name: At_Germinating_Seeds_cDNA_P Parameter: Age (day) Value: 3 vs. 0
  misc_feature: MA Experiment 108463 PARAMETER Experiment Name: At_Germinating_Seeds_cDNA_P Parameter: Tissue Value: Germinating Seeds
  misc_feature: MA Experiment ID: 108464 Result: Up-regulated in Transcription
  misc_feature: MA Experiment 108464 PARAMETER Experiment Name: At_Germinating_Seeds_cDNA_P Parameter: Age (day) Value: 4 vs. 0
  misc_feature: MA Experiment 108464 PARAMETER Experiment Name: At_Germinating_Seeds_cDNA_P Parameter: Tissue Value: Germinating Seeds
  misc_feature: MA Experiment ID: 108469 Result: Down-regulated in Transcription
  misc_feature: MA Experiment ID: 108501 Result: Up-regulated in Transcription
  misc_feature: MA Experiment 108501 PARAMETER Experiment Name: At_ap2_floral_buds_cDNA_P Parameter: Plant Line Value: ap2 (Ler.)
  misc_feature: MA Experiment 108501 PARAMETER Experiment Name: At_ap2_floral_buds_cDNA_P Parameter: Tissue Value: Closed Flower
  misc_feature: MA Experiment ID: 108561 Result: Down-regulated in Transcription
  misc_feature: MA Experiment 108561 PARAMETER Experiment Name: At_100uM_ABA_cDNA_P Parameter: Timepoint (hr) Value: 6
  misc_feature: MA Experiment 108561 PARAMETER Experiment Name: At_100uM_ABA_cDNA_P Parameter: Tissue Value: Aerial
  misc_feature: MA Experiment 108561 PARAMETER Experiment Name: At_100uM_ABA_cDNA_P Parameter: Treatment Value: 100uM ABA vs. No Treatment
  misc_feature: MA Experiment ID: 108573 Result: Down-regulated in Transcription
  misc_feature: MA Experiment 108573 PARAMETER Experiment Name: At_Drought_cDNA_P Parameter: Timepoint (hr) Value: 6
  misc_feature: MA Experiment 108573 PARAMETER Experiment Name: At_Drought_cDNA_P Parameter: Tissue Value: Aerial
  misc_feature: MA Experiment 108573 PARAMETER Experiment Name: At_Drought_cDNA_P Parameter: Treatment Value: Drought vs. No Drought
  misc_feature: MA Experiment ID: 108576 Result: Down-regulated in Transcription
  misc_feature: MA Experiment 108576 PARAMETER Experiment Name: At_42deg_Heat_cDNA_P Parameter: Temperature (deg C) Value: 42 vs. 22
  misc_feature: MA Experiment 108576 PARAMETER Experiment Name: At_42deg_Heat_cDNA_P Parameter: Timepoint (hr) Value: 1
  misc_feature: MA Experiment 108576 PARAMETER Experiment Name: At_42deg_Heat_cDNA_P Parameter: Tissue Value: Aerial
  misc_feature: MA Experiment ID: 108577 Result: Down-regulated in Transcription
  misc_feature: MA Experiment 108577 PARAMETER Experiment Name: At_42deg_Heat_cDNA_P Parameter: Temperature (deg C) Value: 42 vs. 22
  misc_feature: MA Experiment 108577 PARAMETER Experiment Name: At_42deg_Heat_cDNA_P Parameter: Timepoint (hr) Value: 6
  misc_feature: MA Experiment 108577 PARAMETER Experiment Name: At_42deg_Heat_cDNA_P Parameter: Tissue Value: Aerial
  misc_feature: MA Experiment ID: 108579 Result: Up-regulated in Transcription
  misc_feature: MA Experiment 108579 PARAMETER Experiment Name: At_4deg_Cold_cDNA_P Parameter: Temperature (deg C) Value: 4 vs. 22
  misc_feature: MA Experiment 108579 PARAMETER Experiment Name: At_4deg_Cold_cDNA_P Parameter: Timepoint (hr) Value: 6
  misc_feature: MA Experiment 108579 PARAMETER Experiment Name: At_4deg_Cold_cDNA_P Parameter: Tissue Value: Aerial
  misc_feature: MA Experiment ID: 108585 Result: Down-regulated in Transcription
  misc_feature: MA Experiment 108585 PARAMETER Experiment Name: At_5mM_NaNP_cDNA_P Parameter: Timepoint (hr) Value: 6
  misc_feature: MA Experiment 108585 PARAMETER Experiment Name: At_5mM_NaNP_cDNA_P Parameter: Tissue Value: Aerial
  misc_feature: MA Experiment 108585 PARAMETER Experiment Name: At_5mM_NaNP_cDNA_P Parameter: Treatment Value: null
  misc_feature: MA Experiment ID: 108595 Result: Down-regulated in Transcription
  misc_feature: MA Experiment 108595 PARAMETER Experiment Name: At_Ler-pi_Ovule_cDNA_P Parameter: Plant Line Value: null
  misc_feature: MA Experiment ID: 108605 Result: Down-regulated in Transcription
  misc_feature: MA Experiment 108605 PARAMETER Experiment Name: At_100uM_ABA_cDNA_P Parameter: Timepoint (hr) Value: 6
  misc_feature: MA Experiment 108605 PARAMETER Experiment Name: At_100uM_ABA_cDNA_P Parameter: Tissue Value: Aerial
  misc_feature: MA Experiment 108605 PARAMETER Experiment Name: At_100uM_ABA_cDNA_P Parameter: Treatment Value: 100uM ABA vs. No Treatment
  misc_feature: MA Experiment ID: 108607 Result: Down-regulated in Transcription
  misc_feature: MA Experiment 108607 PARAMETER Experiment Name: At_100uM_ABA_cDNA_P Parameter: Timepoint (hr) Value: 4
  misc_feature: MA Experiment 108607 PARAMETER Experiment Name: At_100uM_ABA_cDNA_P Parameter: Tissue Value: Aerial
  misc_feature: MA Experiment 108607 PARAMETER Experiment Name: At_100uM_ABA_cDNA_P Parameter: Treatment Value: 100uM ABA vs. No Treatment
  misc_feature: MA Experiment ID: 108668 Result: Down-regulated in Transcription
  misc_feature: MA Experiment 108668 PARAMETER Experiment Name: At_2mM_SA_cDNA_P Parameter: Plant Line Value: WS
  misc_feature: MA Experiment 108668 PARAMETER Experiment Name: At_2mM_SA_cDNA_P Parameter: Timepoint (hr) Value: 6
  misc_feature: MA Experiment 108668 PARAMETER Experiment Name: At_2mM_SA_cDNA_P Parameter: Treatment Value: 2mM SA vs. No Treatment
  misc_feature: MA Experiment ID: 20000069 Result: Down-regulated in Transcription
  misc_feature: MA Experiment 20000069 PARAMETER Experiment Name: At_100uM_ABA_Mutants_cDNA_P Parameter: Plant Line Value: CS23
  misc_feature: MA Experiment 20000069 PARAMETER Experiment Name: At_100uM_ABA_Mutants_cDNA_P Parameter: Timepoint (hr) Value: 6
  misc_feature: MA Experiment 20000069 PARAMETER Experiment Name: At_100uM_ABA_Mutants_cDNA_P Parameter: Tissue Value: Aerial
  misc_feature: MA Experiment 20000069 PARAMETER Experiment Name: At_100uM_ABA_Mutants_cDNA_P Parameter: Treatment Value: 100uM ABA vs. No Treatment
  misc_feature: MA Experiment ID: 20000070 Result: Down-regulated in Transcription
  misc_feature: MA Experiment 20000070 PARAMETER Experiment Name: At_100uM_ABA_Mutants_cDNA_P Parameter: Plant Line Value: CS24
  misc_feature: MA Experiment 20000070 PARAMETER Experiment Name: At_100uM_ABA_Mutants_cDNA_P Parameter: Timepoint (hr) Value: 6
  misc_feature: MA Experiment 20000070 PARAMETER Experiment Name: At_100uM_ABA_Mutants_cDNA_P Parameter: Tissue Value: Aerial
  misc_feature: MA Experiment 20000070 PARAMETER Experiment Name: At_100uM_ABA_Mutants_cDNA_P Parameter: Treatment Value: 100uM ABA vs. No Treatment
  misc_feature: MA Experiment ID: 20000071 Result: Down-regulated in Transcription
  misc_feature: MA Experiment 20000071 PARAMETER Experiment Name: At_100uM_ABA_Mutants_cDNA_P Parameter: Plant Line Value: CS8104
  misc_feature: MA Experiment 20000071 PARAMETER Experiment Name: At_100uM_ABA_Mutants_cDNA_P Parameter: Timepoint (hr) Value: 6
  misc_feature: MA Experiment 20000071 PARAMETER Experiment Name: At_100uM_ABA_Mutants_cDNA_P Parameter: Tissue Value: Aerial
  misc_feature: MA Experiment 20000071 PARAMETER Experiment Name: At_100uM_ABA_Mutants_cDNA_P Parameter: Treatment Value: 100uM ABA vs. No Treatment
  misc_feature: MA Experiment ID: 20000072 Result: Down-regulated in Transcription
  misc_feature: MA Experiment 20000072 PARAMETER Experiment Name: At_100uM_ABA_Mutants_cDNA_P Parameter: Plant Line Value: CS8105
  misc_feature: MA Experiment 20000072 PARAMETER Experiment Name: At_100uM_ABA_Mutants_cDNA_P Parameter: Timepoint (hr) Value: 6
  misc_feature: MA Experiment 20000072 PARAMETER Experiment Name: At_100uM_ABA_Mutants_cDNA_P Parameter: Tissue Value: Aerial
  misc_feature: MA Experiment 20000072 PARAMETER Experiment Name: At_100uM_ABA_Mutants_cDNA_P Parameter: Treatment Value: 100uM ABA vs. No Treatment
  misc_feature: MA Experiment ID: 20000086 Result: Down-regulated in Transcription
  misc_feature: MA Experiment 20000086 PARAMETER Experiment Name: At_100uM_ABA_Mutants_cDNA_P Parameter: Plant Line Value: CS22
  misc_feature: MA Experiment 20000086 PARAMETER Experiment Name: At_100uM_ABA_Mutants_cDNA_P Parameter: Timepoint (hr) Value: 6
  misc_feature: MA Experiment 20000086 PARAMETER Experiment Name: At_100uM_ABA_Mutants_cDNA_P Parameter: Tissue Value: Aerial
  misc_feature: MA Experiment 20000086 PARAMETER Experiment Name: At_100uM_ABA_Mutants_cDNA_P Parameter: Treatment Value: 100uM ABA vs. No Treatment
  misc_feature: MA Experiment ID: 20000087 Result: Down-regulated in Transcription
  misc_feature: MA Experiment 20000087 PARAMETER Experiment Name: At_100uM_ABA_Mutants_cDNA_P Parameter: Plant Line Value: WS
  misc_feature: MA Experiment 20000087 PARAMETER Experiment Name: At_100uM_ABA_Mutants_cDNA_P Parameter: Timepoint (hr) Value: 6
  misc_feature: MA Experiment 20000087 PARAMETER Experiment Name: At_100uM_ABA_Mutants_cDNA_P Parameter: Tissue Value: Aerial
  misc_feature: MA Experiment 20000087 PARAMETER Experiment Name: At_100uM_ABA_Mutants_cDNA_P Parameter: Treatment Value: 100uM ABA vs. No Treatment
  misc_feature: MA Experiment ID: 20000088 Result: Down-regulated in Transcription
  misc_feature: MA Experiment 20000088 PARAMETER Experiment Name: At_100uM_ABA_Mutants_cDNA_P Parameter: Plant Line Value: Landsberg
  misc_feature: MA Experiment 20000088 PARAMETER Experiment Name: At_100uM_ABA_Mutants_cDNA_P Parameter: Timepoint (hr) Value: 6
  misc_feature: MA Experiment 20000088 PARAMETER Experiment Name: At_100uM_ABA_Mutants_cDNA_P Parameter: Tissue Value: Aerial
  misc_feature: MA Experiment 20000088 PARAMETER Experiment Name: At_100uM_ABA_Mutants_cDNA_P Parameter: Treatment Value: 100uM ABA vs. No Treatment
  misc_feature: MA Experiment ID: 20000089 Result: Down-regulated in Transcription
  misc_feature: MA Experiment ID: 20000090 Result: Down-regulated in Transcription
  misc_feature: MA Experiment ID: 20000111 Result: Down-regulated in Transcription
  misc_feature: MA Experiment 20000111 PARAMETER Experiment Name: At_42deg_Heat_cDNA_P Parameter: Temperature (deg C) Value: 42 vs. 22
  misc_feature: MA Experiment 20000111 PARAMETER Experiment Name: At_42deg_Heat_cDNA_P Parameter: Timepoint (hr) Value: 6
  misc_feature: MA Experiment 20000111 PARAMETER Experiment Name: At_42deg_Heat_cDNA_P Parameter: Tissue Value: Aerial
  misc_feature: MA Experiment ID: 20000113 Result: Down-regulated in Transcription
  misc_feature: MA Experiment 20000113 PARAMETER Experiment Name: At_42deg_Heat_cDNA_P Parameter: Temperature (deg C) Value: 42 vs. 22
  misc_feature: MA Experiment 20000113 PARAMETER Experiment Name: At_42deg_Heat_cDNA_P Parameter: Timepoint (hr) Value: 8
  misc_feature: MA Experiment 20000113 PARAMETER Experiment Name: At_42deg_Heat_cDNA_P Parameter: Tissue Value: Aerial
  misc_feature: MA Experiment ID: 20000117 Result: Down-regulated in Transcription
  misc_feature: MA Experiment 20000117 PARAMETER Experiment Name: At_100uM_ABA_Mutants_cDNA_P Parameter: Plant Line Value: Columbia
  misc_feature: MA Experiment 20000117 PARAMETER Experiment Name: At_100uM_ABA_Mutants_cDNA_P Parameter: Timepoint (hr) Value: 6
  misc_feature: MA Experiment 20000117 PARAMETER Experiment Name: At_100uM_ABA_Mutants_cDNA_P Parameter: Tissue Value: Aerial
  misc_feature: MA Experiment 20000117 PARAMETER Experiment Name: At_100uM_ABA_Mutants_cDNA_P Parameter: Treatment Value: 100uM ABA vs. No Treatment
  misc_feature: MA Experiment ID: 20000144 Result: Down-regulated in Transcription
  misc_feature: MA Experiment 20000144 PARAMETER Experiment Name: At_42deg_Heat_cDNA_P Parameter: Temperature (deg C) Value: 42 vs. 22
  misc_feature: MA Experiment 20000144 PARAMETER Experiment Name: At_42deg_Heat_cDNA_P Parameter: Timepoint (hr) Value: 1
  misc_feature: MA Experiment 20000144 PARAMETER Experiment Name: At_42deg_Heat_cDNA_P Parameter: Tissue Value: Aerial
  misc_feature: MA Experiment ID: 20000169 Result: Down-regulated in Transcription
  misc_feature: MA Experiment 20000169 PARAMETER Experiment Name: At_100uM_ABA_P Parameter: Age (day) Value: 14
  misc_feature: MA Experiment 20000169 PARAMETER Experiment Name: At_100uM_ABA_P Parameter: Organism Value: A. thaliana
  misc_feature: MA Experiment 20000169 PARAMETER Experiment Name: At_100uM_ABA_P Parameter: Plant Line Value: WS
  misc_feature: MA Experiment 20000169 PARAMETER Experiment Name: At_100uM_ABA_P Parameter: Timepoint (hr) Value: 6
  misc_feature: MA Experiment 20000169 PARAMETER Experiment Name: At_100uM_ABA_P Parameter: Tissue Value: Aerial
  misc_feature: MA Experiment 20000169 PARAMETER Experiment Name: At_100uM_ABA_P Parameter: Treatment Value: 100uM ABA vs. No Treatment
  misc_feature: MA Experiment ID: 20000171 Result: Down-regulated in Transcription
  misc_feature: MA Experiment 20000171 PARAMETER Experiment Name: At_42deg_Heat_P Parameter: Age (day) Value: 14
  misc_feature: MA Experiment 20000171 PARAMETER Experiment Name: At_42deg_Heat_P Parameter: Organism Value: A. thaliana
  misc_feature: MA Experiment 20000171 PARAMETER Experiment Name: At_42deg_Heat_P Parameter: Plant Line Value: WS
  misc_feature: MA Experiment 20000171 PARAMETER Experiment Name: At_42deg_Heat_P Parameter: Temperature (deg C) Value: 42 vs. 22
  misc_feature: MA Experiment 20000171 PARAMETER Experiment Name: At_42deg_Heat_P Parameter: Timepoint (hr) Value: 1
  misc_feature: MA Experiment 20000171 PARAMETER Experiment Name: At_42deg_Heat_P Parameter: Tissue Value: Aerial
  misc_feature: MA Experiment ID: 20000173 Result: Down-regulated in Transcription
  misc_feature: MA Experiment 20000173 PARAMETER Experiment Name: At_42deg_Heat_P Parameter: Age (day) Value: 14
  misc_feature: MA Experiment 20000173 PARAMETER Experiment Name: At_42deg_Heat_P Parameter: Organism Value: A. thaliana
  misc_feature: MA Experiment 20000173 PARAMETER Experiment Name: At_42deg_Heat_P Parameter: Plant Line Value: WS
  misc_feature: MA Experiment 20000173 PARAMETER Experiment Name: At_42deg_Heat_P Parameter: Temperature (deg C) Value: 42 vs. 22
  misc_feature: MA Experiment 20000173 PARAMETER Experiment Name: At_42deg_Heat_P Parameter: Timepoint (hr) Value: 6
  misc_feature: MA Experiment 20000173 PARAMETER Experiment Name: At_42deg_Heat_P Parameter: Tissue Value: Aerial
  misc_feature: MA Experiment ID: 20000180 Result: Up-regulated in Transcription
  misc_feature: MA Experiment 20000180 PARAMETER Experiment Name: At_Germinating_Seeds_P Parameter: Age (hr) Value: 24 vs. 0
  misc_feature: MA Experiment 20000180 PARAMETER Experiment Name: At_Germinating_Seeds_P Parameter: Tissue Value: Germinating Seeds
  misc_feature: MA Experiment ID: 20000182 Result: Down-regulated in Transcription
  misc_feature: MA Experiment 20000182 PARAMETER Experiment Name: At_2mM_SA_P Parameter: Age (day) Value: 14
  misc_feature: MA Experiment 20000182 PARAMETER Experiment Name: At_2mM_SA_P Parameter: Organism Value: A. thaliana
  misc_feature: MA Experiment 20000182 PARAMETER Experiment Name: At_2mM_SA_P Parameter: Plant Line Value: WS
  misc_feature: MA Experiment 20000182 PARAMETER Experiment Name: At_2mM_SA_P Parameter: Timepoint (hr) Value: 6
  misc_feature: MA Experiment 20000182 PARAMETER Experiment Name: At_2mM_SA_P Parameter: Tissue Value: Aerial
  misc_feature: MA Experiment 20000182 PARAMETER Experiment Name: At_2mM_SA_P Parameter: Treatment Value: 2mM SA vs. No Treatment
  misc_feature: MA Experiment ID: 20000184 Result: Up-regulated in Transcription
  misc_feature: MA Experiment 20000184 PARAMETER Experiment Name: At_Shoots__P Parameter: Age (day) Value: 7
  misc_feature: MA Experiment 20000184 PARAMETER Experiment Name: At_Shoots__P Parameter: Tissue Value: Shoots vs. Whole Plant
  misc_feature: MA Experiment ID: 20000185 Result: Down-regulated in Transcription
  misc_feature: MA Experiment 20000185 PARAMETER Experiment Name: At_Roots__P Parameter: Age (day) Value: 7 vs. 21
  misc_feature: MA Experiment 20000185 PARAMETER Experiment Name: At_Roots__P Parameter: Organism Value: A. thaliana
  misc_feature: MA Experiment 20000185 PARAMETER Experiment Name: At_Roots__P Parameter: Tissue Value: Roots vs. Whole Plant
  misc_feature: MA Experiment ID: 20000235 Result: Up-regulated in Transcription
  misc_feature: MA Experiment 20000235 PARAMETER Experiment Name: At_Siliques_P Parameter: Age (day) Value: 21
  misc_feature: MA Experiment 20000235 PARAMETER Experiment Name: At_Siliques_P Parameter: Organism Value: A. thaliana
  misc_feature: MA Experiment 20000235 PARAMETER Experiment Name: At_Siliques_P Parameter: Plant Line Value: WS
  misc_feature: MA Experiment 20000235 PARAMETER Experiment Name: At_Siliques_P Parameter: Tissue Value: 5-10mm Siliques vs. Whole Plant
  misc_feature: MA Experiment ID: 20000265 Result: Down-regulated in Transcription
  misc_feature: MA Experiment 20000265 PARAMETER Experiment Name: At_Open_Flower_P Parameter: Age (day) Value: 21
  misc_feature: MA Experiment 20000265 PARAMETER Experiment Name: At_Open_Flower_P Parameter: Plant Line Value: WS
  misc_feature: MA Experiment 20000265 PARAMETER Experiment Name: At_Open_Flower_P Parameter: Tissue Value: Closed Flower vs. Whole Plant
  misc_feature: MA Experiment ID: 20000267 Result: Down-regulated in Transcription
  misc_feature: MA Experiment 20000267 PARAMETER Experiment Name: At_Drought_P Parameter: Age (day) Value: 7
  misc_feature: MA Experiment 20000267 PARAMETER Experiment Name: At_Drought_P Parameter: Organism Value: A. thaliana
  misc_feature: MA Experiment 20000267 PARAMETER Experiment Name: At_Drought_P Parameter: Plant Line Value: WS
  misc_feature: MA Experiment 20000267 PARAMETER Experiment Name: At_Drought_P Parameter: Timepoint (hr) Value: 6
  misc_feature: MA Experiment 20000267 PARAMETER Experiment Name: At_Drought_P Parameter: Tissue Value: Whole Plant
  misc_feature: MA Experiment 20000267 PARAMETER Experiment Name: At_Drought_P Parameter: Treatment Value: Drought vs. No Drought
  misc_feature: MA Experiment ID: 20000268 Result: Down-regulated in Transcription
  misc_feature: MA Experiment 20000268 PARAMETER Experiment Name: At_100mM_NaCl__P Parameter: Age (day) Value: 14
  misc_feature: MA Experiment 20000268 PARAMETER Experiment Name: At_100mM_NaCl__P Parameter: Organism Value: A. thaliana
  misc_feature: MA Experiment 20000268 PARAMETER Experiment Name: At_100mM_NaCl__P Parameter: Plant Line Value: WS
  misc_feature: MA Experiment 20000268 PARAMETER Experiment Name: At_100mM_NaCl__P Parameter: Timepoint (hr) Value: 6
  misc_feature: MA Experiment 20000268 PARAMETER Experiment Name: At_100mM_NaCl__P Parameter: Tissue Value: Whole Plant
  misc_feature: MA Experiment 20000268 PARAMETER Experiment Name: At_100mM_NaCl__P Parameter: Treatment Value: 100mM NaCl vs. No Treatment
  misc_feature: MA Experiment ID: 20000286 Result: Down-regulated in Transcription
  misc_feature: MA Experiment 20000286 PARAMETER Experiment Name: At_Open_Flower_P Parameter: Age (day) Value: 21
  misc_feature: MA Experiment 20000286 PARAMETER Experiment Name: At_Open_Flower_P Parameter: Plant Line Value: WS
  misc_feature: MA Experiment 20000286 PARAMETER Experiment Name: At_Open_Flower_P Parameter: Tissue Value: Half Open vs. Whole Plant
  misc_feature: MA Experiment ID: 20000436 Result: Down-regulated in Transcription
  misc_feature: MA Experiment 20000436 PARAMETER Experiment Name: At_Drought_P Parameter: Age (day) Value: 7
  misc_feature: MA Experiment 20000436 PARAMETER Experiment Name: At_Drought_P Parameter: Organism Value: A. thaliana
  misc_feature: MA Experiment 20000436 PARAMETER Experiment Name: At_Drought_P Parameter: Plant Line Value: WS
  misc_feature: MA Experiment 20000436 PARAMETER Experiment Name: At_Drought_P Parameter: Timepoint (hr) Value: 12
  misc_feature: MA Experiment 20000436 PARAMETER Experiment Name: At_Drought_P Parameter: Tissue Value: Whole Plant
  misc_feature: MA Experiment 20000436 PARAMETER Experiment Name: At_Drought_P Parameter: Treatment Value: Drought vs. No Drought
  misc_feature: MA Experiment ID: 20000437 Result: Down-regulated in Transcription
  misc_feature: MA Experiment 20000437 PARAMETER Experiment Name: At_Drought_P Parameter: Age (day) Value: 8
  misc_feature: MA Experiment 20000437 PARAMETER Experiment Name: At_Drought_P Parameter: Organism Value: A. thaliana
  misc_feature: MA Experiment 20000437 PARAMETER Experiment Name: At_Drought_P Parameter: Plant Line Value: WS
  misc_feature: MA Experiment 20000437 PARAMETER Experiment Name: At_Drought_P Parameter: Timepoint (hr) Value: 24
  misc_feature: MA Experiment 20000437 PARAMETER Experiment Name: At_Drought_P Parameter: Tissue Value: Whole Plant
  misc_feature: MA Experiment 20000437 PARAMETER Experiment Name: At_Drought_P Parameter: Treatment Value: Drought vs. No Drought
  misc_feature: MA Experiment ID: 20000438 Result: Up-regulated in Transcription
  misc_feature: MA Experiment 20000438 PARAMETER Experiment Name: At_Shoots__P Parameter: Age (day) Value: 14
  misc_feature: MA Experiment 20000438 PARAMETER Experiment Name: At_Shoots__P Parameter: Tissue Value: Shoots vs. Whole Plant
  misc_feature: MA Experiment ID: 20000439 Result: Down-regulated in Transcription
  misc_feature: MA Experiment 20000439 PARAMETER Experiment Name: At_Roots__P Parameter: Age (day) Value: 14 vs. 21
  misc_feature: MA Experiment 20000439 PARAMETER Experiment Name: At_Roots__P Parameter: Organism Value: A. thaliana
  misc_feature: MA Experiment 20000439 PARAMETER Experiment Name: At_Roots__P Parameter: Tissue Value: Roots vs. Whole Plant
  misc_feature: MA Experiment ID: 20000445 Result: Down-regulated in Transcription
  misc_feature: MA Experiment 20000445 PARAMETER Experiment Name: At_100uM_NAA__P Parameter: Age (day) Value: 14
  misc_feature: MA Experiment 20000445 PARAMETER Experiment Name: At_100uM_NAA__P Parameter: Organism Value: A. thaliana
  misc_feature: MA Experiment 20000445 PARAMETER Experiment Name: At_100uM_NAA__P Parameter: Plant Line Value: WS
  misc_feature: MA Experiment 20000445 PARAMETER Experiment Name: At_100uM_NAA__P Parameter: Timepoint (hr) Value: 6
  misc_feature: MA Experiment 20000445 PARAMETER Experiment Name: At_100uM_NAA__P Parameter: Tissue Value: Aerial
  misc_feature: MA Experiment 20000445 PARAMETER Experiment Name: At_100uM_NAA__P Parameter: Treatment Value: 100uM NAA vs. No Treatment
  misc_feature: MA Experiment ID: 20000451 Result: Up-regulated in Transcription
  misc_feature: MA Experiment 20000451 PARAMETER Experiment Name: At_CS6879_Shoots-Roots_P Parameter: Age (day) Value: 14
  misc_feature: MA Experiment 20000451 PARAMETER Experiment Name: At_CS6879_Shoots-Roots_P Parameter: Organism Value: A. thaliana
  misc_feature: MA Experiment 20000451 PARAMETER Experiment Name: At_CS6879_Shoots-Roots_P Parameter: Plant Line Value: CS6879 vs. WS
  misc_feature: MA Experiment 20000451 PARAMETER Experiment Name: At_CS6879_Shoots-Roots_P Parameter: Tissue Value: Roots
  misc_feature: MA Experiment ID: 20000573 Result: Down-regulated in Transcription
  misc_feature: MA Experiment 20000573 PARAMETER Experiment Name: At_100uM_ABA_Mutants__P Parameter: Organism Value: A. thaliana
  misc_feature: MA Experiment 20000573 PARAMETER Experiment Name: At_100uM_ABA_Mutants__P Parameter: Plant Line Value: CS22 vs. Ler wt
  misc_feature: MA Experiment 20000573 PARAMETER Experiment Name: At_100uM_ABA_Mutants__P Parameter: Timepoint (hr) Value: N/A
  misc_feature: MA Experiment 20000573 PARAMETER Experiment Name: At_100uM_ABA_Mutants__P Parameter: Tissue Value: Whole Plant
  misc_feature: MA Experiment 20000573 PARAMETER Experiment Name: At_100uM_ABA_Mutants__P Parameter: Treatment Value: None
  misc_feature: MA Experiment ID: 20000574 Result: Down-regulated in Transcription
  misc_feature: MA Experiment 20000574 PARAMETER Experiment Name: At_100uM_ABA_Mutants__P Parameter: Organism Value: A. thaliana
  misc_feature: MA Experiment 20000574 PARAMETER Experiment Name: At_100uM_ABA_Mutants__P Parameter: Plant Line Value: CS23 vs. Ler wt
  misc_feature: MA Experiment 20000574 PARAMETER Experiment Name: At_100uM_ABA_Mutants__P Parameter: Timepoint (hr) Value: N/A
  misc_feature: MA Experiment 20000574 PARAMETER Experiment Name: At_100uM_ABA_Mutants__P Parameter: Tissue Value: Whole Plant
  misc_feature: MA Experiment 20000574 PARAMETER Experiment Name: At_100uM_ABA_Mutants__P Parameter: Treatment Value: None
  misc_feature: MA Experiment ID: 20000794 Result: Down-regulated in Transcription
  misc_feature: MA Experiment 20000794 PARAMETER Experiment Name: At_Petals_P Parameter: Age (day) Value: 23-25 days
  misc_feature: MA Experiment 20000794 PARAMETER Experiment Name: At_Petals_P Parameter: Plant Line Value: WS
  misc_feature: MA Experiment 20000794 PARAMETER Experiment Name: At_Petals_P Parameter: Tissue Value: Petals vs. Whole plant
  misc_feature: MA Experiment ID: 20001248 Result: Down-regulated in Transcription
  misc_feature: MA Experiment 20001248 PARAMETER Experiment Name: At_Far-red-induction_P Parameter: Age (day) Value: 7
  misc_feature: MA Experiment 20001248 PARAMETER Experiment Name: At_Far-red-induction_P Parameter: Light Value: Far-red vs. White
  misc_feature: MA Experiment 20001248 PARAMETER Experiment Name: At_Far-red-induction_P Parameter: Organism Value: A. thaliana
  misc_feature: MA Experiment 20001248 PARAMETER Experiment Name: At_Far-red-induction_P Parameter: Plant Line Value: Columbia
  misc_feature: MA Experiment 20001248 PARAMETER Experiment Name: At_Far-red-induction_P Parameter: Timepoint (hr) Value: 4
  misc_feature: MA Experiment 20001248 PARAMETER Experiment Name: At_Far-red-induction_P Parameter: Tissue Value: Whole Plant
  misc_feature: MA Experiment ID: 20001554 Result: Down-regulated in Transcription
  misc_feature: MA Experiment 20001554 PARAMETER Experiment Name: At_Drought_Soil_Dry_P Parameter: Age (day) Value: 21
  misc_feature: MA Experiment 20001554 PARAMETER Experiment Name: At_Drought_Soil_Dry_P Parameter: Organism Value: A. thaliana
  misc_feature: MA Experiment 20001554 PARAMETER Experiment Name: At_Drought_Soil_Dry_P Parameter: Plant Line Value: WS
  misc_feature: MA Experiment 20001554 PARAMETER Experiment Name: At_Drought_Soil_Dry_P Parameter: Post Timepoint (hr) Value: None
  misc_feature: MA Experiment 20001554 PARAMETER Experiment Name: At_Drought_Soil_Dry_P Parameter: Post-Treatment Value: None
  misc_feature: MA Experiment 20001554 PARAMETER Experiment Name: At_Drought_Soil_Dry_P Parameter: Timepoint (day) Value: 7
  misc_feature: MA Experiment 20001554 PARAMETER Experiment Name: At_Drought_Soil_Dry_P Parameter: Treatment Value: Drought vs. No Drought
  misc_feature: MA Experiment ID: 20001555 Result: Down-regulated in Transcription
  misc_feature: MA Experiment 20001555 PARAMETER Experiment Name: At_Drought_Soil_Dry_P Parameter: Age (day) Value: 24
  misc_feature: MA Experiment 20001555 PARAMETER Experiment Name: At_Drought_Soil_Dry_P Parameter: Organism Value: A. thaliana
  misc_feature: MA Experiment 20001555 PARAMETER Experiment Name: At_Drought_Soil_Dry_P Parameter: Plant Line Value: WS
  misc_feature: MA Experiment 20001555 PARAMETER Experiment Name: At_Drought_Soil_Dry_P Parameter: Post Timepoint (hr) Value: None
  misc_feature: MA Experiment 20001555 PARAMETER Experiment Name: At_Drought_Soil_Dry_P Parameter: Post-Treatment Value: None
  misc_feature: MA Experiment 20001555 PARAMETER Experiment Name: At_Drought_Soil_Dry_P Parameter: Timepoint (day) Value: 10
  misc_feature: MA Experiment 20001555 PARAMETER Experiment Name: At_Drought_Soil_Dry_P Parameter: Treatment Value: Drought vs. No Drought
  misc_feature: MA Experiment ID: 20001556 Result: Down-regulated in Transcription
  misc_feature: MA Experiment 20001556 PARAMETER Experiment Name: At_Drought_Soil_Dry_P Parameter: Age (day) Value: 26
  misc_feature: MA Experiment 20001556 PARAMETER Experiment Name: At_Drought_Soil_Dry_P Parameter: Organism Value: A. thaliana
  misc_feature: MA Experiment 20001556 PARAMETER Experiment Name: At_Drought_Soil_Dry_P Parameter: Plant Line Value: WS
  misc_feature: MA Experiment 20001556 PARAMETER Experiment Name: At_Drought_Soil_Dry_P Parameter: Post Timepoint (hr) Value: None
  misc_feature: MA Experiment 20001556 PARAMETER Experiment Name: At_Drought_Soil_Dry_P Parameter: Post-Treatment Value: None
  misc_feature: MA Experiment 20001556 PARAMETER Experiment Name: At_Drought_Soil_Dry_P Parameter: Timepoint (day) Value: 12
  misc_feature: MA Experiment 20001556 PARAMETER Experiment Name: At_Drought_Soil_Dry_P Parameter: Treatment Value: Drought vs. No Drought
  misc_feature: MA Experiment ID: 20001558 Result: Up-regulated in Transcription
  misc_feature: MA Experiment 20001558 PARAMETER Experiment Name: At_Drought_Soil_Dry_P Parameter: Age (day) Value: 27
  misc_feature: MA Experiment 20001558 PARAMETER Experiment Name: At_Drought_Soil_Dry_P Parameter: Organism Value: A. thaliana
  misc_feature: MA Experiment 20001558 PARAMETER Experiment Name: At_Drought_Soil_Dry_P Parameter: Plant Line Value: WS
  misc_feature: MA Experiment 20001558 PARAMETER Experiment Name: At_Drought_Soil_Dry_P Parameter: Post Timepoint (hr) Value: 6
  misc_feature: MA Experiment 20001558 PARAMETER Experiment Name: At_Drought_Soil_Dry_P Parameter: Post-Treatment Value: Re-Water vs. No Drought
  misc_feature: MA Experiment 20001558 PARAMETER Experiment Name: At_Drought_Soil_Dry_P Parameter: Timepoint (day) Value: 13
  misc_feature: MA Experiment 20001558 PARAMETER Experiment Name: At_Drought_Soil_Dry_P Parameter: Treatment Value: Drought vs. No Drought
  misc_feature: MA Experiment ID: 20001560 Result: Up-regulated in Transcription
  misc_feature: MA Experiment 20001560 PARAMETER Experiment Name: At_Drought_Soil_Dry_P Parameter: Age (day) Value: 28
  misc_feature: MA Experiment 20001560 PARAMETER Experiment Name: At_Drought_Soil_Dry_P Parameter: Organism Value: A. thaliana
  misc_feature: MA Experiment 20001560 PARAMETER Experiment Name: At_Drought_Soil_Dry_P Parameter: Plant Line Value: WS
  misc_feature: MA Experiment 20001560 PARAMETER Experiment Name: At_Drought_Soil_Dry_P Parameter: Post Timepoint (hr) Value: None
  misc_feature: MA Experiment 20001560 PARAMETER Experiment Name: At_Drought_Soil_Dry_P Parameter: Post-Treatment Value: None
  misc_feature: MA Experiment 20001560 PARAMETER Experiment Name: At_Drought_Soil_Dry_P Parameter: Timepoint (day) Value: 14
  misc_feature: MA Experiment 20001560 PARAMETER Experiment Name: At_Drought_Soil_Dry_P Parameter: Treatment Value: Drought vs. No Drought
  misc_feature: MA Experiment ID: 20001904 Result: Down-regulated in Transcription
  misc_feature: MA Experiment 20001904 PARAMETER Experiment Name: At_Drought_Reproduction_P Parameter: Age (day) Value: 37
  misc_feature: MA Experiment 20001904 PARAMETER Experiment Name: At_Drought_Reproduction_P Parameter: Organism Value: A. thaliana
  misc_feature: MA Experiment 20001904 PARAMETER Experiment Name: At_Drought_Reproduction_P Parameter: Plant Line Value: WS
  misc_feature: MA Experiment 20001904 PARAMETER Experiment Name: At_Drought_Reproduction_P Parameter: Timepoint (day) Value: 7
  misc_feature: MA Experiment 20001904 PARAMETER Experiment Name: At_Drought_Reproduction_P Parameter: Tissue Value: Rosettes
  misc_feature: MA Experiment 20001904 PARAMETER Experiment Name: At_Drought_Reproduction_P Parameter: Treatment Value: Drought vs. No Drought
  misc_feature: MA Experiment ID: 20001905 Result: Down-regulated in Transcription
  misc_feature: MA Experiment 20001905 PARAMETER Experiment Name: At_Drought_Reproduction_P Parameter: Age (day) Value: 40
  misc_feature: MA Experiment 20001905 PARAMETER Experiment Name: At_Drought_Reproduction_P Parameter: Organism Value: A. thaliana
  misc_feature: MA Experiment 20001905 PARAMETER Experiment Name: At_Drought_Reproduction_P Parameter: Plant Line Value: WS
  misc_feature: MA Experiment 20001905 PARAMETER Experiment Name: At_Drought_Reproduction_P Parameter: Timepoint (day) Value: 10
  misc_feature: MA Experiment 20001905 PARAMETER Experiment Name: At_Drought_Reproduction_P Parameter: Tissue Value: Rosettes
  misc_feature: MA Experiment 20001905 PARAMETER Experiment Name: At_Drought_Reproduction_P Parameter: Treatment Value: Drought vs. No Drought
  misc_feature: MA Experiment ID: 20001906 Result: Down-regulated in Transcription
  misc_feature: MA Experiment 20001906 PARAMETER Experiment Name: At_Drought_Reproduction_P Parameter: Age (day) Value: 35
  misc_feature: MA Experiment 20001906 PARAMETER Experiment Name: At_Drought_Reproduction_P Parameter: Organism Value: A. thaliana
  misc_feature: MA Experiment 20001906 PARAMETER Experiment Name: At_Drought_Reproduction_P Parameter: Plant Line Value: WS
  misc_feature: MA Experiment 20001906 PARAMETER Experiment Name: At_Drought_Reproduction_P Parameter: Timepoint (day) Value: 5
  misc_feature: MA Experiment 20001906 PARAMETER Experiment Name: At_Drought_Reproduction_P Parameter: Tissue Value: Siliques
  misc_feature: MA Experiment 20001906 PARAMETER Experiment Name: At_Drought_Reproduction_P Parameter: Treatment Value: Drought vs. No Drought
  misc_feature: MA Experiment ID: 20001911 Result: Down-regulated in Transcription
  misc_feature: MA Experiment 20001911 PARAMETER Experiment Name: At_Drought_Reproduction_P Parameter: Age (day) Value: 40
  misc_feature: MA Experiment 20001911 PARAMETER Experiment Name: At_Drought_Reproduction_P Parameter: Organism Value: A. thaliana
  misc_feature: MA Experiment 20001911 PARAMETER Experiment Name: At_Drought_Reproduction_P Parameter: Plant Line Value: WS
  misc_feature: MA Experiment 20001911 PARAMETER Experiment Name: At_Drought_Reproduction_P Parameter: Timepoint (day) Value: 10
  misc_feature: MA Experiment 20001911 PARAMETER Experiment Name: At_Drought_Reproduction_P Parameter: Tissue Value: Flowers
  misc_feature: MA Experiment 20001911 PARAMETER Experiment Name: At_Drought_Reproduction_P Parameter: Treatment Value: Drought vs. No Drought
cacatttcaccacaacgaccaccactcctacactaacacttatatcaccaacacattgtgttctactatacataaaattcagttcctaagtatttttgttttgttttgtgagatcgatggagagttacttgaggaaatggtgtttagtttctgtgtgggttttgcttttaggtttagggtttaaggtaaaagcagagcctcaagttccatgttacttcatctttggtgattctttggttgacaatggaaacaacaatcgtcttagatctattgcaagagccgattatttcccttacggcatcgatttcggcggccccaccggccgtttttccaacggcagaaccaccgtcgacgttctcactgagctacttggatttgataactacattcctgcgtatagtactgtgagtggccaagagatacttcaaggagtcaactacgcatctgcagctgctggaatcagagaagaaaccggtgcacaattgggacaaaggataacatttagtgggcaagtagagaattataagaacacagtggcacaagtggtggagattcttggagacgagtacactgcagcagattaccttaagagatgcatttactctgttggtatgggaagcaatgactatcttaataactacttcatgcctcagttctactccactagcagacagtacactcccgaacagtatgctgacgatcttatcagtcgttacagggaccagcttaatgcactgtacaactatggagctagaaagtttgcattggtaggaattggagccattggatgtagtccgaatgcgctcgcacagggcagccaagacggaacaacttgtgtggagcgtatcaactcggccaaccgaatcttcaacaacaggctcatatctatggtccaacaactaaacaacgctcattccgatgctagtttcacttacatcaatgcttatggcgcttttcaggatataatcgccaatccctctgcttatgggtttacgaatacgaacactgcgtgttgcggaattggaaggaacggaggtcagctaacatgtttaccgggagaacccccgtgcttgaaccgagatgagtacgtgttttgggatgcatttcatccttcggctgctgcaaacacggccattgcaaaaagatcttacaatgcacaaagatcttccgacgtttatccgattgatatctcgcaattagcacagctttgaaaggacagagaataggagagttttacaacaattgtatgcttttcaggttataaattgaattattggaaatgattctgatgttatgtgtgtacccaaagtgttcaactttataaaaaaaaatagggattgcatt

SEQ ID NO: 85774 - protein, 364 aa, Arabidopsis thaliana; identical to SEQ ID NO: 27554
  peptide (1)..(364): Ceres Seq. ID no. 12683136
  misc_feature (33)..(344): Pfam Name: GDSL-like Lipase/Acylhydrolase Pfam Description: GDSL-like Lipase/Acylhydrolase
  misc_feature (1)..(364): Homolog of NCBI NO: 15220512 NR Description: lipase/hydrolase, putative; protein id: supported by cDNA: 6680., supported by cDNA: gi_15215767
  misc_feature (1)..(364): Homolog of NCBI NO: 21594055 NR Description: lipase/hydrolase, putative [Arabidopsis thaliana]
  misc_feature (1)..(364): Homolog of NCBI NO: 15220514 NR Description: lipase/hydrolase, putative; protein id: supported by cDNA: 23556., supported by cDNA: gi_18086454
  misc_feature (1)..(364): Homolog of NCBI NO: 21592417 NR Description: lipase/hydrolase, putative [Arabidopsis thaliana]
  misc_feature (1)..(364): Homolog of NCBI NO: 7485419 NR Description: hypothetical protein F13C5.140 - Arabidopsis >gi|2832625|emb|CAA16754.1| putative protein [Arabidopsis >gi|7268691|emb|CAB78899.1| putative protein [Arabidopsis
  misc_feature (11)..(364): Homolog of NCBI NO: 18415211 NR Description: Expressed protein; protein id: At4g18970.1, by cDNA: 42850., supported by cDNA: gi_16604576, supported by gi_21281049 [Arabidopsis thaliana] >gi|16604577|gb|AAL24090.1|
  misc_feature (11)..(364): Homolog of NCBI NO: 21618199 NR Description: GDSL-motif lipase/hydrolase-like protein
  misc_feature (10)..(364): Homolog of NCBI NO: 15242458 NR Description: GDSL-motif lipase/hydrolase-like protein; protein At5g45670.1, supported by cDNA: 18389., supported by cDNA:
  misc_feature (10)..(364): Homolog of NCBI NO: 21553940 NR Description: GDSL-motif lipase/hydrolase-like protein
  misc_feature (34)..(351): Homolog of NCBI NO: 30693137 NR Description: lipase family [Arabidopsis thaliana]

SEQ ID NO: 85775 - protein, 199 aa, Arabidopsis thaliana; identical to SEQ ID NO: 27555
  peptide (1)..(199): Ceres Seq. ID no. 12683137
  misc_feature (1)..(179): Pfam Name: GDSL-like Lipase/Acylhydrolase Pfam Description: GDSL-like Lipase/Acylhydrolase
  misc_feature (1)..(199): Homolog of NCBI NO: 15220512 NR Description: lipase/hydrolase, putative; protein id: supported by cDNA: 6680., supported by cDNA: gi_15215767
  misc_feature (1)..(199): Homolog of NCBI NO: 21594055 NR Description: lipase/hydrolase, putative [Arabidopsis thaliana]
  misc_feature (1)..(199): Homolog of NCBI NO: 15220514 NR Description: lipase/hydrolase, putative; protein id: supported by cDNA: 23556., supported by cDNA: gi_18086454
  misc_feature (1)..(199): Homolog of NCBI NO: 21592417 NR Description: lipase/hydrolase, putative [Arabidopsis thaliana]
  misc_feature (1)..(199): Homolog of NCBI NO: 7485419 NR Description: hypothetical protein F13C5.140 - Arabidopsis >gi|2832625|emb|CAA16754.1| putative protein [Arabidopsis >gi|7268691|emb|CAB78899.1| putative protein [Arabidopsis
  misc_feature (1)..(199): Homolog of NCBI NO: 18415211 NR Description: Expressed protein; protein id: At4g18970.1, by cDNA: 42850., supported by cDNA: gi_16604576, supported by gi_21281049 [Arabidopsis thaliana] >gi|16604577|gb|AAL24090.1|
  misc_feature (1)..(199): Homolog of NCBI NO: 21618199 NR Description: GDSL-motif lipase/hydrolase-like protein
  misc_feature (1)..(199): Homolog of NCBI NO: 15242458 NR Description: GDSL-motif lipase/hydrolase-like protein; protein At5g45670.1, supported by cDNA: 18389., supported by cDNA:
  misc_feature (1)..(199): Homolog of NCBI NO: 21553940 NR Description: GDSL-motif lipase/hydrolase-like protein
  misc_feature (1)..(186): Homolog of NCBI NO: 30693137 NR Description: lipase family [Arabidopsis thaliana]

SEQ ID NO: 85776 - protein, 188 aa, Arabidopsis thaliana; identical to SEQ ID NO: 27556
  peptide (1)..(188): Ceres Seq. ID no. 12683138
  misc_feature (1)..(168): Pfam Name: GDSL-like Lipase/Acylhydrolase Pfam Description: GDSL-like Lipase/Acylhydrolase
  misc_feature (1)..(188): Homolog of NCBI NO: 15220512 NR Description: lipase/hydrolase, putative; protein id: supported by cDNA: 6680., supported by cDNA: gi_15215767
  misc_feature (1)..(188): Homolog of NCBI NO: 21594055 NR Description: lipase/hydrolase, putative [Arabidopsis thaliana]
  misc_feature (1)..(188): Homolog of NCBI NO: 15220514 NR Description: lipase/hydrolase, putative; protein id: supported by cDNA: 23556., supported by cDNA: gi_18086454
  misc_feature (1)..(188): Homolog of NCBI NO: 21592417 NR Description: lipase/hydrolase, putative [Arabidopsis thaliana]
  misc_feature (1)..(188): Homolog of NCBI NO: 7485419 NR Description: hypothetical protein F13C5.140 - Arabidopsis >gi|2832625|emb|CAA16754.1| putative protein [Arabidopsis >gi|7268691|emb|CAB78899.1| putative protein [Arabidopsis
  misc_feature (1)..(188): Homolog of NCBI NO: 18415211 NR Description: Expressed protein; protein id: At4g18970.1, by cDNA: 42850., supported by cDNA: gi_16604576, supported by gi_21281049 [Arabidopsis thaliana] >gi|16604577|gb|AAL24090.1|
  misc_feature (1)..(188): Homolog of NCBI NO: 21618199 NR Description: GDSL-motif lipase/hydrolase-like protein
  misc_feature (1)..(188): Homolog of NCBI NO: 15242458 NR Description: GDSL-motif lipase/hydrolase-like protein; protein At5g45670.1, supported by cDNA: 18389., supported by cDNA:
  misc_feature (1)..(188): Homolog of NCBI NO: 21553940 NR Description: GDSL-motif lipase/hydrolase-like protein
  misc_feature (1)..(175): Homolog of NCBI NO: 30693137 NR Description: lipase family [Arabidopsis thaliana]

SEQ ID NO: 85777 - DNA, 1288 bp, Arabidopsis thaliana
  misc_feature (1)..(1288): Ceres Seq. ID no. 12683139
  misc_feature: MA Experiment ID: 108461 Result: Up-regulated in Transcription
  misc_feature: MA Experiment 108461 PARAMETER Experiment Name: At_Germinating_Seeds_cDNA_P Parameter: Age (day) Value: 1 vs. 0
  misc_feature: MA Experiment 108461 PARAMETER Experiment Name: At_Germinating_Seeds_cDNA_P Parameter: Tissue Value: Germinating Seeds
  misc_feature: MA Experiment ID: 108462 Result: Up-regulated in Transcription
  misc_feature: MA Experiment 108462 PARAMETER Experiment Name: At_Germinating_Seeds_cDNA_P Parameter: Age (day) Value: 2 vs. 0
  misc_feature: MA Experiment 108462 PARAMETER Experiment Name: At_Germinating_Seeds_cDNA_P Parameter: Tissue Value: Germinating Seeds
  misc_feature: MA Experiment ID: 108463 Result: Up-regulated in Transcription
  misc_feature: MA Experiment 108463 PARAMETER Experiment Name: At_Germinating_Seeds_cDNA_P Parameter: Age (day) Value: 3 vs. 0
  misc_feature: MA Experiment 108463 PARAMETER Experiment Name: At_Germinating_Seeds_cDNA_P Parameter: Tissue Value: Germinating Seeds
  misc_feature: MA Experiment ID: 108464 Result: Up-regulated in Transcription
  misc_feature: MA Experiment 108464 PARAMETER Experiment Name: At_Germinating_Seeds_cDNA_P Parameter: Age (day) Value: 4 vs. 0
  misc_feature: MA Experiment 108464 PARAMETER Experiment Name: At_Germinating_Seeds_cDNA_P Parameter: Tissue Value: Germinating Seeds
  misc_feature: MA Experiment ID: 108469 Result: Down-regulated in Transcription
  misc_feature: MA Experiment ID: 108488 Result: Up-regulated in Transcription
  misc_feature: MA Experiment ID: 108576 Result: Down-regulated in Transcription
  misc_feature: MA Experiment 108576 PARAMETER Experiment Name: At_42deg_Heat_cDNA_P Parameter: Temperature (deg C) Value: 42 vs. 22
  misc_feature: MA Experiment 108576 PARAMETER Experiment Name: At_42deg_Heat_cDNA_P Parameter: Timepoint (hr) Value: 1
  misc_feature: MA Experiment 108576 PARAMETER Experiment Name: At_42deg_Heat_cDNA_P Parameter: Tissue Value: Aerial
  misc_feature: MA Experiment ID: 108579 Result: Up-regulated in Transcription
  misc_feature: MA Experiment 108579 PARAMETER Experiment Name: At_4deg_Cold_cDNA_P Parameter: Temperature (deg C) Value: 4 vs. 22
  misc_feature: MA Experiment 108579 PARAMETER Experiment Name: At_4deg_Cold_cDNA_P Parameter: Timepoint (hr) Value: 6
  misc_feature: MA Experiment 108579 PARAMETER Experiment Name: At_4deg_Cold_cDNA_P Parameter: Tissue Value: Aerial
  misc_feature: MA Experiment ID: 108585 Result: Down-regulated in Transcription
  misc_feature: MA Experiment 108585 PARAMETER Experiment Name: At_5mM_NaNP_cDNA_P Parameter: Timepoint (hr) Value: 6
  misc_feature: MA Experiment 108585 PARAMETER Experiment Name: At_5mM_NaNP_cDNA_P Parameter: Tissue Value: Aerial
  misc_feature: MA Experiment 108585 PARAMETER Experiment Name: At_5mM_NaNP_cDNA_P Parameter: Treatment Value: null
  misc_feature: MA Experiment ID: 108595 Result: Down-regulated in Transcription
  misc_feature: MA Experiment 108595 PARAMETER Experiment Name: At_Ler-pi_Ovule_cDNA_P Parameter: Plant Line Value: null
  misc_feature: MA Experiment ID: 20000069 Result: Up-regulated in Transcription
  misc_feature: MA Experiment 20000069 PARAMETER Experiment Name: At_100uM_ABA_Mutants_cDNA_P Parameter: Plant Line Value: CS23
  misc_feature: MA Experiment 20000069 PARAMETER Experiment Name: At_100uM_ABA_Mutants_cDNA_P Parameter: Timepoint (hr) Value: 6
  misc_feature: MA Experiment 20000069 PARAMETER Experiment Name: At_100uM_ABA_Mutants_cDNA_P Parameter: Tissue Value: Aerial
  misc_feature: MA Experiment 20000069 PARAMETER Experiment Name: At_100uM_ABA_Mutants_cDNA_P Parameter: Treatment Value: 100uM ABA vs. No Treatment
  misc_feature: MA Experiment ID: 20000070 Result: Up-regulated in Transcription
  misc_feature: MA Experiment 20000070 PARAMETER Experiment Name: At_100uM_ABA_Mutants_cDNA_P Parameter: Plant Line Value: CS24
  misc_feature: MA Experiment 20000070 PARAMETER Experiment Name: At_100uM_ABA_Mutants_cDNA_P Parameter: Timepoint (hr) Value: 6
  misc_feature: MA Experiment 20000070 PARAMETER Experiment Name: At_100uM_ABA_Mutants_cDNA_P Parameter: Tissue Value: Aerial
  misc_feature: MA Experiment 20000070 PARAMETER Experiment Name: At_100uM_ABA_Mutants_cDNA_P Parameter: Treatment Value: 100uM ABA vs. No Treatment
  misc_feature: MA Experiment ID: 20000071 Result: Up-regulated in Transcription
  misc_feature: MA Experiment 20000071 PARAMETER Experiment Name: At_100uM_ABA_Mutants_cDNA_P Parameter: Plant Line Value: CS8104
  misc_feature: MA Experiment 20000071 PARAMETER Experiment Name: At_100uM_ABA_Mutants_cDNA_P Parameter: Timepoint (hr) Value: 6
  misc_feature: MA Experiment 20000071 PARAMETER Experiment Name: At_100uM_ABA_Mutants_cDNA_P Parameter: Tissue Value: Aerial
  misc_feature: MA Experiment 20000071 PARAMETER Experiment Name: At_100uM_ABA_Mutants_cDNA_P Parameter: Treatment Value: 100uM ABA vs. No Treatment
  misc_feature: MA Experiment ID: 20000072 Result: Up-regulated in Transcription
  misc_feature: MA Experiment 20000072 PARAMETER Experiment Name: At_100uM_ABA_Mutants_cDNA_P Parameter: Plant Line Value: CS8105
  misc_feature: MA Experiment 20000072 PARAMETER Experiment Name: At_100uM_ABA_Mutants_cDNA_P Parameter: Timepoint (hr) Value: 6
  misc_feature: MA Experiment 20000072 PARAMETER Experiment Name: At_100uM_ABA_Mutants_cDNA_P Parameter: Tissue Value: Aerial
  misc_feature: MA Experiment 20000072 PARAMETER Experiment Name: At_100uM_ABA_Mutants_cDNA_P Parameter: Treatment Value: 100uM ABA vs. No Treatment
  misc_feature: MA Experiment ID: 20000086 Result: Up-regulated in Transcription
  misc_feature: MA Experiment 20000086 PARAMETER Experiment Name: At_100uM_ABA_Mutants_cDNA_P Parameter: Plant Line Value: CS22
  misc_feature: MA Experiment 20000086 PARAMETER Experiment Name: At_100uM_ABA_Mutants_cDNA_P Parameter: Timepoint (hr) Value: 6
  misc_feature: MA Experiment 20000086 PARAMETER Experiment Name: At_100uM_ABA_Mutants_cDNA_P Parameter: Tissue Value: Aerial
  misc_feature: MA Experiment 20000086 PARAMETER Experiment Name: At_100uM_ABA_Mutants_cDNA_P Parameter: Treatment Value: 100uM ABA vs. No Treatment
  misc_feature: MA Experiment ID: 20000088 Result: Up-regulated in Transcription
  misc_feature: MA Experiment 20000088 PARAMETER Experiment Name: At_100uM_ABA_Mutants_cDNA_P Parameter: Plant Line Value: Landsberg
  misc_feature: MA Experiment 20000088 PARAMETER Experiment Name: At_100uM_ABA_Mutants_cDNA_P Parameter: Timepoint (hr) Value: 6
  misc_feature: MA Experiment 20000088 PARAMETER Experiment Name: At_100uM_ABA_Mutants_cDNA_P Parameter: Tissue Value: Aerial
  misc_feature: MA Experiment 20000088 PARAMETER Experiment Name: At_100uM_ABA_Mutants_cDNA_P Parameter: Treatment Value: 100uM ABA vs. No Treatment
  misc_feature: MA Experiment ID: 20000111 Result: Down-regulated in Transcription
  misc_feature: MA Experiment 20000111 PARAMETER Experiment Name: At_42deg_Heat_cDNA_P Parameter: Temperature (deg C) Value: 42 vs. 22
  misc_feature: MA Experiment 20000111 PARAMETER Experiment Name: At_42deg_Heat_cDNA_P Parameter: Timepoint (hr) Value: 6
  misc_feature: MA Experiment 20000111 PARAMETER Experiment Name: At_42deg_Heat_cDNA_P Parameter: Tissue Value: Aerial
  misc_feature: MA Experiment ID: 20000112 Result: Down-regulated in Transcription
  misc_feature: MA Experiment 20000112 PARAMETER Experiment Name: At_42deg_Heat_cDNA_P Parameter: Temperature (deg C) Value: 42 vs. 22
  misc_feature: MA Experiment 20000112 PARAMETER Experiment Name: At_42deg_Heat_cDNA_P Parameter: Timepoint (hr) Value: 2
  misc_feature: MA Experiment 20000112 PARAMETER Experiment Name: At_42deg_Heat_cDNA_P Parameter: Tissue Value: Aerial
  misc_feature: MA Experiment ID: 20000113 Result: Down-regulated in Transcription
  misc_feature: MA Experiment 20000113 PARAMETER Experiment Name: At_42deg_Heat_cDNA_P Parameter: Temperature (deg C) Value: 42 vs. 22
  misc_feature: MA Experiment 20000113 PARAMETER Experiment Name: At_42deg_Heat_cDNA_P Parameter: Timepoint (hr) Value: 8
  misc_feature: MA Experiment 20000113 PARAMETER Experiment Name: At_42deg_Heat_cDNA_P Parameter: Tissue Value: Aerial
  misc_feature: MA Experiment ID: 20000144 Result: Down-regulated in Transcription
  misc_feature: MA Experiment 20000144 PARAMETER Experiment Name: At_42deg_Heat_cDNA_P Parameter: Temperature (deg C) Value: 42 vs. 22
  misc_feature: MA Experiment 20000144 PARAMETER Experiment Name: At_42deg_Heat_cDNA_P Parameter: Timepoint (hr) Value: 1
  misc_feature: MA Experiment 20000144 PARAMETER Experiment Name: At_42deg_Heat_cDNA_P Parameter: Tissue Value: Aerial
  misc_feature: MA Experiment ID: 20000171 Result: Down-regulated in Transcription
  misc_feature: MA Experiment 20000171 PARAMETER Experiment Name: At_42deg_Heat_P Parameter: Age (day) Value: 14
  misc_feature: MA Experiment 20000171 PARAMETER Experiment Name: At_42deg_Heat_P Parameter: Organism Value: A. thaliana
  misc_feature: MA Experiment 20000171 PARAMETER Experiment Name: At_42deg_Heat_P Parameter: Plant Line Value: WS
  misc_feature: MA Experiment 20000171 PARAMETER Experiment Name: At_42deg_Heat_P Parameter: Temperature (deg C) Value: 42 vs. 22
  misc_feature: MA Experiment 20000171 PARAMETER Experiment Name: At_42deg_Heat_P Parameter: Timepoint (hr) Value: 1
  misc_feature: MA Experiment 20000171 PARAMETER Experiment Name: At_42deg_Heat_P Parameter: Tissue Value: Aerial
  misc_feature: MA Experiment ID: 20000173 Result: Down-regulated in Transcription
  misc_feature: MA Experiment 20000173 PARAMETER Experiment Name: At_42deg_Heat_P Parameter: Age (day) Value: 14
  misc_feature: MA Experiment 20000173 PARAMETER Experiment Name: At_42deg_Heat_P Parameter: Organism Value: A. thaliana
  misc_feature: MA Experiment 20000173 PARAMETER Experiment Name: At_42deg_Heat_P Parameter: Plant Line Value: WS
  misc_feature: MA Experiment 20000173 PARAMETER Experiment Name: At_42deg_Heat_P Parameter: Temperature (deg C) Value: 42 vs. 22
  misc_feature: MA Experiment 20000173 PARAMETER Experiment Name: At_42deg_Heat_P Parameter: Timepoint (hr) Value: 6
  misc_feature: MA Experiment 20000173 PARAMETER Experiment Name: At_42deg_Heat_P Parameter: Tissue Value: Aerial
  misc_feature: MA Experiment ID: 20000180 Result: Up-regulated in Transcription
  misc_feature: MA Experiment 20000180 PARAMETER Experiment Name: At_Germinating_Seeds_P Parameter: Age (hr) Value: 24 vs. 0
  misc_feature: MA Experiment 20000180 PARAMETER Experiment Name: At_Germinating_Seeds_P Parameter: Tissue Value: Germinating Seeds
  misc_feature: MA Experiment ID: 20000182 Result: Down-regulated in Transcription
  misc_feature: MA Experiment 20000182 PARAMETER Experiment Name: At_2mM_SA_P Parameter: Age (day) Value: 14
  misc_feature: MA Experiment 20000182 PARAMETER Experiment Name: At_2mM_SA_P Parameter: Organism Value: A. thaliana
  misc_feature: MA Experiment 20000182 PARAMETER Experiment Name: At_2mM_SA_P Parameter: Plant Line Value: WS
  misc_feature: MA Experiment 20000182 PARAMETER Experiment Name: At_2mM_SA_P Parameter: Timepoint (hr) Value: 6
  misc_feature: MA Experiment 20000182 PARAMETER Experiment Name: At_2mM_SA_P Parameter: Tissue Value: Aerial
  misc_feature: MA Experiment 20000182 PARAMETER Experiment Name: At_2mM_SA_P Parameter: Treatment Value: 2mM SA vs. No Treatment
  misc_feature: MA Experiment ID: 20000185 Result: Down-regulated in Transcription
  misc_feature: MA Experiment 20000185 PARAMETER Experiment Name: At_Roots__P Parameter: Age (day) Value: 7 vs. 21
  misc_feature: MA Experiment 20000185 PARAMETER Experiment Name: At_Roots__P Parameter: Organism Value: A. thaliana
  misc_feature: MA Experiment 20000185 PARAMETER Experiment Name: At_Roots__P Parameter: Tissue Value: Roots vs. Whole Plant
  misc_feature: MA Experiment ID: 20000235 Result: Up-regulated in Transcription
  misc_feature: MA Experiment 20000235 PARAMETER Experiment Name: At_Siliques_P Parameter: Age (day) Value: 21
  misc_feature: MA Experiment 20000235 PARAMETER Experiment Name: At_Siliques_P Parameter: Organism Value: A. thaliana
  misc_feature: MA Experiment 20000235 PARAMETER Experiment Name: At_Siliques_P Parameter: Plant Line Value: WS
  misc_feature: MA Experiment 20000235 PARAMETER Experiment Name: At_Siliques_P Parameter: Tissue Value: 5-10mm Siliques vs. Whole Plant
  misc_feature: MA Experiment ID: 20000439 Result: Down-regulated in Transcription
  misc_feature: MA Experiment 20000439 PARAMETER Experiment Name: At_Roots__P Parameter: Age (day) Value: 14 vs. 21
  misc_feature: MA Experiment 20000439 PARAMETER Experiment Name: At_Roots__P Parameter: Organism Value: A. thaliana
  misc_feature: MA Experiment 20000439 PARAMETER Experiment Name: At_Roots__P Parameter: Tissue Value: Roots vs. Whole Plant
  misc_feature: MA Experiment ID: 20001247 Result: Up-regulated in Transcription
  misc_feature: MA Experiment 20001247 PARAMETER Experiment Name: At_Far-red-induction_P Parameter: Age (day) Value: 7
  misc_feature: MA Experiment 20001247 PARAMETER Experiment Name: At_Far-red-induction_P Parameter: Light Value: Far-red vs. White
  misc_feature: MA Experiment 20001247 PARAMETER Experiment Name: At_Far-red-induction_P Parameter: Organism Value: A. thaliana
  misc_feature: MA Experiment 20001247 PARAMETER Experiment Name: At_Far-red-induction_P Parameter: Plant Line Value: Columbia
  misc_feature: MA Experiment 20001247 PARAMETER Experiment Name: At_Far-red-induction_P Parameter: Timepoint (hr) Value: 1
  misc_feature: MA Experiment 20001247 PARAMETER Experiment Name: At_Far-red-induction_P Parameter: Tissue Value: Whole Plant
  misc_feature: MA Experiment ID: 20001557 Result: Up-regulated in Transcription
  misc_feature: MA Experiment 20001557 PARAMETER Experiment Name: At_Drought_Soil_Dry_P Parameter: Age (day) Value: 27
  misc_feature: MA Experiment 20001557 PARAMETER Experiment Name: At_Drought_Soil_Dry_P Parameter: Organism Value: A. thaliana
  misc_feature: MA Experiment 20001557 PARAMETER Experiment Name: At_Drought_Soil_Dry_P Parameter: Plant Line Value: WS
  misc_feature: MA Experiment 20001557 PARAMETER Experiment Name: At_Drought_Soil_Dry_P Parameter: Post Timepoint (hr) Value: 3
  misc_feature: MA Experiment 20001557 PARAMETER Experiment Name: At_Drought_Soil_Dry_P Parameter: Post-Treatment Value: Re-Water vs. No Drought
  misc_feature: MA Experiment 20001557 PARAMETER Experiment Name: At_Drought_Soil_Dry_P Parameter: Timepoint (day) Value: 13
  misc_feature: MA Experiment 20001557 PARAMETER Experiment Name: At_Drought_Soil_Dry_P Parameter: Treatment Value: Drought vs. No Drought
  misc_feature: MA Experiment ID: 20001904 Result: Down-regulated in Transcription
  misc_feature: MA Experiment 20001904 PARAMETER Experiment Name: At_Drought_Reproduction_P Parameter: Age (day) Value: 37
  misc_feature: MA Experiment 20001904 PARAMETER Experiment Name: At_Drought_Reproduction_P Parameter: Organism Value: A. thaliana
  misc_feature: MA Experiment 20001904 PARAMETER Experiment Name: At_Drought_Reproduction_P Parameter: Plant Line Value: WS
  misc_feature: MA Experiment 20001904 PARAMETER Experiment Name: At_Drought_Reproduction_P Parameter: Timepoint (day) Value: 7
  misc_feature: MA Experiment 20001904 PARAMETER Experiment Name: At_Drought_Reproduction_P Parameter: Tissue Value: Rosettes
  misc_feature: MA Experiment 20001904 PARAMETER Experiment Name: At_Drought_Reproduction_P Parameter: Treatment Value: Drought vs. No Drought
  misc_feature: MA Experiment ID: 20001905 Result: Down-regulated in Transcription
  misc_feature: MA Experiment 20001905 PARAMETER Experiment Name: At_Drought_Reproduction_P Parameter: Age (day) Value: 40
  misc_feature: MA Experiment 20001905 PARAMETER Experiment Name: At_Drought_Reproduction_P Parameter: Organism Value: A. thaliana
  misc_feature: MA Experiment 20001905 PARAMETER Experiment Name: At_Drought_Reproduction_P Parameter: Plant Line Value: WS
  misc_feature: MA Experiment 20001905 PARAMETER Experiment Name: At_Drought_Reproduction_P Parameter: Timepoint (day) Value: 10
  misc_feature: MA Experiment 20001905 PARAMETER Experiment Name: At_Drought_Reproduction_P Parameter: Tissue Value: Rosettes
  misc_feature: MA Experiment 20001905 PARAMETER Experiment Name: At_Drought_Reproduction_P Parameter: Treatment Value: Drought vs. No Drought
  misc_feature: MA Experiment ID: 20001906 Result: Down-regulated in Transcription
  misc_feature: MA Experiment 20001906 PARAMETER Experiment Name: At_Drought_Reproduction_P Parameter: Age (day) Value: 35
  misc_feature: MA Experiment 20001906 PARAMETER Experiment Name: At_Drought_Reproduction_P Parameter: Organism Value: A. thaliana
  misc_feature: MA Experiment 20001906 PARAMETER Experiment Name: At_Drought_Reproduction_P Parameter: Plant Line Value: WS
  misc_feature: MA Experiment 20001906 PARAMETER Experiment Name: At_Drought_Reproduction_P Parameter: Timepoint (day) Value: 5
  misc_feature: MA Experiment 20001906 PARAMETER Experiment Name: At_Drought_Reproduction_P Parameter: Tissue Value: Siliques
  misc_feature: MA Experiment 20001906 PARAMETER Experiment Name: At_Drought_Reproduction_P Parameter: Treatment Value: Drought vs. No Drought
  misc_feature: MA Experiment ID: 20001907 Result: Down-regulated in Transcription
  misc_feature: MA Experiment 20001907 PARAMETER Experiment Name: At_Drought_Reproduction_P Parameter: Age (day) Value: 37
  misc_feature: MA Experiment 20001907 PARAMETER Experiment Name: At_Drought_Reproduction_P Parameter: Organism Value: A. thaliana
  misc_feature: MA Experiment 20001907 PARAMETER Experiment Name: At_Drought_Reproduction_P Parameter: Plant Line Value: WS
  misc_feature: MA Experiment 20001907 PARAMETER Experiment Name: At_Drought_Reproduction_P Parameter: Timepoint (day) Value: 7
  misc_feature: MA Experiment 20001907 PARAMETER Experiment Name: At_Drought_Reproduction_P Parameter: Tissue Value: Siliques
  misc_feature: MA Experiment 20001907 PARAMETER Experiment Name: At_Drought_Reproduction_P Parameter: Treatment Value: Drought vs. No Drought
  misc_feature: MA Experiment ID: 20001908 Result: Down-regulated in Transcription
  misc_feature: MA Experiment 20001908 PARAMETER Experiment Name: At_Drought_Reproduction_P Parameter: Age (day) Value: 40
  misc_feature: MA Experiment 20001908 PARAMETER Experiment Name: At_Drought_Reproduction_P Parameter: Organism Value: A. thaliana
  misc_feature: MA Experiment 20001908 PARAMETER Experiment Name: At_Drought_Reproduction_P Parameter: Plant Line Value: WS
  misc_feature: MA Experiment 20001908 PARAMETER Experiment Name: At_Drought_Reproduction_P Parameter: Timepoint (day) Value: 10
  misc_feature: MA Experiment 20001908 PARAMETER Experiment Name: At_Drought_Reproduction_P Parameter: Tissue Value: Siliques
  misc_feature: MA Experiment 20001908 PARAMETER Experiment Name: At_Drought_Reproduction_P Parameter: Treatment Value: Drought vs. No Drought
  misc_feature: MA Experiment ID: 20001911 Result: Down-regulated in Transcription
  misc_feature: MA Experiment 20001911 PARAMETER Experiment Name: At_Drought_Reproduction_P Parameter: Age (day) Value: 40
  misc_feature: MA Experiment 20001911 PARAMETER Experiment Name: At_Drought_Reproduction_P Parameter: Organism Value: A. thaliana
  misc_feature: MA Experiment 20001911 PARAMETER Experiment Name: At_Drought_Reproduction_P Parameter: Plant Line Value: WS
  misc_feature: MA Experiment 20001911 PARAMETER Experiment Name: At_Drought_Reproduction_P Parameter: Timepoint (day) Value: 10
  misc_feature: MA Experiment 20001911 PARAMETER Experiment Name: At_Drought_Reproduction_P Parameter: Tissue Value: Flowers
  misc_feature: MA Experiment 20001911 PARAMETER Experiment Name: At_Drought_Reproduction_P Parameter: Treatment Value: Drought vs. No Drought
acattcactcatatcactacactttccattaattaccaatatatttttactacttaaaaaagatattggtcttgaaatggagagttacttaacgaaatggtgtgtagtgcttgtgttgttgtgtttcgggtttagtgtagtaaaagcacaagcacaagctcaagttccatgtttctttgtttttggtgactctttggttgacaatggaaacaacaacggtcttatttctattgcaagatccaattacttcccttacggtatcgatttcggcggccctaccggccgtttctccaacggcaagactactgttgatgtgatcgctgagctacttggatttaatggctacattcctgcgtacaatactgtgagtggtcggcaaatactctccggagttaactacgcttccgcagctgctggaatccgagaagaaaccggtcgacaattgggacaaaggataagctttagtggacaagttaggaactaccagaccacagtatcgcaagttgtgcagcttctaggagacgagactcgtgcagctgattacctcaagagatgtatttactctgttggtttaggaagcaacgactatctcaacaactacttcatgcctacgttttactcttctagcagacaattcacacccgaacaatacgctaacgatctcatcagtcgctacagcacccagctcaatgcattatacaactatggggctcgaaagtttgcattgagtggaattggagcagttggttgtagtcctaacgcgctcgcaggcagtcccgacggtaggacttgcgtagaccgcatcaactcagcaaaccagatcttcaacaacaagctaagatctcttgttgatcagctcaacaacaatcaccctgatgcaaagttcatctacatcaatgcttatggcattttccaggacatgatcacaaatcctgccagatttgggtttagagtgacgaacgcgggatgttgcggtattgggaggaatgctggacagatcacatgtttaccgggacagagaccgtgtagagaccgcaatgcgtacgtgttctgggacgcatttcaccctactgaagccgcaaatgtgatcatcgcaaggagatcgtacaatgcacaatcggcttcagacgcttaccctatggatatttcaaggctggcacagctttgaagaaacatagtaaaataagaactaaagaagttccacaaaccaatgtgtgatcttgttgtgtaccgtaccgctatttaagattttcttgacgtaattgaaatcgagtaaaacattattcta

SEQ ID NO: 85778 - protein, 388 aa, Arabidopsis thaliana; identical to SEQ ID NO: 35500
  peptide (1)..(388): Ceres Seq. ID no. 12683140
  misc_feature (58)..(368): Pfam Name: GDSL-like Lipase/Acylhydrolase Pfam Description: GDSL-like Lipase/Acylhydrolase
  misc_feature (26)..(388): Homolog of NCBI NO: 15220514 NR Description: lipase/hydrolase, putative; protein id: supported by cDNA: 23556., supported by cDNA: gi_18086454
  misc_feature (26)..(388): Homolog of NCBI NO: 21592417 NR Description: lipase/hydrolase, putative [Arabidopsis thaliana]
  misc_feature (26)..(388): Homolog of NCBI NO: 15220512 NR Description: lipase/hydrolase, putative; protein id: supported by cDNA: 6680., supported by cDNA: gi_15215767
  misc_feature (26)..(388): Homolog of NCBI NO: 21594055 NR Description: lipase/hydrolase, putative [Arabidopsis thaliana]
  misc_feature (30)..(388): Homolog of NCBI NO: 15242458 NR Description: GDSL-motif lipase/hydrolase-like protein; protein At5g45670.1, supported by cDNA: 18389., supported by cDNA:
  misc_feature (30)..(388): Homolog of NCBI NO: 21553940 NR Description: GDSL-motif lipase/hydrolase-like protein
  misc_feature (20)..(388): Homolog of NCBI NO: 7485419 NR Description: hypothetical protein F13C5.140 - Arabidopsis >gi|2832625|emb|CAA16754.1| putative protein [Arabidopsis >gi|7268691|emb|CAB78899.1| putative protein [Arabidopsis
  misc_feature (30)..(388): Homolog of NCBI NO: 18415211 NR Description: Expressed protein; protein id: At4g18970.1, by cDNA: 42850., supported by cDNA: gi_16604576, supported by gi_21281049 [Arabidopsis thaliana] >gi|16604577|gb|AAL24090.1|
  misc_feature (30)..(388): Homolog of NCBI NO: 21618199 NR Description: GDSL-motif lipase/hydrolase-like protein
  misc_feature (59)..(377): Homolog of NCBI NO: 30693137 NR Description: lipase family [Arabidopsis thaliana]

SEQ ID NO: 85779 - protein, 363 aa, Arabidopsis thaliana; identical to SEQ ID NO: 35501
  peptide (1)..(363): Ceres Seq. ID no. 12683141
  misc_feature (33)..(343): Pfam Name: GDSL-like Lipase/Acylhydrolase Pfam Description: GDSL-like Lipase/Acylhydrolase
  misc_feature (1)..(363): Homolog of NCBI NO: 15220514 NR Description: lipase/hydrolase, putative; protein id: supported by cDNA: 23556., supported by cDNA: gi_18086454
  misc_feature (1)..(363): Homolog of NCBI NO: 21592417 NR Description: lipase/hydrolase, putative [Arabidopsis thaliana]
  misc_feature (1)..(363): Homolog of NCBI NO: 15220512 NR Description: lipase/hydrolase, putative; protein id: supported by cDNA: 6680., supported by cDNA: gi_15215767
  misc_feature (1)..(363): Homolog of NCBI NO: 21594055 NR Description: lipase/hydrolase, putative [Arabidopsis thaliana]
  misc_feature (5)..(363): Homolog of NCBI NO: 15242458 NR Description: GDSL-motif lipase/hydrolase-like protein; protein At5g45670.1, supported by cDNA: 18389., supported by cDNA:
  misc_feature (5)..(363): Homolog of NCBI NO: 21553940 NR Description: GDSL-motif lipase/hydrolase-like protein
  misc_feature (1)..(363): Homolog of NCBI NO: 7485419 NR Description: hypothetical protein F13C5.140 - Arabidopsis >gi|2832625|emb|CAA16754.1| putative protein [Arabidopsis >gi|7268691|emb|CAB78899.1| putative protein [Arabidopsis
  misc_feature (5)..(363): Homolog of NCBI NO: 18415211 NR Description: Expressed protein; protein id: At4g18970.1, by cDNA: 42850., supported by cDNA: gi_16604576, supported by gi_21281049 [Arabidopsis thaliana] >gi|16604577|gb|AAL24090.1|
  misc_feature (5)..(363): Homolog of NCBI NO: 21618199 NR Description: GDSL-motif lipase/hydrolase-like protein
  misc_feature (34)..(352): Homolog of NCBI NO: 30693137 NR Description: lipase family [Arabidopsis thaliana]

SEQ ID NO: 85780 - DNA, 474 bp, Arabidopsis thaliana
  misc_feature (1)..(474): Ceres Seq. ID no. 12683191
  misc_feature: MA Experiment ID: 20000265 Result: Up-regulated in Transcription
  misc_feature: MA Experiment 20000265 PARAMETER Experiment Name: At_Open_Flower_P Parameter: Age (day) Value: 21
  misc_feature: MA Experiment 20000265 PARAMETER Experiment Name: At_Open_Flower_P Parameter: Plant Line Value: WS
  misc_feature: MA Experiment 20000265 PARAMETER Experiment Name: At_Open_Flower_P Parameter: Tissue Value: Closed Flower vs. Whole Plant
  misc_feature: MA Experiment ID: 20000286 Result: Up-regulated in Transcription
  misc_feature: MA Experiment 20000286 PARAMETER Experiment Name: At_Open_Flower_P Parameter: Age (day) Value: 21
  misc_feature: MA Experiment 20000286 PARAMETER Experiment Name: At_Open_Flower_P Parameter: Plant Line Value: WS
  misc_feature: MA Experiment 20000286 PARAMETER Experiment Name: At_Open_Flower_P Parameter: Tissue Value: Half Open vs. Whole Plant
  misc_feature: MA Experiment ID: 20001910 Result: Down-regulated in Transcription
  misc_feature: MA Experiment 20001910 PARAMETER Experiment Name: At_Drought_Reproduction_P Parameter: Age (day) Value: 37
  misc_feature: MA Experiment 20001910 PARAMETER Experiment Name: At_Drought_Reproduction_P Parameter: Organism Value: A. thaliana
  misc_feature: MA Experiment 20001910 PARAMETER Experiment Name: At_Drought_Reproduction_P Parameter: Plant Line Value: WS
  misc_feature: MA Experiment 20001910 PARAMETER Experiment Name: At_Drought_Reproduction_P Parameter: Timepoint (day) Value: 7
  misc_feature: MA Experiment 20001910 PARAMETER Experiment Name: At_Drought_Reproduction_P Parameter: Tissue Value: Flowers
  misc_feature: MA Experiment 20001910 PARAMETER Experiment Name: At_Drought_Reproduction_P Parameter: Treatment Value: Drought vs. No Drought
atggcgttaagagagatgataatagatgagagtgatgacatagagagctacagtgatcaatctctttgtcttgataaagccaaggagcttcttgctctcatcaaactacccacgggattgttgccattgaaggatatgacggaagttgggtacaacaaaacaaaagggtttgtgtggatgaggatgagaagcaagattgagcatacattccgtgagataggtcgcagagttttatatgacacggagataactgcgtttgttgaggaccgccgtatgaggagacttaccggagtcaaaagcaaagagctcatgatctgggttcctgtgaatgatatcttcataaagagaaagatcctgagaagatcacctttgctaataccaccggcctgtcacgaacatttaaagtttcagcatttcaatgtgagggttgataaattaaaagaaaagaggagtaaccagacttccttgatgtaa

SEQ ID NO: 85781 - protein, 157 aa, Arabidopsis thaliana
  peptide (1)..(157): Ceres Seq. ID no. 12683192
  misc_feature (5)..(136): Pfam Name: Protein of unknown function, DUF538 Pfam Description: Protein of unknown function, DUF538
  misc_feature (1)..(157): Homolog of NCBI NO: 15220641 NR Description: unknown protein; protein id: At1g30020.1
  misc_feature (1)..(117): Homolog of NCBI NO: 18422648 NR Description: expressed protein; protein id: At5g46230.1, by cDNA: 15495. [Arabidopsis thaliana] gene_id:MPL12.1~unknown protein [Arabidopsis thaliana]
  misc_feature (15)..(116): Homolog of NCBI NO: 34903866 NR Description: unnamed protein product [Oryza sativa (japonica group)] >gi|8096574|dbj|BAA96147.1| unnamed protein product
  misc_feature (15)..(123): Homolog of NCBI NO: 18391006 NR Description: expressed protein; protein id: At1g09310.1, by cDNA: 11073., supported by cDNA: gi_13194795, supported by gi_15028182, supported by cDNA: gi_19310812 [Arabidopsis
  misc_feature (15)..(116): Homolog of NCBI NO: 18405887 NR Description: expressed protein; protein id: At1g56580.1, by cDNA: gi_16648668, supported by cDNA: gi_20856238 [Arabidopsis >gi|25404133|pir||E96607 hypothetical protein F25P12.97
  misc_feature (15)..(114): Homolog of NCBI NO: 34915426 NR Description: hypothetical protein~similar to Arabidopsis
  misc_feature (15)..(113): Homolog of NCBI NO: 34915378 NR Description: hypothetical protein~similar to Oryza sativa
  misc_feature (15)..(113): Homolog of NCBI NO: 34915416 NR Description: hypothetical protein~similar to Arabidopsis
  misc_feature (15)..(114): Homolog of NCBI NO: 33146557 NR Description: unknown protein [Oryza sativa (japonica
  misc_feature (15)..(114): Homolog of NCBI NO: 34915376 NR Description: hypothetical protein~similar to Oryza sativa
MALREMIIDESDDIESYSDQSLCLDKAKELLALIKLPTGLLPLKDMTEVGYNKTKGFVWMRMRSKIEHTFREIGRRVLYDTEITAFVEDRRMRRLTGVKSKELMIWVPVNDIFIKRKILRRSPLLIPPACHEHLKFQHFNVRVDKLKEKRSNQTSLM

SEQ ID NO: 85782 - protein, 152 aa, Arabidopsis thaliana
  peptide (1)..(152): Ceres Seq. ID no. 12683193
  misc_feature (1)..(131): Pfam Name: Protein of unknown function, DUF538 Pfam Description: Protein of unknown function, DUF538
  misc_feature (1)..(152): Homolog of NCBI NO: 15220641 NR Description: unknown protein; protein id: At1g30020.1
  misc_feature (1)..(112): Homolog of NCBI NO: 18422648 NR Description: expressed protein; protein id: At5g46230.1, by cDNA: 15495. [Arabidopsis thaliana] gene_id:MPL12.1~unknown protein [Arabidopsis thaliana]
  misc_feature (10)..(111): Homolog of NCBI NO: 34903866 NR Description: unnamed protein product [Oryza sativa (japonica group)] >gi|8096574|dbj|BAA96147.1| unnamed protein product
  misc_feature (10)..(118): Homolog of NCBI NO: 18391006 NR Description: expressed protein; protein id: At1g09310.1, by cDNA: 11073., supported by cDNA: gi_13194795, supported by gi_15028182, supported by cDNA: gi_19310812 [Arabidopsis
  misc_feature (10)..(111): Homolog of NCBI NO: 18405887 NR Description: expressed protein; protein id: At1g56580.1, by cDNA: gi_16648668, supported by cDNA: gi_20856238 [Arabidopsis >gi|25404133|pir||E96607 hypothetical protein F25P12.97
  misc_feature (10)..(109): Homolog of NCBI NO: 34915426 NR Description: hypothetical protein~similar to Arabidopsis
  misc_feature (10)..(108): Homolog of NCBI NO: 34915378 NR Description: hypothetical protein~similar to Oryza sativa
  misc_feature (10)..(108): Homolog of NCBI NO: 34915416 NR Description: hypothetical protein~similar to Arabidopsis
  misc_feature (10)..(109): Homolog of NCBI NO: 33146557 NR Description: unknown protein [Oryza sativa (japonica
  misc_feature (10)..(109): Homolog of NCBI NO: 34915376 NR Description: hypothetical protein~similar to Oryza sativa
MIIDESDDIESYSDQSLCLDKAKELLALIKLPTGLLPLKDMTEVGYNKTKGFVWMRMRSKIEHTFREIGRRVLYDTEITAFVEDRRMRRLTGVKSKELMIWVPVNDIFIKRKILRRSPLLIPPACHEHLKFQHFNVRVDKLKEKRSNQTSLM

SEQ ID NO: 85783 - protein, 112 aa, Arabidopsis thaliana
  peptide (1)..(112): Ceres Seq. ID no. 12683194
  misc_feature (1)..(91): Pfam Name: Protein of unknown function, DUF538 Pfam Description: Protein of unknown function, DUF538
  misc_feature (1)..(112): Homolog of NCBI NO: 15220641 NR Description: unknown protein; protein id: At1g30020.1
  misc_feature (1)..(72): Homolog of NCBI NO: 18422648 NR Description: expressed protein; protein id: At5g46230.1, by cDNA: 15495. [Arabidopsis thaliana] gene_id:MPL12.1~unknown protein [Arabidopsis thaliana]
  misc_feature (1)..(71): Homolog of NCBI NO: 34903866 NR Description: unnamed protein product [Oryza sativa (japonica group)] >gi|8096574|dbj|BAA96147.1| unnamed protein product
  misc_feature (1)..(78): Homolog of NCBI NO: 18391006 NR Description: expressed protein; protein id: At1g09310.1, by cDNA: 11073., supported by cDNA: gi_13194795, supported by gi_15028182, supported by cDNA: gi_19310812 [Arabidopsis
  misc_feature (1)..(71): Homolog of NCBI NO: 18405887 NR Description: expressed protein; protein id: At1g56580.1, by cDNA: gi_16648668, supported by cDNA: gi_20856238 [Arabidopsis >gi|25404133|pir||E96607 hypothetical protein F25P12.97
  misc_feature (1)..(69): Homolog of NCBI NO: 34915426 NR Description: hypothetical protein~similar to Arabidopsis
  misc_feature (1)..(68): Homolog of NCBI NO: 34915378 NR Description: hypothetical protein~similar to Oryza sativa
  misc_feature (1)..(68): Homolog of NCBI NO: 34915416 NR Description: hypothetical protein~similar to Arabidopsis
  misc_feature (1)..(69): Homolog of NCBI NO: 33146557 NR Description: unknown protein [Oryza sativa (japonica
  misc_feature (1)..(69): Homolog of NCBI NO: 34915376 NR Description: hypothetical protein~similar to Oryza sativa
MTEVGYNKTKGFVWMRMRSKIEHTFREIGRRVLYDTEITAFVEDRRMRRLTGVKSKELMIWVPVNDIFIKRKILRRSPLLIPPACHEHLKFQHFNVRVDKLKEKRSNQTSLM

SEQ ID NO: 85784 - DNA, 1530 bp, Arabidopsis thaliana
  misc_feature (1)..(1530): Ceres Seq. ID no. 12683214
  misc_feature: MA Experiment ID: 20000307 Result: Down-regulated in Transcription
  misc_feature: MA Experiment 20000307 PARAMETER Experiment Name: At_Germinating_Seeds_Sub_P Parameter: Age (hr) Value: 24 vs. 0
  misc_feature: MA Experiment 20000307 PARAMETER Experiment Name: At_Germinating_Seeds_Sub_P Parameter: Organism Value: A. thaliana
  misc_feature: MA Experiment 20000307 PARAMETER Experiment Name: At_Germinating_Seeds_Sub_P Parameter: Plant Line Value: WS
  misc_feature: MA Experiment 20000307 PARAMETER Experiment Name: At_Germinating_Seeds_Sub_P Parameter: Tissue Value: Germinating Seeds
  misc_feature: MA Experiment ID: 20000314 Result: Down-regulated in Transcription
  misc_feature: MA Experiment 20000314 PARAMETER Experiment Name: At_14day_Shoots-Roots_Sub_P Parameter: Age (day) Value: 14
  misc_feature: MA Experiment 20000314 PARAMETER Experiment Name: At_14day_Shoots-Roots_Sub_P Parameter: Organism Value: A. thaliana
  misc_feature: MA Experiment 20000314 PARAMETER Experiment Name: At_14day_Shoots-Roots_Sub_P Parameter: Plant Line Value: WS
  misc_feature: MA Experiment 20000314 PARAMETER Experiment Name: At_14day_Shoots-Roots_Sub_P Parameter: Tissue Value: Roots vs. Whole Plant
  misc_feature: MA Experiment ID: 20000315 Result: Down-regulated in Transcription
  misc_feature: MA Experiment 20000315 PARAMETER Experiment Name: At_14day_Shoots-Roots_Sub_P Parameter: Age (day) Value: 14
  misc_feature: MA Experiment 20000315 PARAMETER Experiment Name: At_14day_Shoots-Roots_Sub_P Parameter: Organism Value: A. thaliana
  misc_feature: MA Experiment 20000315 PARAMETER Experiment Name: At_14day_Shoots-Roots_Sub_P Parameter: Plant Line Value: WS
  misc_feature: MA Experiment 20000315 PARAMETER Experiment Name: At_14day_Shoots-Roots_Sub_P Parameter: Tissue Value: Shoots vs. Whole Plant
  misc_feature: MA Experiment ID: 20000349 Result: Up-regulated in Transcription
  misc_feature: MA Experiment 20000349 PARAMETER Experiment Name: At_100uM_ABA_Sub_P Parameter: Age (day) Value: 14
  misc_feature: MA Experiment 20000349 PARAMETER Experiment Name: At_100uM_ABA_Sub_P Parameter: Organism Value: A. thaliana
  misc_feature: MA Experiment 20000349 PARAMETER Experiment Name: At_100uM_ABA_Sub_P Parameter: Plant Line Value: WS
  misc_feature: MA Experiment 20000349 PARAMETER Experiment Name: At_100uM_ABA_Sub_P Parameter: Timepoint (hr) Value: 6
  misc_feature: MA Experiment 20000349 PARAMETER Experiment Name: At_100uM_ABA_Sub_P Parameter: Tissue Value: Aerial
  misc_feature: MA Experiment 20000349 PARAMETER Experiment Name: At_100uM_ABA_Sub_P Parameter: Treatment Value: 100uM ABA vs. No Treatment
  misc_feature: MA Experiment ID: 20000352 Result: Up-regulated in Transcription
  misc_feature: MA Experiment 20000352 PARAMETER Experiment Name: At_Drought_Sub_P Parameter: Age (day) Value: 7
  misc_feature: MA Experiment 20000352 PARAMETER Experiment Name: At_Drought_Sub_P Parameter: Organism Value: A. thaliana
  misc_feature: MA Experiment 20000352 PARAMETER Experiment Name: At_Drought_Sub_P Parameter: Plant Line Value: WS
  misc_feature: MA Experiment 20000352 PARAMETER Experiment Name: At_Drought_Sub_P Parameter: Timepoint (hr) Value: 6
  misc_feature: MA Experiment 20000352 PARAMETER Experiment Name: At_Drought_Sub_P Parameter: Tissue Value: Whole Plant
  misc_feature: MA Experiment 20000352 PARAMETER Experiment Name: At_Drought_Sub_P Parameter: Treatment Value: Drought vs. No Drought
  misc_feature: MA Experiment ID: 20000355 Result: Up-regulated in Transcription
  misc_feature: MA Experiment 20000355 PARAMETER Experiment Name: At_Siliques_Sub_P Parameter: Age (day) Value: 21
  misc_feature: MA Experiment 20000355 PARAMETER Experiment Name: At_Siliques_Sub_P Parameter: Organism Value: A. thaliana
  misc_feature: MA Experiment 20000355 PARAMETER Experiment Name: At_Siliques_Sub_P Parameter: Plant Line Value: WS
  misc_feature: MA Experiment 20000355 PARAMETER Experiment Name: At_Siliques_Sub_P Parameter: Tissue Value: Less Than 5mm Siliques vs. Whole Plant
atggagggaggaataatacatggaggagcagatgaatcagctttcaaagaatgtttctctctaacatggaagaatccttatgttcttcgtcttgctttctctgccggaatcggtggtcttctctttggttacgacaccggagtgatatcaggtgctctgctttatatcagagatgatttcaagtctgttgacagaaatacttggttacaggagatgatagtgagcatggcagttgcaggagccatcgttggagccgccataggaggttgggcgaacgacaaattagggaggagaagcgcgattctcatggcggatttcctctttttattaggagctatcattatggcggctgctcctaacccgtccctccttgtcgttggccgtgtttttgtgggcctcggggtcgggatggcctcgatgaccgctcctctatacatctcagaagcttcgcctgctaagatcagaggagctttggtcagtactaatgggtttctcattaccggaggacagttcttgtcttacctcataaacttagcctttactgatgtgaccggaacgtggagatggatgctcggaatcgccggaattccagctcttttacagtttgtcttaatgtttacactcccggagtcacctcgatggttataccgcaagggaagagaagaagaggctaaagcgattctaagaagaatatactcagcagaagatgtagaacaagagatacgtgcacttaaagactcagttgaaacagagatacttgaagaagggtcttccgagaaaatcaacatgatcaaactatgcaaagctaaaaccgttagacgaggactaatagctggtgttggtctccaagtgtttcaacagttcgttgggatcaacacagttatgtattacagtccaaccattgttcagcttgccggtttcgcttcaaacagaacagctcttctcttgtctctagttaccgcaggacttaatgcatttggttctataattagcatttacttcattgatagaatcggaaggaaaaagcttttgatcattagccttttcggagtcattatctcgctaggaatactaaccggtgttttttatgaagcggctactcacgctcctgcgattagctcactcgagacacaaagcaattttggttggtttgctcttcttggattgggactttatatcatcttcttctctcctggaatggggactgttccatggatagttaactcagagatttatccattgagattcagaggaatatgtggaggaatagctgcaactgcaaattggatatcaaatttgattgtggctcaatcttttttgtcattgaccgaagctattgggacttcttggacttttctcatctttggagtgatctcagtcattgctcttctctttgttatggtttgtgttccggagacaaaaggaatgccaatggaggagattgagaagatgcttgaacgaagatcgatggagtttaagttttggaagaaaaaatcaaaacttgttgagaaacaaaaccagagtgcatga

SEQ ID NO: 85785 - protein, 509 aa, Arabidopsis thaliana
  peptide (1)..(509): Ceres Seq. ID no. 12683215
  misc_feature (31)..(378): Pfam Name: Sugar (and other) transporter Pfam Description: Sugar (and other) transporter
  misc_feature (1)..(378): Homolog of NCBI NO: 15220697 NR Description: hypothetical protein; protein id: At1g30220.1, by cDNA: gi_18377758 [Arabidopsis thaliana]
  misc_feature (379)..(509): Homolog of NCBI NO: 15220697 NR Description: hypothetical protein; protein id: At1g30220.1, by cDNA: gi_18377758 [Arabidopsis thaliana]
  misc_feature (1)..(377): Homolog of NCBI NO: 33146705 NR Description: putative proton myo-inositol transporter [Oryza
  misc_feature (379)..(498): Homolog of NCBI NO: 33146705 NR Description: putative proton myo-inositol transporter [Oryza
  misc_feature (1)..(379): Homolog of NCBI NO: 15235767 NR Description: membrane transporter like protein; protein id:
  misc_feature (379)..(486): Homolog of NCBI NO: 15235767 NR Description: membrane transporter like protein; protein id:
  misc_feature (1)..(382): Homolog of NCBI NO: 9652186 NR Description: putative Na+/myo-inositol symporter
  misc_feature (379)..(486): Homolog of NCBI NO: 9652186 NR Description: putative Na+/myo-inositol symporter
  misc_feature (1)..(382): Homolog of NCBI NO: 9652184 NR Description: putative Na+/myo-inositol symporter
  misc_feature (379)..(487): Homolog of NCBI NO: 9652184 NR Description: putative Na+/myo-inositol symporter
MEGGIIHGGADESAFKECFSLTWKNPYVLRLAFSAGIGGLLFGYDTGVISGALLYIRDDFKSVDRNTWLQEMIVSMAVAGAIVGAAIGGWANDKLGRRSAILMADFLFLLGAIIMAAAPNPSLLVVGRVFVGLGVGMASMTAPLYISEASPAKIRGALVSTNGFLITGGQFLSYLINLAFTDVTGTWRWMLGIAGIPALLQFVLMFTLPESPRWLYRKGREEEAKAILRRIYSAEDVEQEIRALKDSVETEILEEGSSEKINMIKLCKAKTVRRGLIAGVGLQVFQQFVGINTVMYYSPTIVQLAGFASNRTALLLSLVTAGLNAFGSIISIYFIDRIGRKKLLIISLFGVIISLGILTGVFYEAATHAPAISSLETQSNFGWFALLGLGLYIIFFSPGMGTVPWIVNSEIYPLRFRGICGGIAATANWISNLIVAQSFLSLTEAIGTSWTFLIFGVISVIALLFVMVCVPETKGMPMEEIEKMLERRSMEFKFWKKKSKLVEKQNQSA

SEQ ID NO: 85786 - protein, 438 aa, Arabidopsis thaliana
  peptide (1)..(438): Ceres Seq. ID no. 12683216
  misc_feature (1)..(307): Pfam Name: Sugar (and other) transporter Pfam Description: Sugar (and other) transporter
  misc_feature (1)..(307): Homolog of NCBI NO: 15220697 NR Description: hypothetical protein; protein id: At1g30220.1, by cDNA: gi_18377758 [Arabidopsis thaliana]
  misc_feature (308)..(438): Homolog of NCBI NO: 15220697 NR Description: hypothetical protein; protein id: At1g30220.1, by cDNA: gi_18377758 [Arabidopsis thaliana]
  misc_feature (1)..(306): Homolog of NCBI NO: 33146705 NR Description: putative proton myo-inositol transporter [Oryza
  misc_feature (308)..(427): Homolog of NCBI NO: 33146705 NR Description: putative proton myo-inositol transporter [Oryza
  misc_feature (1)..(308): Homolog of NCBI NO: 15235767 NR Description: membrane transporter like protein; protein id:
  misc_feature (308)..(415): Homolog of NCBI NO: 15235767 NR Description: membrane transporter like protein; protein id:
  misc_feature (1)..(311): Homolog of NCBI NO: 9652186 NR Description: putative Na+/myo-inositol symporter
  misc_feature (308)..(415): Homolog of NCBI NO: 9652186 NR Description: putative Na+/myo-inositol symporter
  misc_feature (1)..(311): Homolog of NCBI NO: 9652184 NR Description: putative Na+/myo-inositol symporter
  misc_feature (308)..(416): Homolog of NCBI NO: 9652184 NR Description: putative Na+/myo-inositol symporter
MIVSMAVAGAIVGAAIGGWANDKLGRRSAILMADFLFLLGAIIMAAAPNPSLLVVGRVFVGLGVGMASMTAPLYISEASPAKIRGALVSTNGFLITGGQFLSYLINLAFTDVTGTWRWMLGIAGIPALLQFVLMFTLPESPRWLYRKGREEEAKAILRRIYSAEDVEQEIRALKDSVETEILEEGSSEKINMIKLCKAKTVRRGLIAGVGLQVFQQFVGINTVMYYSPTIVQLAGFASNRTALLLSLVTAGLNAFGSIISIYFIDRIGRKKLLIISLFGVIISLGILTGVFYEAATHAPAISSLETQSNFGWFALLGLGLYIIFFSPGMGTVPWIVNSEIYPLRFRGICGGIAATANWISNLIVAQSFLSLTEAIGTSWTFLIFGVISVIALLFVMVCVPETKGMPMEEIEKMLERRSMEFKFWKKKSKLVEKQNQSA

SEQ ID NO: 85787 - protein, 434 aa, Arabidopsis thaliana
  peptide (1)..(434): Ceres Seq. ID no. 12683217
  misc_feature (1)..(303): Pfam Name: Sugar (and other) transporter Pfam Description: Sugar (and other) transporter
  misc_feature (1)..(303): Homolog of NCBI NO: 15220697 NR Description: hypothetical protein; protein id: At1g30220.1, by cDNA: gi_18377758 [Arabidopsis thaliana]
  misc_feature (304)..(434): Homolog of NCBI NO: 15220697 NR Description: hypothetical protein; protein id: At1g30220.1, by cDNA: gi_18377758 [Arabidopsis thaliana]
  misc_feature (1)..(302): Homolog of NCBI NO: 33146705 NR Description: putative proton myo-inositol transporter [Oryza
  misc_feature (304)..(423): Homolog of NCBI NO: 33146705 NR Description: putative proton myo-inositol transporter [Oryza
  misc_feature (1)..(304): Homolog of NCBI NO: 15235767 NR Description: membrane transporter like protein; protein id:
  misc_feature (304)..(411): Homolog of NCBI NO: 15235767 NR Description: membrane transporter like protein; protein id:
  misc_feature (1)..(307): Homolog of NCBI NO: 9652186 NR Description: putative Na+/myo-inositol symporter
  misc_feature (304)..(411): Homolog of NCBI NO: 9652186 NR Description: putative Na+/myo-inositol symporter
  misc_feature (1)..(307): Homolog of NCBI NO: 9652184 NR Description: putative Na+/myo-inositol symporter
  misc_feature (304)..(412): Homolog of NCBI NO: 9652184 NR Description: putative Na+/myo-inositol symporter
MAVAGAIVGAAIGGWANDKLGRRSAILMADFLFLLGAIIMAAAPNPSLLVVGRVFVGLGVGMASMTAPLYISEASPAKIRGALVSTNGFLITGGQFLSYLINLAFTDVTGTWRWMLGIAGIPALLQFVLMFTLPESPRWLYRKGREEEAKAILRRIYSAEDVEQEIRALKDSVETEILEEGSSEKINMIKLCKAKTVRRGLIAGVGLQVFQQFVGINTVMYYSPTIVQLAGFASNRTALLLSLVTAGLNAFGSIISIYFIDRIGRKKLLIISLFGVIISLGILTGVFYEAATHAPAISSLETQSNFGWFALLGLGLYIIFFSPGMGTVPWIVNSEIYPLRFRGICGGIAATANWISNLIVAQSFLSLTEAIGTSWTFLIFGVISVIALLFVMVCVPETKGMPMEEIEKMLERRSMEFKFWKKKSKLVEKQNQSA

SEQ ID NO: 85788 - DNA, 1524 bp, Arabidopsis thaliana
  misc_feature (1)..(1524): Ceres Seq. ID no. 12683224
  misc_feature: MA Experiment ID: 20000166 Result: Up-regulated in Transcription
  misc_feature: MA Experiment 20000166 PARAMETER Experiment Name: At_100uM_ABA_P Parameter: Age (day) Value: 14
  misc_feature: MA Experiment 20000166 PARAMETER Experiment Name: At_100uM_ABA_P Parameter: Organism Value: A. thaliana
  misc_feature: MA Experiment 20000166 PARAMETER Experiment Name: At_100uM_ABA_P Parameter: Plant Line Value: WS
  misc_feature: MA Experiment 20000166 PARAMETER Experiment Name: At_100uM_ABA_P Parameter: Timepoint (hr) Value: 1
  misc_feature: MA Experiment 20000166 PARAMETER Experiment Name: At_100uM_ABA_P Parameter: Tissue Value: Aerial
  misc_feature: MA Experiment 20000166 PARAMETER Experiment Name: At_100uM_ABA_P Parameter: Treatment Value: 100uM ABA vs. No Treatment
  misc_feature: MA Experiment ID: 20000182 Result: Up-regulated in Transcription
  misc_feature: MA Experiment 20000182 PARAMETER Experiment Name: At_2mM_SA_P Parameter: Age (day) Value: 14
  misc_feature: MA Experiment 20000182 PARAMETER Experiment Name: At_2mM_SA_P Parameter: Organism Value: A. thaliana
  misc_feature: MA Experiment 20000182 PARAMETER Experiment Name: At_2mM_SA_P Parameter: Plant Line Value: WS
  misc_feature: MA Experiment 20000182 PARAMETER Experiment Name: At_2mM_SA_P Parameter: Timepoint (hr) Value: 6
  misc_feature: MA Experiment 20000182 PARAMETER Experiment Name: At_2mM_SA_P Parameter: Tissue Value: Aerial
  misc_feature: MA Experiment 20000182 PARAMETER Experiment Name: At_2mM_SA_P Parameter: Treatment Value: 2mM SA vs. No Treatment
  misc_feature: MA Experiment ID: 20000184 Result: Down-regulated in Transcription
  misc_feature: MA Experiment 20000184 PARAMETER Experiment Name: At_Shoots__P Parameter: Age (day) Value: 7
  misc_feature: MA Experiment 20000184 PARAMETER Experiment Name: At_Shoots__P Parameter: Tissue Value: Shoots vs. Whole Plant
  misc_feature: MA Experiment ID: 20000211 Result: Up-regulated in Transcription
  misc_feature: MA Experiment 20000211 PARAMETER Experiment Name: At_0.001percent_MeJA__P Parameter: Age (day) Value: 14
  misc_feature: MA Experiment 20000211 PARAMETER Experiment Name: At_0.001percent_MeJA__P Parameter: Organism Value: A. thaliana
  misc_feature: MA Experiment 20000211 PARAMETER Experiment Name: At_0.001percent_MeJA__P Parameter: Plant Line Value: WS
  misc_feature: MA Experiment 20000211 PARAMETER Experiment Name: At_0.001percent_MeJA__P Parameter: Timepoint (hr) Value: 1
  misc_feature: MA Experiment 20000211 PARAMETER Experiment Name: At_0.001percent_MeJA__P Parameter: Tissue Value: Aerial
  misc_feature: MA Experiment 20000211 PARAMETER Experiment Name: At_0.001percent_MeJA__P Parameter: Treatment Value: 0.001percent MeJA vs. No Treatment
  misc_feature: MA Experiment ID: 20000234 Result: Down-regulated in Transcription
  misc_feature: MA Experiment 20000234 PARAMETER Experiment Name: At_Siliques_P Parameter: Age (day) Value: 21
  misc_feature: MA Experiment 20000234 PARAMETER Experiment Name: At_Siliques_P Parameter: Organism Value: A. thaliana
  misc_feature: MA Experiment 20000234 PARAMETER Experiment Name: At_Siliques_P Parameter: Plant Line Value: WS
  misc_feature: MA Experiment 20000234 PARAMETER Experiment Name: At_Siliques_P Parameter: Tissue Value: Less Than 5mm Siliques vs. Whole Plant
  misc_feature: MA Experiment ID: 20000235 Result: Down-regulated in Transcription
  misc_feature: MA Experiment 20000235 PARAMETER Experiment Name: At_Siliques_P Parameter: Age (day) Value: 21
  misc_feature: MA Experiment 20000235 PARAMETER Experiment Name: At_Siliques_P Parameter: Organism Value: A. thaliana
  misc_feature: MA Experiment 20000235 PARAMETER Experiment Name: At_Siliques_P Parameter: Plant Line Value: WS
  misc_feature: MA Experiment 20000235 PARAMETER Experiment Name: At_Siliques_P Parameter: Tissue Value: 5-10mm Siliques vs. Whole Plant
  misc_feature: MA Experiment ID: 20000264 Result: Down-regulated in Transcription
  misc_feature: MA Experiment 20000264 PARAMETER Experiment Name: At_Open_Flower_P Parameter: Age (day) Value: 21
  misc_feature: MA Experiment 20000264 PARAMETER Experiment Name: At_Open_Flower_P Parameter: Plant Line Value: WS
  misc_feature: MA Experiment 20000264 PARAMETER Experiment Name: At_Open_Flower_P Parameter: Tissue Value: Open Flower vs. Whole Plant
  misc_feature: MA Experiment ID: 20000438 Result: Down-regulated in Transcription
  misc_feature: MA Experiment 20000438 PARAMETER Experiment Name: At_Shoots__P Parameter: Age (day) Value: 14
  misc_feature: MA Experiment 20000438 PARAMETER Experiment Name: At_Shoots__P Parameter: Tissue Value: Shoots vs. Whole Plant
  misc_feature: MA Experiment ID: 20001557 Result: Up-regulated in Transcription
  misc_feature: MA Experiment 20001557 PARAMETER Experiment Name: At_Drought_Soil_Dry_P Parameter: Age (day) Value: 27
  misc_feature: MA Experiment 20001557 PARAMETER Experiment Name: At_Drought_Soil_Dry_P Parameter: Organism Value: A. thaliana
  misc_feature: MA Experiment 20001557 PARAMETER Experiment Name: At_Drought_Soil_Dry_P Parameter: Plant Line Value: WS
  misc_feature: MA Experiment 20001557 PARAMETER Experiment Name: At_Drought_Soil_Dry_P Parameter: Post Timepoint (hr) Value: 3
  misc_feature: MA Experiment 20001557 PARAMETER Experiment Name: At_Drought_Soil_Dry_P Parameter: Post-Treatment Value: Re-Water vs. No Drought
  misc_feature: MA Experiment 20001557 PARAMETER Experiment Name: At_Drought_Soil_Dry_P Parameter: Timepoint (day) Value: 13
  misc_feature: MA Experiment 20001557 PARAMETER Experiment Name: At_Drought_Soil_Dry_P Parameter: Treatment Value: Drought vs. No Drought
  misc_feature: MA Experiment ID: 20001560 Result: Up-regulated in Transcription
  misc_feature: MA Experiment 20001560 PARAMETER Experiment Name: At_Drought_Soil_Dry_P Parameter: Age (day) Value: 28
  misc_feature: MA Experiment 20001560 PARAMETER Experiment Name: At_Drought_Soil_Dry_P Parameter: Organism Value: A. thaliana
  misc_feature: MA Experiment 20001560 PARAMETER Experiment Name: At_Drought_Soil_Dry_P Parameter: Plant Line Value: WS
  misc_feature: MA Experiment 20001560 PARAMETER Experiment Name: At_Drought_Soil_Dry_P Parameter: Post Timepoint (hr) Value: None
  misc_feature: MA Experiment 20001560 PARAMETER Experiment Name: At_Drought_Soil_Dry_P Parameter: Post-Treatment Value: None
  misc_feature: MA Experiment 20001560 PARAMETER Experiment Name: At_Drought_Soil_Dry_P Parameter: Timepoint (day) Value: 14
  misc_feature: MA Experiment 20001560 PARAMETER Experiment Name: At_Drought_Soil_Dry_P Parameter: Treatment Value: Drought vs. No Drought
atggattacgagaggatacagaaagtgcagaagagtataatctcgccaacgaagctgagaatgaagctaatgggtccactcaataacatgaagcgagaaggatccaagtccaacagtaactcttcaagaacatctccttctcgtcttcagattccagatgactccgagttctccaagaacagcttgttagcttctaactcttattcagacgacgatgctacaactacggatatagaagtagctaagctgccaaatgagccggttttgtatccaaccgagaacgataatcaaggctcaaaagatcggtgtgaaggtgttgttccaagggaaaatgatcagcctagactgcagcaatttaggaaaggggacttgaatatggcttctcctcatataatgagacctcaagaagatgaaaaccttgattatgacagtaacgctagctcttcaagcttcgagtttcaccgagctcgtggtgagcgttcgaatcagaatcatggctcaagaggatatccttcaagacaaatgccatctaaatggaatgatgctgagaagtggataatgagcagacagaacatggtgatgaggaagaacggtcaagggaaccgaatacctgtgagaattgtgcctgataatgcaggttacgagcataacaaatctaggatggatctgtgccaatcctcacaagttgatgggtttgagaagttccctaatgttgttccctcggcgccacatcctattctaactcaagagtatggaggagactcgttgattgaccaatccacacaaagcaatgatcttgcggattcatcacatgatcatacaacaggtggtcctgcgattcgttcggtatgtatgagagatatgggaaccgaaatgacacctataccgagtcaagaaccttcaagatctgtgacaccagttggtgcaacaactcctcttcgtagcccgacttcatctctcccttctactcctagaggtggccaaccagaggaatcttctatgtcgaaaaacacaagaagagaactatctgaggaggaagagaaagcgaagacgcgaagagagattgtagctcttggagttcagctagggaagatgaacatcgccgcttgggcaagtaaagaagaagaggagaacaagaaaaacaatggagatgcagaggaggcacagaagattgagtttgaaaaacgagcgactgcatgggaagaagcagagaaatccaaacataatgcgaggtataagcgtgaggaaatcagaatccaagcttgggaaagtcaggagaaagccaaactcgaagcagaaatgcgacgtatagaggctaaagttgagcagatgaaagctgaagctgaagcaaagataatgaagaaaattgcgttggctaagcaaaggtcagaagagaaacgggctttggcggaagctagaaaaacccgtgatgctgagaaggcagtggctgaagcccaatatattcgggaaactggtagaataccggcatcaagttacaagatatgttgtggttggttctcatga

SEQ ID NO: 85789 - protein, 507 aa, Arabidopsis thaliana
  peptide (1)..(507): Ceres Seq. ID no. 12683225
  misc_feature (388)..(499): Pfam Name: Remorin, C-terminal region Pfam Description: Remorin, C-terminal region
  misc_feature (1)..(507): Homolog of NCBI NO: 15220725 NR Description: hypothetical protein; protein id: At1g30320.1
  misc_feature (206)..(502): Homolog of NCBI NO: 18395321 NR Description: expressed protein; protein id: At2g02170.1, by cDNA: gi_14326557 [Arabidopsis thaliana]
  misc_feature (39)..(506): Homolog of NCBI NO: 38344336 NR Description: OSJNBa0058K23.18 [Oryza sativa (japonica
  misc_feature (278)..(505): Homolog of NCBI NO: 34902218 NR Description: Unknown protein [Oryza sativa (japonica
  misc_feature (1)..(493): Homolog of NCBI NO: 38344336 NR Description: OSJNBa0058K23.18 [Oryza sativa (japonica
  misc_feature (304)..(501): Homolog of NCBI NO: 18408804 NR Description: expressed protein; protein id: At1g67590.1, by cDNA: 10212. [Arabidopsis thaliana] F12A21.28 [Arabidopsis thaliana]
  misc_feature (304)..(501): Homolog of NCBI NO: 28393368 NR Description: unknown protein [Arabidopsis thaliana]
  misc_feature (304)..(501): Homolog of NCBI NO: 21536537 NR Description: unknown [Arabidopsis thaliana]
  misc_feature (286)..(486): Homolog of NCBI NO: 15220963 NR Description: hypothetical protein; protein id: At1g53860.1
  misc_feature (280)..(464): Homolog of NCBI NO: 28393368 NR Description: unknown protein [Arabidopsis thaliana]
MDYERIQKVQKSIISPTKLRMKLMGPLNNMKREGSKSNSNSSRTSPSRLQIPDDSEFSKNSLLASNSYSDDDATTTDIEVAKLPNEPVLYPTENDNQGSKDRCEGVVPRENDQPRLQQFRKGDLNMASPHIMRPQEDENLDYDSNASSSSFEFHRARGERSNQNHGSRGYPSRQMPSKWNDAEKWIMSRQNMVMRKNGQGNRIPVRIVPDNAGYEHNKSRMDLCQSSQVDGFEKFPNVVPSAPHPILTQEYGGDSLIDQSTQSNDLADSSHDHTTGGPAIRSVCMRDMGTEMTPIPSQEPSRSVTPVGATTPLRSPTSSLPSTPRGGQPEESSMSKNTRRELSEEEEKAKTRREIVALGVQLGKMNIAAWASKEEEENKKNNGDAEEAQKIEFEKRATAWEEAEKSKHNARYKREEIRIQAWESQEKAKLEAEMRRIEAKVEQMKAEAEAKIMKKIALAKQRSEEKRALAEARKTRDAEKAVAEAQYIRETGRIPASSYKICCGWFS

SEQ ID NO: 85790 - protein, 487 aa, Arabidopsis thaliana
  peptide (1)..(487): Ceres Seq. ID no. 12683226
  misc_feature (368)..(479): Pfam Name: Remorin, C-terminal region Pfam Description: Remorin, C-terminal region
  misc_feature (1)..(487): Homolog of NCBI NO: 15220725 NR Description: hypothetical protein; protein id: At1g30320.1
  misc_feature (186)..(482): Homolog of NCBI NO: 18395321 NR Description: expressed protein; protein id: At2g02170.1, by cDNA: gi_14326557 [Arabidopsis thaliana]
  misc_feature (19)..(486): Homolog of NCBI NO: 38344336 NR Description: OSJNBa0058K23.18 [Oryza sativa (japonica
  misc_feature (258)..(485): Homolog of NCBI NO: 34902218 NR Description: Unknown protein [Oryza sativa (japonica
  misc_feature (1)..(473): Homolog of NCBI NO: 38344336 NR Description: OSJNBa0058K23.18 [Oryza sativa (japonica
  misc_feature (284)..(481): Homolog of NCBI NO: 18408804 NR Description: expressed protein; protein id: At1g67590.1, by cDNA: 10212. [Arabidopsis thaliana] F12A21.28 [Arabidopsis thaliana]
  misc_feature (284)..(481): Homolog of NCBI NO: 28393368 NR Description: unknown protein [Arabidopsis thaliana]
  misc_feature (284)..(481): Homolog of NCBI NO: 21536537 NR Description: unknown [Arabidopsis thaliana]
  misc_feature (266)..(466): Homolog of NCBI NO: 15220963 NR Description: hypothetical protein; protein id: At1g53860.1
  misc_feature (260)..(444): Homolog of NCBI NO: 28393368 NR Description: unknown protein [Arabidopsis thaliana]
MKLMGPLNNMKREGSKSNSNSSRTSPSRLQIPDDSEFSKNSLLASNSYSDDDATTTDIEVAKLPNEPVLYPTENDNQGSKDRCEGVVPRENDQPRLQQFRKGDLNMASPHIMRPQEDENLDYDSNASSSSFEFHRARGERSNQNHGSRGYPSRQMPSKWNDAEKWIMSRQNMVMRKNGQGNRIPVRIVPDNAGYEHNKSRMDLCQSSQVDGFEKFPNVVPSAPHPILTQEYGGDSLIDQSTQSNDLADSSHDHTTGGPAIRSVCMRDMGTEMTPIPSQEPSRSVTPVGATTPLRSPTSSLPSTPRGGQPEESSMSKNTRRELSEEEEKAKTRREIVALGVQLGKMNIAAWASKEEEENKKNNGDAEEAQKIEFEKRATAWEEAEKSKHNARYKREEIRIQAWESQEKAKLEAEMRRIEAKVEQMKAEAEAKIMKKIALAKQRSEEKRALAEARKTRDAEKAVAEAQYIRETGRIPASSYKICCGWFS

SEQ ID NO: 85791 - protein, 484 aa, Arabidopsis thaliana
  peptide (1)..(484): Ceres Seq. ID no. 12683227
  misc_feature (365)..(476): Pfam Name: Remorin, C-terminal region Pfam Description: Remorin, C-terminal region
  misc_feature (1)..(484): Homolog of NCBI NO: 15220725 NR Description: hypothetical protein; protein id: At1g30320.1
  misc_feature (183)..(479): Homolog of NCBI NO: 18395321 NR Description: expressed protein; protein id: At2g02170.1, by cDNA: gi_14326557 [Arabidopsis thaliana]
  misc_feature (16)..(483): Homolog of NCBI NO: 38344336 NR Description: OSJNBa0058K23.18 [Oryza sativa (japonica
  misc_feature (255)..(482): Homolog of NCBI NO: 34902218 NR Description: Unknown protein [Oryza sativa (japonica
  misc_feature (1)..(470): Homolog of NCBI NO: 38344336 NR Description: OSJNBa0058K23.18 [Oryza sativa (japonica
  misc_feature (281)..(478): Homolog of NCBI NO: 18408804 NR Description: expressed protein; protein id: At1g67590.1, by cDNA: 10212. [Arabidopsis thaliana] F12A21.28 [Arabidopsis thaliana]
  misc_feature (281)..(478): Homolog of NCBI NO: 21536537 NR Description: unknown [Arabidopsis thaliana]
  misc_feature (281)..(478): Homolog of NCBI NO: 28393368 NR Description: unknown protein [Arabidopsis thaliana]
  misc_feature (263)..(463): Homolog of NCBI NO: 15220963 NR Description: hypothetical protein; protein id: At1g53860.1
  misc_feature (257)..(441): Homolog of NCBI NO: 28393368 NR Description: unknown protein [Arabidopsis thaliana]
MGPLNNMKREGSKSNSNSSRTSPSRLQIPDDSEFSKNSLLASNSYSDDDATTTDIEVAKLPNEPVLYPTENDNQGSKDRCEGVVPRENDQPRLQQFRKGDLNMASPHIMRPQEDENLDYDSNASSSSFEFHRARGERSNQNHGSRGYPSRQMPSKWNDAEKWIMSRQNMVMRKNGQGNRIPVRIVPDNAGYEHNKSRMDLCQSSQVDGFEKFPNVVPSAPHPILTQEYGGDSLIDQSTQSNDLADSSHDHTTGGPAIRSVCMRDMGTEMTPIPSQEPSRSVTPVGATTPLRSPTSSLPSTPRGGQPEESSMSKNTRRELSEEEEKAKTRREIVALGVQLGKMNIAAWASKEEEENKKNNGDAEEAQKIEFEKRATAWEEAEKSKHNARYKREEIRIQAWESQEKAKLEAEMRRIEAKVEQMKAEAEAKIMKKIALAKQRSEEKRALAEARKTRDAEKAVAEAQYIRETGRIPASSYKICCGWFS

SEQ ID NO: 85792 - DNA, 489 bp, Arabidopsis thaliana
  misc_feature (1)..(489): Ceres Seq. ID no. 12683254
  misc_feature: MA Experiment ID: 20000171 Result: Up-regulated in Transcription
  misc_feature: MA Experiment 20000171 PARAMETER Experiment Name: At_42deg_Heat_P Parameter: Age (day) Value: 14
  misc_feature: MA Experiment 20000171 PARAMETER Experiment Name: At_42deg_Heat_P Parameter: Organism Value: A. thaliana
  misc_feature: MA Experiment 20000171 PARAMETER Experiment Name: At_42deg_Heat_P Parameter: Plant Line Value: WS
  misc_feature: MA Experiment 20000171 PARAMETER Experiment Name: At_42deg_Heat_P Parameter: Temperature (deg C) Value: 42 vs. 22
  misc_feature: MA Experiment 20000171 PARAMETER Experiment Name: At_42deg_Heat_P Parameter: Timepoint (hr) Value: 1
  misc_feature: MA Experiment 20000171 PARAMETER Experiment Name: At_42deg_Heat_P Parameter: Tissue Value: Aerial
  misc_feature: MA Experiment ID: 20000173 Result: Up-regulated in Transcription
  misc_feature: MA Experiment 20000173 PARAMETER Experiment Name: At_42deg_Heat_P Parameter: Age (day) Value: 14
  misc_feature: MA Experiment 20000173 PARAMETER Experiment Name: At_42deg_Heat_P Parameter: Organism Value: A. thaliana
  misc_feature: MA Experiment 20000173 PARAMETER Experiment Name: At_42deg_Heat_P Parameter: Plant Line Value: WS
  misc_feature: MA Experiment 20000173 PARAMETER Experiment Name: At_42deg_Heat_P Parameter: Temperature (deg C) Value: 42 vs. 22
  misc_feature: MA Experiment 20000173 PARAMETER Experiment Name: At_42deg_Heat_P Parameter: Timepoint (hr) Value: 6
  misc_feature: MA Experiment 20000173 PARAMETER Experiment Name: At_42deg_Heat_P Parameter: Tissue Value: Aerial
  misc_feature: MA Experiment ID: 20000180 Result: Down-regulated in Transcription
  misc_feature: MA Experiment 20000180 PARAMETER Experiment Name: At_Germinating_Seeds_P Parameter: Age (hr) Value: 24 vs. 0
  misc_feature: MA Experiment 20000180 PARAMETER Experiment Name: At_Germinating_Seeds_P Parameter: Tissue Value: Germinating Seeds
  misc_feature: MA Experiment ID: 20000437 Result: Up-regulated in Transcription
  misc_feature: MA Experiment 20000437 PARAMETER Experiment Name: At_Drought_P Parameter: Age (day) Value: 8
  misc_feature: MA Experiment 20000437 PARAMETER Experiment Name: At_Drought_P Parameter: Organism Value: A. thaliana
  misc_feature: MA Experiment 20000437 PARAMETER Experiment Name: At_Drought_P Parameter: Plant Line Value: WS
  misc_feature: MA Experiment 20000437 PARAMETER Experiment Name: At_Drought_P Parameter: Timepoint (hr) Value: 24
  misc_feature: MA Experiment 20000437 PARAMETER Experiment Name: At_Drought_P Parameter: Tissue Value: Whole Plant
  misc_feature: MA Experiment 20000437 PARAMETER Experiment Name: At_Drought_P Parameter: Treatment Value: Drought vs. No Drought
  misc_feature: MA Experiment ID: 20001911 Result: Up-regulated in Transcription
  misc_feature: MA Experiment 20001911 PARAMETER Experiment Name: At_Drought_Reproduction_P Parameter: Age (day) Value: 40
  misc_feature: MA Experiment 20001911 PARAMETER Experiment Name: At_Drought_Reproduction_P Parameter: Organism Value: A. thaliana
  misc_feature: MA Experiment 20001911 PARAMETER Experiment Name: At_Drought_Reproduction_P Parameter: Plant Line Value: WS
  misc_feature: MA Experiment 20001911 PARAMETER Experiment Name: At_Drought_Reproduction_P Parameter: Timepoint (day) Value: 10
  misc_feature: MA Experiment 20001911 PARAMETER Experiment Name: At_Drought_Reproduction_P Parameter: Tissue Value: Flowers
  misc_feature: MA Experiment 20001911 PARAMETER Experiment Name: At_Drought_Reproduction_P Parameter: Treatment Value: Drought vs. No Drought
atgccggtaatgaatccatcattgtgtattggtacacaaacatcggtgtacctcgctcctcgtgagaaatcttttacgagtaatggaaactctcaaaggcgttatcctacaagcgtttctatgcaacgccagccttggagccaaagtaaattcccttctctccaggatgcagtgcaaccagttgtcgtctctaagaataaaagaccagtctttgcatgtaactctgcgctgaattcaaaatgcagtcaaggacaaacacagaccgttacacggcaatcaccaacaatcacacaagctcctactcatggaaaagttaaatccccaaagcttgatgacggtggaaacgggttcccacctcgggatgatggtggtggtggtggtggcggaggcggtggagggagctcttcaggtggattcttccttttcgggtttcttttgttcatgggatacttgaaagatttggagggcgaacatgaaaacaaccattaa

SEQ ID NO: 85793 - protein, 162 aa, Arabidopsis thaliana
  peptide (1)..(162): Ceres Seq. ID no. 12683255
  misc_feature (4)..(162): Homolog of NCBI NO: 25372889 NR Description: protein F26G16.9 [imported] - Arabidopsis >gi|6634770|gb|AAF19750.1|AC009917_9 F26G16.9 [Arabidopsis
  misc_feature (24)..(159): Homolog of NCBI NO: 18405726 NR Description: expressed protein; protein id: At1g56200.1, by cDNA: 13451., supported by cDNA: gi_17979540, supported by gi_20334907 [Arabidopsis thaliana] >gi|25372888|pir||E96603
MPVMNPSLCIGTQTSVYLAPREKSFTSNGNSQRRYPTSVSMQRQPWSQSKFPSLQDAVQPVVVSKNKRPVFACNSALNSKCSQGQTQTVTRQSPTITQAPTHGKVKSPKLDDGGNGFPPRDDGGGGGGGGGGGSSSGGFFLFGFLLFMGYLKDLEGEHENNH

SEQ ID NO: 85794 - protein, 159 aa, Arabidopsis thaliana
  peptide (1)..(159): Ceres Seq. ID no. 12683256
  misc_feature (1)..(159): Homolog of NCBI NO: 25372889 NR Description: protein F26G16.9 [imported] - Arabidopsis >gi|6634770|gb|AAF19750.1|AC009917_9 F26G16.9 [Arabidopsis
  misc_feature (21)..(156): Homolog of NCBI NO: 18405726 NR Description: expressed protein; protein id: At1g56200.1, by cDNA: 13451., supported by cDNA: gi_17979540, supported by gi_20334907 [Arabidopsis thaliana] >gi|25372888|pir||E96603
MNPSLCIGTQTSVYLAPREKSFTSNGNSQRRYPTSVSMQRQPWSQSKFPSLQDAVQPVVVSKNKRPVFACNSALNSKCSQGQTQTVTRQSPTITQAPTHGKVKSPKLDDGGNGFPPRDDGGGGGGGGGGGSSSGGFFLFGFLLFMGYLKDLEGEHENNH

SEQ ID NO: 85795 - protein, 122 aa, Arabidopsis thaliana
  peptide (1)..(122): Ceres Seq. ID no. 12683257
  misc_feature (1)..(122): Homolog of NCBI NO: 25372889 NR Description: protein F26G16.9 [imported] - Arabidopsis >gi|6634770|gb|AAF19750.1|AC009917_9 F26G16.9 [Arabidopsis
  misc_feature (1)..(119): Homolog of NCBI NO: 18405726 NR Description: expressed protein; protein id: At1g56200.1, by cDNA: 13451., supported by cDNA: gi_17979540, supported by gi_20334907 [Arabidopsis thaliana] >gi|25372888|pir||E96603
MQRQPWSQSKFPSLQDAVQPVVVSKNKRPVFACNSALNSKCSQGQTQTVTRQSPTITQAPTHGKVKSPKLDDGGNGFPPRDDGGGGGGGGGGGSSSGGFFLFGFLLFMGYLKDLEGEHENNH

SEQ ID NO: 85796 - DNA, 699 bp, Arabidopsis thaliana
  misc_feature (1)..(699): Ceres Seq. ID no. 12683377
  misc_feature: MA Experiment ID: 20000184 Result: Down-regulated in Transcription
  misc_feature: MA Experiment 20000184 PARAMETER Experiment Name: At_Shoots__P Parameter: Age (day) Value: 7
  misc_feature: MA Experiment 20000184 PARAMETER Experiment Name: At_Shoots__P Parameter: Tissue Value: Shoots vs. Whole Plant
  misc_feature: MA Experiment ID: 20000437 Result: Up-regulated in Transcription
  misc_feature: MA Experiment 20000437 PARAMETER Experiment Name: At_Drought_P Parameter: Age (day) Value: 8
  misc_feature: MA Experiment 20000437 PARAMETER Experiment Name: At_Drought_P Parameter: Organism Value: A. thaliana
  misc_feature: MA Experiment 20000437 PARAMETER Experiment Name: At_Drought_P Parameter: Plant Line Value: WS
  misc_feature: MA Experiment 20000437 PARAMETER Experiment Name: At_Drought_P Parameter: Timepoint (hr) Value: 24
  misc_feature: MA Experiment 20000437 PARAMETER Experiment Name: At_Drought_P Parameter: Tissue Value: Whole Plant
  misc_feature: MA Experiment 20000437 PARAMETER Experiment Name: At_Drought_P Parameter: Treatment Value: Drought vs. No Drought
  misc_feature: MA Experiment ID: 20000794 Result: Down-regulated in Transcription
  misc_feature: MA Experiment 20000794 PARAMETER Experiment Name: At_Petals_P Parameter: Age (day) Value: 23-25 days
  misc_feature: MA Experiment 20000794 PARAMETER Experiment Name: At_Petals_P Parameter: Plant Line Value: WS
  misc_feature: MA Experiment 20000794 PARAMETER Experiment Name: At_Petals_P Parameter: Tissue Value: Petals vs. Whole plant
  misc_feature: MA Experiment ID: 20001248 Result: Up-regulated in Transcription
  misc_feature: MA Experiment 20001248 PARAMETER Experiment Name: At_Far-red-induction_P Parameter: Age (day) Value: 7
  misc_feature: MA Experiment 20001248 PARAMETER Experiment Name: At_Far-red-induction_P Parameter: Light Value: Far-red vs. White
  misc_feature: MA Experiment 20001248 PARAMETER Experiment Name: At_Far-red-induction_P Parameter: Organism Value: A. thaliana
  misc_feature: MA Experiment 20001248 PARAMETER Experiment Name: At_Far-red-induction_P Parameter: Plant Line Value: Columbia
  misc_feature: MA Experiment 20001248 PARAMETER Experiment Name: At_Far-red-induction_P Parameter: Timepoint (hr) Value: 4
  misc_feature: MA Experiment 20001248 PARAMETER Experiment Name: At_Far-red-induction_P Parameter: Tissue Value: Whole Plant
  misc_feature: MA Experiment ID: 20001450 Result: Up-regulated in Transcription
  misc_feature: MA Experiment 20001450 PARAMETER Experiment Name: At_Far-red-induction_P Parameter: Age (day) Value: 7
  misc_feature: MA Experiment 20001450 PARAMETER Experiment Name: At_Far-red-induction_P Parameter: Light Value: Far-red vs. White
  misc_feature: MA Experiment 20001450 PARAMETER Experiment Name: At_Far-red-induction_P Parameter: Organism Value: A. thaliana
  misc_feature: MA Experiment 20001450 PARAMETER Experiment Name: At_Far-red-induction_P Parameter: Plant Line Value: Columbia
  misc_feature: MA Experiment 20001450 PARAMETER Experiment Name: At_Far-red-induction_P Parameter: Timepoint (hr) Value: 8
  misc_feature: MA Experiment 20001450 PARAMETER Experiment Name: At_Far-red-induction_P Parameter: Tissue Value: Whole Plant
atgatgatgatggcaacgaaacctgcatggcttgaaggtttaatggcggagactttcttctcaagctgtggaatccacgaaactcgccgtaaaagtgaaaagaacgttttttgcttactctgttgtctcagtgtttgtcctcactgtctcccttctcatcgctctcatcctcttcttcaggtgagacgatacgtataccacgacgtcgttcggttgagtgatcttgagaagctcatagattgttcatatgttcagccatatacaattaatggagccaaagtgatattcttaaaccaaagacaacaatcacgagctaaggtttcttcaaatgtttgcttcacttgtgatagaatccttcaagaaccattccacttttgttccctctcttgcaaggtggattatttatcatatcaaggagatgatttatcaagcattctctatagaattgatgaatcagattttacgttcgagggtttgagaatggacggacatgatcagctcggagagatatcgacgatggaggatggggaggatatactggtaatttcagatgaatctgagcaaggtaacaatagtcataagaaagagaagaagaagagcaagaagaagaagccagagagcaattacttgcctgggatggttctttcatcacttggtaatagaagaaaaggtgctcctcatagggctcctttttcataa

SEQ ID NO: 85797 - protein, 232 aa, Arabidopsis thaliana
  peptide (1)..(232): Ceres Seq. ID no. 12683378
  misc_feature (5)..(225): Pfam Name: Protein of unknown function, DUF597 Pfam Description: Protein of unknown function, DUF597
  misc_feature (1)..(232): Homolog of NCBI NO: 9755373 NR Description: F17F8.4 [Arabidopsis thaliana]
  misc_feature (1)..(232): Homolog of NCBI NO: 16117799 NR Description: zinc-binding protein [Pisum sativum]
  misc_feature (131)..(232): Homolog of NCBI NO: 15221598 NR Description: hypothetical protein; protein id: At1g31040.1
  misc_feature (8)..(230): Homolog of NCBI NO: 15232396 NR Description: putative protein; protein id: At3g60670.1
  misc_feature (8)..(231): Homolog of NCBI NO: 38346725 NR Description: OSJNBa0086O06.23 [Oryza sativa (japonica
  misc_feature (8)..(230): Homolog of NCBI NO: 15236696 NR Description: putative protein; protein id: At4g17900.1
  misc_feature (8)..(203): Homolog of NCBI NO: 15217560 NR Description: hypothetical protein; protein id: At1g43000.1 thaliana] >gi|12323060|gb|AAG51520.1|AC068324_8 hypothetical
  misc_feature (6)..(136): Homolog of NCBI NO: 6714272 NR Description: F6N18.8 [Arabidopsis thaliana]
  misc_feature (6)..(136): Homolog of NCBI NO: 18398555 NR Description: expressed protein; protein id: At1g32700.1,
  misc_feature (8)..(132): Homolog of NCBI NO: 21536890 NR Description: unknown [Arabidopsis thaliana]
MMMMATKPAWLEGLMAETFFSSCGIHETRRKSEKNVFCLLCCLSVCPHCLPSHRSHPLLQVRRYVYHDVVRLSDLEKLIDCSYVQPYTINGAKVIFLNQRQQSRAKVSSNVCFTCDRILQEPFHFCSLSCKVDYLSYQGDDLSSILYRIDESDFTFEGLRMDGHDQLGEISTMEDGEDILVISDESEQGNNSHKKEKKKSKKKKPESNYLPGMVLSSLGNRRKGAPHRAPFS

SEQ ID NO: 85798 - protein, 231 aa, Arabidopsis thaliana
  peptide (1)..(231): Ceres Seq. ID no. 12683379
  misc_feature (4)..(224): Pfam Name: Protein of unknown function, DUF597 Pfam Description: Protein of unknown function, DUF597
  misc_feature (1)..(231): Homolog of NCBI NO: 9755373 NR Description: F17F8.4 [Arabidopsis thaliana]
  misc_feature (1)..(231): Homolog of NCBI NO: 16117799 NR Description: zinc-binding protein [Pisum sativum]
  misc_feature (130)..(231): Homolog of NCBI NO: 15221598 NR Description: hypothetical protein; protein id: At1g31040.1
  misc_feature (7)..(229): Homolog of NCBI NO: 15232396 NR Description: putative protein; protein id: At3g60670.1
  misc_feature (7)..(230): Homolog of NCBI NO: 38346725 NR Description: OSJNBa0086O06.23 [Oryza sativa (japonica
  misc_feature (7)..(229): Homolog of NCBI NO: 15236696 NR Description: putative protein; protein id: At4g17900.1
  misc_feature (7)..(202): Homolog of NCBI NO: 15217560 NR Description: hypothetical protein; protein id: At1g43000.1 thaliana] >gi|12323060|gb|AAG51520.1|AC068324_8 hypothetical
  misc_feature (5)..(135): Homolog of NCBI NO: 6714272 NR Description: F6N18.8 [Arabidopsis thaliana]
  misc_feature (5)..(135): Homolog of NCBI NO: 18398555 NR Description: expressed protein; protein id: At1g32700.1,
  misc_feature (7)..(131): Homolog of NCBI NO: 21536890 NR Description: unknown [Arabidopsis thaliana]
MMMATKPAWLEGLMAETFFSSCGIHETRRKSEKNVFCLLCCLSVCPHCLPSHRSHPLLQVRRYVYHDVVRLSDLEKLIDCSYVQPYTINGAKVIFLNQRQQSRAKVSSNVCFTCDRILQEPFHFCSLSCKVDYLSYQGDDLSSILYRIDESDFTFEGLRMDGHDQLGEISTMEDGEDILVISDESEQGNNSHKKEKKKSKKKKPESNYLPGMVLSSLGNRRKGAPHRAPFS

SEQ ID NO: 85799 - protein, 230 aa, Arabidopsis thaliana
  peptide (1)..(230): Ceres Seq. ID no. 12683380
  misc_feature (3)..(223): Pfam Name: Protein of unknown function, DUF597 Pfam Description: Protein of unknown function, DUF597
  misc_feature (1)..(230): Homolog of NCBI NO: 9755373 NR Description: F17F8.4 [Arabidopsis thaliana]
  misc_feature (1)..(230): Homolog of NCBI NO: 16117799 NR Description: zinc-binding protein [Pisum sativum]
  misc_feature (129)..(230): Homolog of NCBI NO: 15221598 NR Description: hypothetical protein; protein id: At1g31040.1
  misc_feature (6)..(228): Homolog of NCBI NO: 15232396 NR Description: putative protein; protein id: At3g60670.1
  misc_feature (6)..(229): Homolog of NCBI NO: 38346725 NR Description: OSJNBa0086O06.23 [Oryza sativa (japonica
  misc_feature (6)..(228): Homolog of NCBI NO: 15236696 NR Description: putative protein; protein id: At4g17900.1
  misc_feature (6)..(201): Homolog of NCBI NO: 15217560 NR Description: hypothetical protein; protein id: At1g43000.1 thaliana] >gi|12323060|gb|AAG51520.1|AC068324_8 hypothetical
  misc_feature (4)..(134): Homolog of NCBI NO: 6714272 NR Description: F6N18.8 [Arabidopsis thaliana]
  misc_feature (4)..(134): Homolog of NCBI NO: 18398555 NR Description: expressed protein; protein id: At1g32700.1,
  misc_feature (6)..(130): Homolog of NCBI NO: 21536890 NR Description: unknown [Arabidopsis thaliana]
MMATKPAWLEGLMAETFFSSCGIHETRRKSEKNVFCLLCCLSVCPHCLPSHRSHPLLQVRRYVYHDVVRLSDLEKLIDCSYVQPYTINGAKVIFLNQRQQSRAKVSSNVCFTCDRILQEPFHFCSLSCKVDYLSYQGDDLSSILYRIDESDFTFEGLRMDGHDQLGEISTMEDGEDILVISDESEQGNNSHKKEKKKSKKKKPESNYLPGMVLSSLGNRRKGAPHRAPFS

SEQ ID NO: 85800 - DNA, 762 bp, Arabidopsis thaliana
  misc_feature (1)..(762): Ceres Seq. ID no. 12683878
  misc_feature: MA Experiment ID: 20000314 Result: Down-regulated in Transcription
  misc_feature: MA Experiment 20000314 PARAMETER Experiment Name: At_14day_Shoots-Roots_Sub_P Parameter: Age (day) Value: 14
  misc_feature: MA Experiment 20000314 PARAMETER Experiment Name: At_14day_Shoots-Roots_Sub_P Parameter: Organism Value: A. thaliana
  misc_feature: MA Experiment 20000314 PARAMETER Experiment Name: At_14day_Shoots-Roots_Sub_P Parameter: Plant Line Value: WS
  misc_feature: MA Experiment 20000314 PARAMETER Experiment Name: At_14day_Shoots-Roots_Sub_P Parameter: Tissue Value: Roots vs. Whole Plant
  misc_feature: MA Experiment ID: 20000315 Result: Down-regulated in Transcription
  misc_feature: MA Experiment 20000315 PARAMETER Experiment Name: At_14day_Shoots-Roots_Sub_P Parameter: Age (day) Value: 14
  misc_feature: MA Experiment 20000315 PARAMETER Experiment Name: At_14day_Shoots-Roots_Sub_P Parameter: Organism Value: A. thaliana
  misc_feature: MA Experiment 20000315 PARAMETER Experiment Name: At_14day_Shoots-Roots_Sub_P Parameter: Plant Line Value: WS
  misc_feature: MA Experiment 20000315 PARAMETER Experiment Name: At_14day_Shoots-Roots_Sub_P Parameter: Tissue Value: Shoots vs. Whole Plant
  misc_feature: MA Experiment ID: 20000327 Result: Down-regulated in Transcription
  misc_feature: MA Experiment 20000327 PARAMETER Experiment Name: At_42deg_Heat_Sub_P Parameter: Age (day) Value: 14
  misc_feature: MA Experiment 20000327 PARAMETER Experiment Name: At_42deg_Heat_Sub_P Parameter: Organism Value: A. thaliana
  misc_feature: MA Experiment 20000327 PARAMETER Experiment Name: At_42deg_Heat_Sub_P Parameter: Plant Line Value: WS
  misc_feature: MA Experiment 20000327 PARAMETER Experiment Name: At_42deg_Heat_Sub_P Parameter: Temperature (deg C) Value: 42 vs. 22
  misc_feature: MA Experiment 20000327 PARAMETER Experiment Name: At_42deg_Heat_Sub_P Parameter: Timepoint (hr) Value: 1
  misc_feature: MA Experiment 20000327 PARAMETER Experiment Name: At_42deg_Heat_Sub_P Parameter: Tissue Value: Aerial
  misc_feature: MA Experiment ID: 20000328 Result: Down-regulated in Transcription
  misc_feature: MA Experiment 20000328 PARAMETER Experiment Name: At_42deg_Heat_Sub_P Parameter: Age (day) Value: 14
  misc_feature: MA Experiment 20000328 PARAMETER Experiment Name: At_42deg_Heat_Sub_P Parameter: Organism Value: A. thaliana
  misc_feature: MA Experiment 20000328 PARAMETER Experiment Name: At_42deg_Heat_Sub_P Parameter: Plant Line Value: WS
  misc_feature: MA Experiment 20000328 PARAMETER Experiment Name: At_42deg_Heat_Sub_P Parameter: Temperature (deg C) Value: 42 vs. 22
  misc_feature: MA Experiment 20000328 PARAMETER Experiment Name: At_42deg_Heat_Sub_P Parameter: Timepoint (hr) Value: 6
  misc_feature: MA Experiment 20000328 PARAMETER Experiment Name: At_42deg_Heat_Sub_P Parameter: Tissue Value: Aerial
  misc_feature: MA Experiment ID: 20000329 Result: Up-regulated in Transcription
  misc_feature: MA Experiment 20000329 PARAMETER Experiment Name: At_4deg_Cold_Sub_P Parameter: Age (day) Value: 14
  misc_feature: MA Experiment 20000329 PARAMETER Experiment Name: At_4deg_Cold_Sub_P Parameter: Organism Value: A. thaliana
  misc_feature: MA Experiment 20000329 PARAMETER Experiment Name: At_4deg_Cold_Sub_P Parameter: Plant Line Value: WS
  misc_feature: MA Experiment 20000329 PARAMETER Experiment Name: At_4deg_Cold_Sub_P Parameter: Temperature (deg C) Value: 4 vs. 22
  misc_feature: MA Experiment 20000329 PARAMETER Experiment Name: At_4deg_Cold_Sub_P Parameter: Timepoint (hr) Value: 6
  misc_feature: MA Experiment 20000329 PARAMETER Experiment Name: At_4deg_Cold_Sub_P Parameter: Tissue Value: Aerial
  misc_feature: MA Experiment ID: 20000332 Result: Up-regulated in Transcription
  misc_feature: MA Experiment 20000332 PARAMETER Experiment Name: At_4deg_Cold_Sub_P Parameter: Age (day) Value: 14
  misc_feature: MA Experiment 20000332 PARAMETER Experiment Name: At_4deg_Cold_Sub_P Parameter: Organism Value: A. thaliana
  misc_feature: MA Experiment 20000332 PARAMETER Experiment Name: At_4deg_Cold_Sub_P Parameter: Plant Line Value: WS
  misc_feature: MA Experiment 20000332 PARAMETER Experiment Name: At_4deg_Cold_Sub_P Parameter: Temperature (deg C) Value: 4 vs. 22
  misc_feature: MA Experiment 20000332 PARAMETER Experiment Name: At_4deg_Cold_Sub_P Parameter: Timepoint (hr) Value: 2
  misc_feature: MA Experiment 20000332 PARAMETER Experiment Name: At_4deg_Cold_Sub_P Parameter: Tissue Value: Aerial
  misc_feature: MA Experiment ID: 20000347 Result: Down-regulated in Transcription
  misc_feature: MA Experiment 20000347 PARAMETER Experiment Name: At_2mM_SA_Sub_P Parameter: Age (day) Value: 14
  misc_feature: MA Experiment 20000347 PARAMETER Experiment Name: At_2mM_SA_Sub_P Parameter: Organism Value: A. thaliana
  misc_feature: MA Experiment 20000347 PARAMETER Experiment Name: At_2mM_SA_Sub_P Parameter: Plant Line Value: WS
  misc_feature: MA Experiment 20000347 PARAMETER Experiment Name: At_2mM_SA_Sub_P Parameter: Timepoint (hr) Value: 6
  misc_feature: MA Experiment 20000347 PARAMETER Experiment Name: At_2mM_SA_Sub_P Parameter: Tissue Value: Aerial
  misc_feature: MA Experiment 20000347 PARAMETER Experiment Name: At_2mM_SA_Sub_P Parameter: Treatment Value: 2mM SA vs. No Treatment
  misc_feature: MA Experiment ID: 20000355 Result: Down-regulated in Transcription
  misc_feature: MA Experiment 20000355 PARAMETER Experiment Name: At_Siliques_Sub_P Parameter: Age (day) Value: 21
  misc_feature: MA Experiment 20000355 PARAMETER Experiment Name: At_Siliques_Sub_P Parameter: Organism Value: A. thaliana
  misc_feature: MA Experiment 20000355 PARAMETER Experiment Name: At_Siliques_Sub_P Parameter: Plant Line Value: WS
  misc_feature: MA Experiment 20000355 PARAMETER Experiment Name: At_Siliques_Sub_P Parameter: Tissue Value: Less Than 5mm Siliques vs. Whole Plant
  misc_feature: MA Experiment ID: 20000440 Result: Down-regulated in Transcription
  misc_feature: MA Experiment 20000440 PARAMETER Experiment Name: At_Closed-Flower__Sub_P Parameter: Tissue Value: Closed Flower vs. Whole Plant
  misc_feature: MA Experiment ID: 20001806 Result: Up-regulated in Transcription
  misc_feature: MA Experiment 20001806 PARAMETER Experiment Name: At_50mM_NH4NO3_L-to-H_Sub_P Parameter: Timepoint (hr) Value: 4
  misc_feature: MA Experiment 20001806 PARAMETER Experiment Name: At_50mM_NH4NO3_L-to-H_Sub_P Parameter: Tissue Value: Leaf
  misc_feature: MA Experiment 20001806 PARAMETER Experiment Name: At_50mM_NH4NO3_L-to-H_Sub_P Parameter: Treatment Value: 50mM NH4NO3 vs 100mM Mannitol
  misc_feature: MA Experiment ID: 20001807 Result: Up-regulated in Transcription
  misc_feature: MA Experiment 20001807 PARAMETER Experiment Name: At_50mM_NH4NO3_L-to-H_Sub_P Parameter: Timepoint (hr) Value: 6
  misc_feature: MA Experiment 20001807 PARAMETER Experiment Name: At_50mM_NH4NO3_L-to-H_Sub_P Parameter: Tissue Value: Leaf
  misc_feature: MA Experiment 20001807 PARAMETER Experiment Name: At_50mM_NH4NO3_L-to-H_Sub_P Parameter: Treatment Value: 50mM NH4NO3 vs 100mM Mannitol
atggcgacttctcagcaatttttaaaccctacactcttcaaatccttagcttcctcaaacaaaaactcatgtactctctgcccatctcctttcttgcaactcaagtccgcctccacaattttcaattacaaaccacttacttcctcctccgccacgatcatcacacgcgtcgctgcatcatcctccgattcaggcgagtcaataaccagagagactttccacggcctctgcttcgtcttgaaagacaacatcgacaccgatcaaataatccccgccgagtacggcactctcatcccttcgattccagaagatcgcgagaaactcggctctttcgcgcttaacggcttaccaaaattctacaacgaacgtttcgttgttccaggagagatgaaatcaaagtactcagtcatcatcggcggcgataatttcggttgcggatcttcccgcgaacacgctccagtttgtctcggcgcggcgggagctaaagctgtggtggcggaatcgtacgctaggatctttttcaggaactgtgtagctacaggtgagattttcccgttggaatcggaggttaggatttgcgacgagtgcaaaacaggggatgtggtgacaatcgaacacaaggaagacggtagtagtttgctgatcaatcatacgacgaggaaagaatacaaactgaaaccgctcggtgatgccggtccggtgatcgacgccggtggaatcttcgcttatgcaagaaaagccggcatgattccttctgcttga

SEQ ID NO: 85801 - protein, 253 aa, Arabidopsis thaliana
  peptide (1)..(253): Ceres Seq. ID no. 12683879
  misc_feature (1)..(253): Homolog of NCBI NO: 15231608 NR Description: 3-isopropylmalate dehydratase-like protein (small protein id: At3g58990.1, supported by cDNA: gi_17529161
  misc_feature (1)..(253): Homolog of NCBI NO: 15224221 NR Description: 3-isopropylmalate dehydratase, small subunit; id: At2g43090.1, supported by cDNA: 31507., supported by cDNA:
  misc_feature (10)..(252): Homolog of NCBI NO: 15224222 NR Description: 3-isopropylmalate dehydratase, small subunit; id: At2g43100.1, supported by cDNA: gi_16974632, supported by
  misc_feature (15)..(252): Homolog of NCBI NO: 14140144 NR Description: putative protein [Oryza sativa]
  misc_feature (75)..(250): Homolog of NCBI NO: 23041579 NR Description: hypothetical protein [Trichodesmium erythraeum
  misc_feature (75)..(252): Homolog of NCBI NO: 21673448 NR Description: 3-isopropylmalate dehydratase, small subunit,
  misc_feature (75)..(246): Homolog of NCBI NO: 15643321 NR Description: 3-isopropylmalate dehydratase, small subunit
  misc_feature (79)..(230): Homolog of NCBI NO: 15896420 NR Description: 3-isopropylmalate dehydratase, small subunit
  misc_feature (82)..(246): Homolog of NCBI NO: 14521550 NR Description: 3-isopropylmalate dehydratase, small subunit
  misc_feature (70)..(248): Homolog of NCBI NO: 20094218 NR Description: 3-isopropylmalate dehydratase small subunit
MATSQQFLNPTLFKSLASSNKNSCTLCPSPFLQLKSASTIFNYKPLTSSSATIITRVAASSSDSGESITRETFHGLCFVLKDNIDTDQIIPAEYGTLIPSIPEDREKLGSFALNGLPKFYNERFVVPGEMKSKYSVIIGGDNFGCGSSREHAPVCLGAAGAKAVVAESYARIFFRNCVATGEIFPLESEVRICDECKTGDVVTIEHKEDGSSLLINHTTRKEYKLKPLGDAGPVIDAGGIFAYARKAGMIPSA

SEQ ID NO: 85802 - DNA, 1621 bp, Arabidopsis thaliana
  misc_feature (1)..(1621): Ceres Seq. ID no. 12683902
  misc_feature: MA Experiment ID: 20000328 Result: Down-regulated in Transcription
  misc_feature: MA Experiment 20000328 PARAMETER Experiment Name: At_42deg_Heat_Sub_P Parameter: Age (day) Value: 14
  misc_feature: MA Experiment 20000328 PARAMETER Experiment Name: At_42deg_Heat_Sub_P Parameter: Organism Value: A. thaliana
  misc_feature: MA Experiment 20000328 PARAMETER Experiment Name: At_42deg_Heat_Sub_P Parameter: Plant Line Value: WS
  misc_feature: MA Experiment 20000328 PARAMETER Experiment Name: At_42deg_Heat_Sub_P Parameter: Temperature (deg C) Value: 42 vs. 22
  misc_feature: MA Experiment 20000328 PARAMETER Experiment Name: At_42deg_Heat_Sub_P Parameter: Timepoint (hr) Value: 6
  misc_feature: MA Experiment 20000328 PARAMETER Experiment Name: At_42deg_Heat_Sub_P Parameter: Tissue Value: Aerial
gaagtaaaaaagccctaaattgatatctctatcccttgcgcatgatccagattcggttgtgatcggagctgccatggaacgtatcatcggcggcaagtacaagctcggacggaagattggcggtggttcctttggagagattttcctagctacgcacatcgataccttcgagattgtagctgttaagatcgagaacagtaaaacaaaacatcctcagcttctctatgaagctaagctatatagaactcttgaaggaggaagtggaattccgcgcataagatggtttggagttgatggaacagagaatgctttagtgatggatttgctcggtccaagtctcgaagatcttttcgtctactgtgggagaaaattttcaccaaagacggtcttgatgttggctgatcaaatgctaactagaatagaatatgtacattccaaaggatatctgcatagagatataaaaccagataactttctcatgggcctaggccgcaaagcgaatcaggtttatctaattgactttggactggccaaaagatatcgtgatgccaacaccaaccgccacatcccttatagggaaaacaagaatttaacaggaactgcacgatatgcaagttgcaatacacatcttggtattgagcaaggtagacgggatgacctagagtctcttggatatgtgcttctgtacttcttaagaggaagccttccatggcagggtcttaaggctgttgacaagaagcaaaagtatgacaaaatttgtgagaagaagatatcaactcctattgaggttctatgcaaaagccaccccgtggagtttgcttcatattttcattattgccacacactgacatttgatcaacgccctgattatggattcttgaagcggctttttcgtgatttattctcacgggaaggatatgagtttgactatatatatgactggactattataaagtatcagcaatcacagaaaactagaagtcagtctcaggccgttcctgggtctagtaatgctcgtgcaataccaatggacacaagcaatcatcgaggaggaactaagatttcacatgaagcccaagtctctgaccgtgtcagaccggctaatgccagtggtccaagcccacagattaataccgctgtagggaggagtctgggttttgatcaagtccacaagaatatgaacatgccatcatccacttcattatctcctgcgggtacctcaaaaagaaatgtcagacccgaaacctcaaattctgggtttgggagcgggaataaaaccggcggttggacttcaccattcatgtcaccggggaaatgatgcaaaaaaagttggagtatatcattcatctgatctgctgagcaagattatgtgtgcctttgggtctaaactgtgatttctgcagtgaaaagctctagactgaggttgaagatctgaatggagtttttccatgaacagcttactgtttgacaaaaggcatgaagattatgtttgctttccttcaagattctcacaaatgactgacttcaacctttgtataaaatcttgcaaccgggcgtgtaatttggttcttgtgattcattctcccaagttttcttctataaaactttgttcgtatttctg

SEQ ID NO: 85803 - protein, 414 aa, Arabidopsis thaliana; identical to SEQ ID NO: 49202
  peptide (1)..(414): Ceres Seq. ID no. 12683903
  misc_feature (1)..(414): Homolog of NCBI NO: 22329008 NR Description: protein kinase - like protein; protein id:
  misc_feature (1)..(414): Homolog of NCBI NO: 22329010 NR Description: protein kinase - like protein; protein id: supported by cDNA: gi_16604447, supported by cDNA: gi_18958015 thaliana] >gi|16604448|gb|AAL24230.1| AT4g28880/F16A16_10
  misc_feature (1)..(306): Homolog of NCBI NO: 7488241 NR Description: protein kinase homolog F16A16.30 - Arabidopsis
  misc_feature (1)..(306): Homolog of NCBI NO: 7434338 NR Description: protein kinase homolog F16A16.10 - Arabidopsis
  misc_feature (1)..(302): Homolog of NCBI NO: 34904322 NR Description: unnamed protein product [Oryza sativa (japonica group)] >gi|7340914|dbj|BAA92986.1| unnamed protein product
  misc_feature (1)..(392): Homolog of NCBI NO: 34910448 NR Description: putative casein kinase I [Oryza sativa (japonica group)] >gi|20804657|dbj|BAB92346.1| putative casein kinase I
  misc_feature (1)..(398): Homolog of NCBI NO: 15236114 NR Description: Col-0 casein kinase I-like protein; protein id: supported by cDNA: gi_15292700, supported by cDNA: gi_20259044
  misc_feature (1)..(399): Homolog of NCBI NO: 22327902 NR Description: similar to Col-0 casein kinase I-like protein; id: At5g57015.1, supported by cDNA: gi_17979437, supported by
  misc_feature (1)..(411): Homolog of NCBI NO: 15240091 NR Description: casein kinase I; protein id: At5g44100.1, by cDNA: gi_18087639 [Arabidopsis thaliana]
  misc_feature (1)..(411): Homolog of NCBI NO: 18087640 NR Description: AT5g44100/MLN1_2 [Arabidopsis thaliana]

SEQ ID NO: 85804 - protein, 333 aa, Arabidopsis thaliana; identical to SEQ ID NO: 49203
  peptide (1)..(333): Ceres Seq. ID no. 12683904
  misc_feature (1)..(333): Homolog of NCBI NO: 22329008 NR Description: protein kinase - like protein; protein id:
  misc_feature (1)..(333): Homolog of NCBI NO: 22329010 NR Description: protein kinase - like protein; protein id: supported by cDNA: gi_16604447, supported by cDNA: gi_18958015 thaliana] >gi|16604448|gb|AAL24230.1| AT4g28880/F16A16_10
  misc_feature (1)..(225): Homolog of NCBI NO: 7488241 NR Description: protein kinase homolog F16A16.30 - Arabidopsis
  misc_feature (1)..(225): Homolog of NCBI NO: 7434338 NR Description: protein kinase homolog F16A16.10 - Arabidopsis
  misc_feature (1)..(221): Homolog of NCBI NO: 34904322 NR Description: unnamed protein product [Oryza sativa (japonica group)] >gi|7340914|dbj|BAA92986.1| unnamed protein product
  misc_feature (1)..(311): Homolog of NCBI NO: 34910448 NR Description: putative casein kinase I [Oryza sativa (japonica group)] >gi|20804657|dbj|BAB92346.1| putative casein kinase I
  misc_feature (1)..(317): Homolog of NCBI NO: 15236114 NR Description: Col-0 casein kinase I-like protein; protein id: supported by cDNA: gi_15292700, supported by cDNA: gi_20259044
  misc_feature (1)..(318): Homolog of NCBI NO: 22327902 NR Description: similar to Col-0 casein kinase I-like protein; id: At5g57015.1, supported by cDNA: gi_17979437, supported by
  misc_feature (1)..(330): Homolog of NCBI NO: 15240091 NR Description: casein kinase I; protein id: At5g44100.1, by cDNA: gi_18087639 [Arabidopsis thaliana]
  misc_feature (1)..(330): Homolog of NCBI NO: 18087640 NR Description: AT5g44100/MLN1_2 [Arabidopsis thaliana]

SEQ ID NO: 85805 - protein, 308 aa, Arabidopsis thaliana; identical to SEQ ID NO: 49204
  peptide (1)..(308): Ceres Seq. ID no. 12683905
  misc_feature (1)..(308): Homolog of NCBI NO: 22329008 NR Description: protein kinase - like protein; protein id:
  misc_feature (1)..(308): Homolog of NCBI NO: 22329010 NR Description: protein kinase - like protein; protein id: supported by cDNA: gi_16604447, supported by cDNA: gi_18958015 thaliana] >gi|16604448|gb|AAL24230.1| AT4g28880/F16A16_10
  misc_feature (1)..(200): Homolog of NCBI NO: 7488241 NR Description: protein kinase homolog F16A16.30 - Arabidopsis
  misc_feature (1)..(200): Homolog of NCBI NO: 7434338 NR Description: protein kinase homolog F16A16.10 - Arabidopsis
  misc_feature (1)..(196): Homolog of NCBI NO: 34904322 NR Description: unnamed protein product [Oryza sativa (japonica group)] >gi|7340914|dbj|BAA92986.1| unnamed protein product
  misc_feature (1)..(286): Homolog of NCBI NO: 34910448 NR Description: putative casein kinase I [Oryza sativa (japonica group)] >gi|20804657|dbj|BAB92346.1| putative casein kinase I
  misc_feature (1)..(292): Homolog of NCBI NO: 15236114 NR Description: Col-0 casein kinase I-like protein; protein id: supported by cDNA: gi_15292700, supported by cDNA: gi_20259044
  misc_feature (1)..(293): Homolog of NCBI NO: 22327902 NR Description: similar to Col-0 casein kinase I-like protein; id: At5g57015.1, supported by cDNA: gi_17979437, supported by
  misc_feature (1)..(305): Homolog of NCBI NO: 15240091 NR Description: casein kinase I; protein id: At5g44100.1, by cDNA: gi_18087639 [Arabidopsis thaliana]
  misc_feature (1)..(305): Homolog of NCBI NO: 18087640 NR Description: AT5g44100/MLN1_2 [Arabidopsis thaliana]

SEQ ID NO: 85806 - DNA, 608 bp, Arabidopsis thaliana
  misc_feature (1)..(608): Ceres Seq. ID no. 12683910
  misc_feature: MA Experiment ID: 108434 Result: Down-regulated in Transcription
  misc_feature: MA Experiment 108434 PARAMETER Experiment Name: At_Root_Tips_cDNA_P Parameter: Tissue Value: Root Tips
  misc_feature: MA Experiment ID: 108435 Result: Down-regulated in Transcription
  misc_feature: MA Experiment 108435 PARAMETER Experiment Name: At_stm_Mutants_cDNA_P Parameter: Plant Line Value: wt Landsburg vs stm
  misc_feature: MA Experiment 108435 PARAMETER Experiment Name: At_stm_Mutants_cDNA_P Parameter: Tissue Value: Shoot Apical Meristem Region
  misc_feature: MA Experiment ID: 108461 Result: Up-regulated in Transcription
  misc_feature: MA Experiment 108461 PARAMETER Experiment Name: At_Germinating_Seeds_cDNA_P Parameter: Age (day) Value: 1 vs. 0
  misc_feature: MA Experiment 108461 PARAMETER Experiment Name: At_Germinating_Seeds_cDNA_P Parameter: Tissue Value: Germinating Seeds
  misc_feature: MA Experiment ID: 108462 Result: Up-regulated in Transcription
  misc_feature: MA Experiment 108462 PARAMETER Experiment Name: At_Germinating_Seeds_cDNA_P Parameter: Age (day) Value: 2 vs. 0
  misc_feature: MA Experiment 108462 PARAMETER Experiment Name: At_Germinating_Seeds_cDNA_P Parameter: Tissue Value: Germinating Seeds
  misc_feature: MA Experiment ID: 108464 Result: Up-regulated in Transcription
  misc_feature: MA Experiment 108464 PARAMETER Experiment Name: At_Germinating_Seeds_cDNA_P Parameter: Age (day) Value: 4 vs. 0
  misc_feature: MA Experiment 108464 PARAMETER Experiment Name: At_Germinating_Seeds_cDNA_P Parameter: Tissue Value: Germinating Seeds
  misc_feature: MA Experiment ID: 108488 Result: Up-regulated in Transcription
  misc_feature: MA Experiment ID: 20000180 Result: Up-regulated in Transcription
  misc_feature: MA Experiment 20000180 PARAMETER Experiment Name: At_Germinating_Seeds_P Parameter: Age (hr) Value: 24 vs. 0
  misc_feature: MA Experiment 20000180 PARAMETER Experiment Name: At_Germinating_Seeds_P Parameter: Tissue Value: Germinating Seeds
  misc_feature: MA Experiment ID: 20000185 Result: Down-regulated in Transcription
  misc_feature: MA Experiment 20000185 PARAMETER Experiment Name: At_Roots__P Parameter: Age (day) Value: 7 vs. 21
  misc_feature: MA Experiment 20000185 PARAMETER Experiment Name: At_Roots__P Parameter: Organism Value: A. thaliana
  misc_feature: MA Experiment 20000185 PARAMETER Experiment Name: At_Roots__P Parameter: Tissue Value: Roots vs. Whole Plant
  misc_feature: MA Experiment ID: 20000264 Result: Down-regulated in Transcription
  misc_feature: MA Experiment 20000264 PARAMETER Experiment Name: At_Open_Flower_P Parameter: Age (day) Value: 21
  misc_feature: MA Experiment 20000264 PARAMETER Experiment Name: At_Open_Flower_P Parameter: Plant Line Value: WS
  misc_feature: MA Experiment 20000264 PARAMETER Experiment Name: At_Open_Flower_P Parameter: Tissue Value: Open Flower vs. Whole Plant
  misc_feature: MA Experiment ID: 20000265 Result: Down-regulated in Transcription
  misc_feature: MA Experiment 20000265 PARAMETER Experiment Name: At_Open_Flower_P Parameter: Age (day) Value: 21
  misc_feature: MA Experiment 20000265 PARAMETER Experiment Name: At_Open_Flower_P Parameter: Plant Line Value: WS
  misc_feature: MA Experiment 20000265 PARAMETER Experiment Name: At_Open_Flower_P Parameter: Tissue Value: Closed Flower vs. Whole Plant
  misc_feature: MA Experiment ID: 20000286 Result: Down-regulated in Transcription
  misc_feature: MA Experiment 20000286 PARAMETER Experiment Name: At_Open_Flower_P Parameter: Age (day) Value: 21
  misc_feature: MA Experiment 20000286 PARAMETER Experiment Name: At_Open_Flower_P Parameter: Plant Line Value: WS
  misc_feature: MA Experiment 20000286 PARAMETER Experiment Name: At_Open_Flower_P Parameter: Tissue Value: Half Open vs. Whole Plant
  misc_feature: MA Experiment ID: 20000437 Result: Down-regulated in Transcription
  misc_feature: MA Experiment 20000437 PARAMETER Experiment Name: At_Drought_P Parameter: Age (day) Value: 8
  misc_feature: MA Experiment 20000437 PARAMETER Experiment Name: At_Drought_P Parameter: Organism Value: A. thaliana
  misc_feature: MA Experiment 20000437 PARAMETER Experiment Name: At_Drought_P Parameter: Plant Line Value: WS
  misc_feature: MA Experiment 20000437 PARAMETER Experiment Name: At_Drought_P Parameter: Timepoint (hr) Value: 24
  misc_feature: MA Experiment 20000437 PARAMETER Experiment Name: At_Drought_P Parameter: Tissue Value: Whole Plant
  misc_feature: MA Experiment 20000437 PARAMETER Experiment Name: At_Drought_P Parameter: Treatment Value: Drought vs. No Drought
  misc_feature: MA Experiment ID: 20000438 Result: Up-regulated in Transcription
  misc_feature: MA Experiment 20000438 PARAMETER Experiment Name: At_Shoots__P Parameter: Age (day) Value: 14
  misc_feature: MA Experiment 20000438 PARAMETER Experiment Name: At_Shoots__P Parameter: Tissue Value: Shoots vs. Whole Plant
  misc_feature: MA Experiment ID: 20000439 Result: Down-regulated in Transcription
  misc_feature: MA Experiment 20000439 PARAMETER Experiment Name: At_Roots__P Parameter: Age (day) Value: 14 vs. 21
  misc_feature: MA Experiment 20000439 PARAMETER Experiment Name: At_Roots__P Parameter: Organism Value: A. thaliana
  misc_feature: MA Experiment 20000439 PARAMETER Experiment Name: At_Roots__P Parameter: Tissue Value: Roots vs. Whole Plant
  misc_feature: MA Experiment ID: 20000794 Result: Down-regulated in Transcription
  misc_feature: MA Experiment 20000794 PARAMETER Experiment Name: At_Petals_P Parameter: Age (day) Value: 23-25 days
  misc_feature: MA Experiment 20000794 PARAMETER Experiment Name: At_Petals_P Parameter: Plant Line Value: WS
  misc_feature: MA Experiment 20000794 PARAMETER Experiment Name: At_Petals_P Parameter: Tissue Value: Petals vs. Whole plant
  misc_feature: MA Experiment ID: 20001557 Result: Down-regulated in Transcription
  misc_feature: MA Experiment 20001557 PARAMETER Experiment Name: At_Drought_Soil_Dry_P Parameter: Age (day) Value: 27
  misc_feature: MA Experiment 20001557 PARAMETER Experiment Name: At_Drought_Soil_Dry_P Parameter: Organism Value: A. thaliana
  misc_feature: MA Experiment 20001557 PARAMETER Experiment Name: At_Drought_Soil_Dry_P Parameter: Plant Line Value: WS
  misc_feature: MA Experiment 20001557 PARAMETER Experiment Name: At_Drought_Soil_Dry_P Parameter: Post Timepoint (hr) Value: 3
  misc_feature: MA Experiment 20001557 PARAMETER Experiment Name: At_Drought_Soil_Dry_P Parameter: Post-Treatment Value: Re-Water vs. No Drought
  misc_feature: MA Experiment 20001557 PARAMETER Experiment Name: At_Drought_Soil_Dry_P Parameter: Timepoint (day) Value: 13
  misc_feature: MA Experiment 20001557 PARAMETER Experiment Name: At_Drought_Soil_Dry_P Parameter: Treatment Value: Drought vs. No Drought
  misc_feature: MA Experiment ID: 20001558 Result: Down-regulated in Transcription
  misc_feature: MA Experiment 20001558 PARAMETER Experiment Name: At_Drought_Soil_Dry_P Parameter: Age (day) Value: 27
  misc_feature: MA Experiment 20001558 PARAMETER Experiment Name: At_Drought_Soil_Dry_P Parameter: Organism Value: A. thaliana
  misc_feature: MA Experiment 20001558 PARAMETER Experiment Name: At_Drought_Soil_Dry_P Parameter: Plant Line Value: WS
  misc_feature: MA Experiment 20001558 PARAMETER Experiment Name: At_Drought_Soil_Dry_P Parameter: Post Timepoint (hr) Value: 6
  misc_feature: MA Experiment 20001558 PARAMETER Experiment Name: At_Drought_Soil_Dry_P Parameter: Post-Treatment Value: Re-Water vs. No Drought
  misc_feature: MA Experiment 20001558 PARAMETER Experiment Name: At_Drought_Soil_Dry_P Parameter: Timepoint (day) Value: 13
  misc_feature: MA Experiment 20001558 PARAMETER Experiment Name: At_Drought_Soil_Dry_P Parameter: Treatment Value: Drought vs. No Drought
  misc_feature: MA Experiment ID: 20001757 Result: Up-regulated in Transcription
  misc_feature: MA Experiment 20001757 PARAMETER Experiment Name: At_50mM_NH4NO3_L-to-H_P Parameter: Timepoint (hr) Value: 6
  misc_feature: MA Experiment 20001757 PARAMETER Experiment Name: At_50mM_NH4NO3_L-to-H_P Parameter: Tissue Value: Leaf
  misc_feature: MA Experiment 20001757 PARAMETER Experiment Name: At_50mM_NH4NO3_L-to-H_P Parameter: Treatment Value: 50mM NH4NO3 vs 100mM Mannitol
  misc_feature: MA Experiment ID: 20001904 Result: Down-regulated in Transcription
  misc_feature: MA Experiment 20001904 PARAMETER Experiment Name: At_Drought_Reproduction_P Parameter: Age (day) Value: 37
  misc_feature: MA Experiment 20001904 PARAMETER Experiment Name: At_Drought_Reproduction_P Parameter: Organism Value: A. thaliana
  misc_feature: MA Experiment 20001904 PARAMETER Experiment Name: At_Drought_Reproduction_P Parameter: Plant Line Value: WS
  misc_feature: MA Experiment 20001904 PARAMETER Experiment Name: At_Drought_Reproduction_P Parameter: Timepoint (day) Value: 7
  misc_feature: MA Experiment 20001904 PARAMETER Experiment Name: At_Drought_Reproduction_P Parameter: Tissue Value: Rosettes
  misc_feature: MA Experiment 20001904 PARAMETER Experiment Name: At_Drought_Reproduction_P Parameter: Treatment Value: Drought vs. No Drought
  misc_feature: MA Experiment ID: 20001905 Result: Down-regulated in Transcription
  misc_feature: MA Experiment 20001905 PARAMETER Experiment Name: At_Drought_Reproduction_P Parameter: Age (day) Value: 40
  misc_feature: MA Experiment 20001905 PARAMETER Experiment Name: At_Drought_Reproduction_P Parameter: Organism Value: A. thaliana
  misc_feature: MA Experiment 20001905 PARAMETER Experiment Name: At_Drought_Reproduction_P Parameter: Plant Line Value: WS
  misc_feature: MA Experiment 20001905 PARAMETER Experiment Name: At_Drought_Reproduction_P Parameter: Timepoint (day) Value: 10
  misc_feature: MA Experiment 20001905 PARAMETER Experiment Name: At_Drought_Reproduction_P Parameter: Tissue Value: Rosettes
  misc_feature: MA Experiment 20001905 PARAMETER Experiment Name: At_Drought_Reproduction_P Parameter: Treatment Value: Drought vs. No Drought
  misc_feature: MA Experiment ID: 20001908 Result: Down-regulated in Transcription
  misc_feature: MA Experiment 20001908 PARAMETER Experiment Name: At_Drought_Reproduction_P Parameter: Age (day) Value: 40
  misc_feature: MA Experiment 20001908 PARAMETER Experiment Name: At_Drought_Reproduction_P Parameter: Organism Value: A. thaliana
  misc_feature: MA Experiment 20001908 PARAMETER Experiment Name: At_Drought_Reproduction_P Parameter: Plant Line Value: WS
  misc_feature: MA Experiment 20001908 PARAMETER Experiment Name: At_Drought_Reproduction_P Parameter: Timepoint (day) Value: 10
  misc_feature: MA Experiment 20001908 PARAMETER Experiment Name: At_Drought_Reproduction_P Parameter: Tissue Value: Siliques
  misc_feature: MA Experiment 20001908 PARAMETER Experiment Name: At_Drought_Reproduction_P Parameter: Treatment Value: Drought vs. No Drought
aaaacaatcaagaaccactctttcgtgtcgcaataacaataagaaagaaagaaaaagaaaaccagagatggcgatgacgacagcatctacggtatttgttctaccggccaatgtcacctcggtcgccggcgcttcgtcgtccaggagctccgtgtctttcttgccgatgagaaacgccggttctaggctcgtagtcagggcagccgaagatcctgctccggcttcctcttcttcaaaagattctccggcagctgccgctgctccggatggagctactgccaccaaacccaagccaccaccgattggtcctaagagagggtctaaggtcaagattctaaggagagaatcctattggttcaagaacgttggatcagttgttgccgttgatcaggaccctaagactcgatacccggttgtggtccggttcgcaaaagtcaattacgccaacatatcgaccaacaactatgcattggatgaggtcgaagaagttgcagcttaaatgggagaattcaaaaactctgtgtattctataccggtttatccgtttgtaacttgacccaaaccgtatgtaccgcaaaagtttaccaattatttctcctcatctgaat

SEQ ID NO: 85807 - protein, 165 aa, Arabidopsis thaliana; identical to SEQ ID NO: 43772
  peptide (1)..(165): Ceres Seq. ID no. 12683911
  misc_feature (103)..(164): Pfam Name: Photosystem I reaction centre subunit IV / PsaE Pfam Description: Photosystem I reaction centre subunit IV / PsaE
  misc_feature (23)..(165): Homolog of NCBI NO: 30688100 NR Description: photosystem I subunit PSI-E - like protein thaliana] >gi|18203441|sp|Q9S831|PSE1_ARATH Photosystem I
  misc_feature (25)..(165): Homolog of NCBI NO: 24030202 NR Description: putative photosystem I subunit PSI-E protein
  misc_feature (51)..(165): Homolog of NCBI NO: 22091414 NR Description: putative photosystem I subunit PSI-E [Arabidopsis
  misc_feature (56)..(165): Homolog of NCBI NO: 11692884 NR Description: AT4g28750 [Arabidopsis thaliana]
  misc_feature (23)..(163): Homolog of NCBI NO: 15225331 NR Description: putative photosystem I reaction center subunit protein id: At2g20260.1, supported by cDNA: 27629., supported by gi_14596070 [Arabidopsis thaliana]
  misc_feature (25)..(163): Homolog of NCBI NO: 21555308 NR Description: Photosystem I reaction center subunit IV B,
  misc_feature (25)..(165): Homolog of NCBI NO: 131176 NR Description: Photosystem I reaction center subunit IV,
  misc_feature (26)..(163): Homolog of NCBI NO: 2499966 NR Description: Photosystem I reaction center subunit IV A,
  misc_feature (25)..(163): Homolog of NCBI NO: 26986114 NR Description: putative photosystem I reaction centre subunit IV
  misc_feature (38)..(164): Homolog of NCBI NO: 131178 NR Description: Photosystem I reaction center subunit IV,

SEQ ID NO: 85808 - protein, 143 aa, Arabidopsis thaliana; identical to SEQ ID NO: 43773
  peptide (1)..(143): Ceres Seq. ID no. 12683912
  misc_feature (81)..(142): Pfam Name: Photosystem I reaction centre subunit IV / PsaE Pfam Description: Photosystem I reaction centre subunit IV / PsaE
  misc_feature (1)..(143): Homolog of NCBI NO: 30688100 NR Description: photosystem I subunit PSI-E - like protein thaliana] >gi|18203441|sp|Q9S831|PSE1_ARATH Photosystem I
  misc_feature (3)..(143): Homolog of NCBI NO: 24030202 NR Description: putative photosystem I subunit PSI-E protein
  misc_feature (29)..(143): Homolog of NCBI NO: 22091414 NR Description: putative photosystem I subunit PSI-E [Arabidopsis
  misc_feature (34)..(143): Homolog of NCBI NO: 11692884 NR Description: AT4g28750 [Arabidopsis thaliana]
  misc_feature (1)..(141): Homolog of NCBI NO: 15225331 NR Description: putative photosystem I reaction center subunit protein id: At2g20260.1, supported by cDNA: 27629., supported by gi_14596070 [Arabidopsis thaliana]
  misc_feature (3)..(141): Homolog of NCBI NO: 21555308 NR Description: Photosystem I reaction center subunit IV B,
  misc_feature (3)..(143): Homolog of NCBI NO: 131176 NR Description: Photosystem I reaction center subunit IV,
  misc_feature (4)..(141): Homolog of NCBI NO: 2499966 NR Description: Photosystem I reaction center subunit IV A,
  misc_feature (3)..(141): Homolog of NCBI NO: 26986114 NR Description: putative photosystem I reaction centre subunit IV
  misc_feature (16)..(142): Homolog of NCBI NO: 131178 NR Description: Photosystem I reaction center subunit IV,

SEQ ID NO: 85809 - protein, 141 aa, Arabidopsis thaliana; identical to SEQ ID NO: 43774
  peptide (1)..(141): Ceres Seq. ID no. 12683913
  misc_feature (79)..(140): Pfam Name: Photosystem I reaction centre subunit IV / PsaE Pfam Description: Photosystem I reaction centre subunit IV / PsaE
  misc_feature (1)..(141): Homolog of NCBI NO: 30688100 NR Description: photosystem I subunit PSI-E - like protein thaliana] >gi|18203441|sp|Q9S831|PSE1_ARATH Photosystem I
  misc_feature (1)..(141): Homolog of NCBI NO: 24030202 NR Description: putative photosystem I subunit PSI-E protein
  misc_feature (27)..(141): Homolog of NCBI NO: 22091414 NR Description: putative photosystem I subunit PSI-E [Arabidopsis
  misc_feature (32)..(141): Homolog of NCBI NO: 11692884 NR Description: AT4g28750 [Arabidopsis thaliana]
  misc_feature (1)..(139): Homolog of NCBI NO: 15225331 NR Description: putative photosystem I reaction center subunit protein id: At2g20260.1, supported by cDNA: 27629., supported by gi_14596070 [Arabidopsis thaliana]
  misc_feature (1)..(139): Homolog of NCBI NO: 21555308 NR Description: Photosystem I reaction center subunit IV B,
  misc_feature (1)..(141): Homolog of NCBI NO: 131176 NR Description: Photosystem I reaction center subunit IV,
  misc_feature (2)..(139): Homolog of NCBI NO: 2499966 NR Description: Photosystem I reaction center subunit IV A,
  misc_feature (1)..(139): Homolog of NCBI NO: 26986114 NR Description: putative photosystem I reaction centre subunit IV
  misc_feature (14)..(140): Homolog of NCBI NO: 131178 NR Description: Photosystem I reaction center subunit IV,

SEQ ID NO: 85810 - DNA, 1368 bp, Arabidopsis thaliana
  misc_feature (1)..(1368): Ceres Seq. ID no. 12683926
  misc_feature: MA Experiment ID: 108433 Result: Down-regulated in Transcription
  misc_feature: MA Experiment 108433 PARAMETER Experiment Name: At_rhl_Mutant2_cDNA_P Parameter: Age (day) Value: 7
  misc_feature: MA Experiment 108433 PARAMETER Experiment Name: At_rhl_Mutant2_cDNA_P Parameter: Organism Value: A. thaliana
  misc_feature: MA Experiment 108433 PARAMETER Experiment Name: At_rhl_Mutant2_cDNA_P Parameter: Plant Line Value: rhl Mutant vs. wt landsburg
  misc_feature: MA Experiment 108433 PARAMETER Experiment Name: At_rhl_Mutant2_cDNA_P Parameter: Tissue Value: Roots
  misc_feature: MA Experiment ID: 108434 Result: Up-regulated in Transcription
  misc_feature: MA Experiment 108434 PARAMETER Experiment Name: At_Root_Tips_cDNA_P Parameter: Tissue Value: Root Tips
  misc_feature: MA Experiment ID: 108461 Result: Down-regulated in Transcription
  misc_feature: MA Experiment 108461 PARAMETER Experiment Name: At_Germinating_Seeds_cDNA_P Parameter: Age (day) Value: 1 vs. 0
  misc_feature: MA Experiment 108461 PARAMETER Experiment Name: At_Germinating_Seeds_cDNA_P Parameter: Tissue Value: Germinating Seeds
  misc_feature: MA Experiment ID: 108462 Result: Down-regulated in Transcription
  misc_feature: MA Experiment 108462 PARAMETER Experiment Name: At_Germinating_Seeds_cDNA_P Parameter: Age (day) Value: 2 vs. 0
  misc_feature: MA Experiment 108462 PARAMETER Experiment Name: At_Germinating_Seeds_cDNA_P Parameter: Tissue Value: Germinating Seeds
  misc_feature: MA Experiment ID: 108463 Result: Down-regulated in Transcription
  misc_feature: MA Experiment 108463 PARAMETER Experiment Name: At_Germinating_Seeds_cDNA_P Parameter: Age (day) Value: 3 vs. 0
  misc_feature: MA Experiment 108463 PARAMETER Experiment Name: At_Germinating_Seeds_cDNA_P Parameter: Tissue Value: Germinating Seeds
  misc_feature: MA Experiment ID: 108464 Result: Down-regulated in Transcription
  misc_feature: MA Experiment 108464 PARAMETER Experiment Name: At_Germinating_Seeds_cDNA_P Parameter: Age (day) Value: 4 vs. 0
  misc_feature: MA Experiment 108464 PARAMETER Experiment Name: At_Germinating_Seeds_cDNA_P Parameter: Tissue Value: Germinating Seeds
  misc_feature: MA Experiment ID: 108572 Result: Down-regulated in Transcription
  misc_feature: MA Experiment 108572 PARAMETER Experiment Name: At_Drought_cDNA_P Parameter: Timepoint (hr) Value: 1
  misc_feature: MA Experiment 108572 PARAMETER Experiment Name: At_Drought_cDNA_P Parameter: Tissue Value: Aerial
  misc_feature: MA Experiment 108572 PARAMETER Experiment Name: At_Drought_cDNA_P Parameter: Treatment Value: Drought vs. No Drought
  misc_feature: MA Experiment ID: 108576 Result: Down-regulated in Transcription
  misc_feature: MA Experiment 108576 PARAMETER Experiment Name: At_42deg_Heat_cDNA_P Parameter: Temperature (deg C) Value: 42 vs. 22
  misc_feature: MA Experiment 108576 PARAMETER Experiment Name: At_42deg_Heat_cDNA_P Parameter: Timepoint (hr) Value: 1
  misc_feature: MA Experiment 108576 PARAMETER Experiment Name: At_42deg_Heat_cDNA_P Parameter: Tissue Value: Aerial
  misc_feature: MA Experiment ID: 108579 Result: Up-regulated in Transcription
  misc_feature: MA Experiment 108579 PARAMETER Experiment Name: At_4deg_Cold_cDNA_P Parameter: Temperature (deg C) Value: 4 vs. 22
  misc_feature: MA Experiment 108579 PARAMETER Experiment Name: At_4deg_Cold_cDNA_P Parameter: Timepoint (hr) Value: 6
  misc_feature: MA Experiment 108579 PARAMETER Experiment Name: At_4deg_Cold_cDNA_P Parameter: Tissue Value: Aerial
  misc_feature: MA Experiment ID: 108595 Result: Down-regulated in Transcription
  misc_feature: MA Experiment 108595 PARAMETER Experiment Name: At_Ler-pi_Ovule_cDNA_P Parameter: Plant Line Value: null
  misc_feature: MA Experiment ID: 20000180 Result: Down-regulated in Transcription
  misc_feature: MA Experiment 20000180 PARAMETER Experiment Name: At_Germinating_Seeds_P Parameter: Age (hr) Value: 24 vs. 0
  misc_feature: MA Experiment 20000180 PARAMETER Experiment Name: At_Germinating_Seeds_P Parameter: Tissue Value: Germinating Seeds
  misc_feature: MA Experiment ID: 20001451 Result: Down-regulated in Transcription
  misc_feature: MA Experiment 20001451 PARAMETER Experiment Name: At_Far-red-induction_P Parameter: Age (day) Value: 7
  misc_feature: MA Experiment 20001451 PARAMETER Experiment Name: At_Far-red-induction_P Parameter: Light Value: Far-red vs. White
  misc_feature: MA Experiment 20001451 PARAMETER Experiment Name: At_Far-red-induction_P Parameter: Organism Value: A. thaliana
  misc_feature: MA Experiment 20001451 PARAMETER Experiment Name: At_Far-red-induction_P Parameter: Plant Line Value: Columbia
  misc_feature: MA Experiment 20001451 PARAMETER Experiment Name: At_Far-red-induction_P Parameter: Timepoint (hr) Value: 24
  misc_feature: MA Experiment 20001451 PARAMETER Experiment Name: At_Far-red-induction_P Parameter: Tissue Value: Whole Plant
  misc_feature: MA Experiment ID: 20001557 Result: Up-regulated in Transcription
  misc_feature: MA Experiment 20001557 PARAMETER Experiment Name: At_Drought_Soil_Dry_P Parameter: Age (day) Value: 27
  misc_feature: MA Experiment 20001557 PARAMETER Experiment Name: At_Drought_Soil_Dry_P Parameter: Organism Value: A. thaliana
  misc_feature: MA Experiment 20001557 PARAMETER Experiment Name: At_Drought_Soil_Dry_P Parameter: Plant Line Value: WS
  misc_feature: MA Experiment 20001557 PARAMETER Experiment Name: At_Drought_Soil_Dry_P Parameter: Post Timepoint (hr) Value: 3
  misc_feature: MA Experiment 20001557 PARAMETER Experiment Name: At_Drought_Soil_Dry_P Parameter: Post-Treatment Value: Re-Water vs. No Drought
  misc_feature: MA Experiment 20001557 PARAMETER Experiment Name: At_Drought_Soil_Dry_P Parameter: Timepoint (day) Value: 13
  misc_feature: MA Experiment 20001557 PARAMETER Experiment Name: At_Drought_Soil_Dry_P Parameter: Treatment Value: Drought vs. No Drought
  misc_feature: MA Experiment ID: 20001558 Result: Up-regulated in Transcription
  misc_feature: MA Experiment 20001558 PARAMETER Experiment Name: At_Drought_Soil_Dry_P Parameter: Age (day) Value: 27
  misc_feature: MA Experiment 20001558 PARAMETER Experiment Name: At_Drought_Soil_Dry_P Parameter: Organism Value: A. thaliana
  misc_feature: MA Experiment 20001558 PARAMETER Experiment Name: At_Drought_Soil_Dry_P Parameter: Plant Line Value: WS
  misc_feature: MA Experiment 20001558 PARAMETER Experiment Name: At_Drought_Soil_Dry_P Parameter: Post Timepoint (hr) Value: 6
  misc_feature: MA Experiment 20001558 PARAMETER Experiment Name: At_Drought_Soil_Dry_P Parameter: Post-Treatment Value: Re-Water vs. No Drought
  misc_feature: MA Experiment 20001558 PARAMETER Experiment Name: At_Drought_Soil_Dry_P Parameter: Timepoint (day) Value: 13
  misc_feature: MA Experiment 20001558 PARAMETER Experiment Name: At_Drought_Soil_Dry_P Parameter: Treatment Value: Drought vs. No Drought
aaaaccctttcctctcttccttcttgtgtgagaccgagaaaaaaagatgactaagaacagtaaccacgacgagaatgagttcatcagctttgaaccaaatcagaacacgaagatacgctttgaagatgctgatgaagacgaagttgctgaagggtctggtgttgccggcgaggaaactccccaagatgagtccatgttcgacgccggagagagcgccgacaccgctgaagtaactgatgataccaccagtgccgattactacttcgattcttactctcactttggaatccatgaagagatgttgaaggatgttgtgagaacaaagacttatcagaatgttatttatcagaacaagtttcttatcaaggacaaaattgttcttgatgttggagctggaaccggaattttgtctctgttctgtgccaaggcaggagctgctcatgtctacgctgttgagtgttctcaaatggctgacatggcaaaggagattgttaaagctaatggattttctgatgttattacggtattgaaagggaagattgaggagatagagcttcccactcctaaagtggatgtgattatatcggaatggatgggttactttttgttgtttgaaaatatgttggacagtgtcttgtatgctcgtgataaatggcttgttgaaggtggagttgtgctaccagacaaagcctctctgcatcttacagccatagaggattcagagtacaaagaagacaaaatcgaattttggaacagtgtgtatggttttgacatgtcatgtattaagaaaaaagctatgatggaaccacttgttgacacagtcgaccaaaaccaaatcgtcaccgatagtaggcttctaaagacgatggatatctcaaagatgtcctctggtgatgcttccttcacagctccctttaagcttgttgcacaacgcaatgactacatccacgcccttgtagcctactttgatgtatcgtttaccatgtgccacaagctgctgggcttctcaacaggaccgaaatcccgagctacacactggaaacaaacagttctgtatctagaagatgtgttaaccatatgtgagggtgagacaatcactggaactatgtccgtttctcctaacaagaagaatcctcgagacattgacataaagctaagctattctttgaatggccagcattgcaagatctcaaggacccaacactacaaaatgcgttaaagttctctcataagaagcagaacttcagaagatacaattctcatattgtgatttagtttttatatttctttttctccagattacaactttccatttgcttcacattgcaacatttgcttcatctcaagttaaattaatgattttgctct

SEQ ID NO: 85811 - protein, 390 aa, Arabidopsis thaliana; identical to SEQ ID NO: 80602
  peptide (1)..(390): Ceres Seq. ID no. 12683927
  misc_feature (107)..(180): Pfam Name: Met-10+ like-protein Pfam Description: Met-10+ like-protein
  misc_feature (1)..(390): Homolog of NCBI NO: 15233606 NR Description: arginine methyltransferase (pam1); protein id: supported by cDNA: 38601., supported by cDNA: gi_17381027
  misc_feature (1)..(390): Homolog of NCBI NO: 17381028 NR Description: putative arginine methyltransferase pam1
  misc_feature (1)..(376): Homolog of NCBI NO: 25456391 NR Description: protein-arginine N-methyltransferase (EC 2.1.1.23)
  misc_feature (47)..(390): Homolog of NCBI NO: 15224820 NR Description: putative arginine N-methyltransferase; protein id:
  misc_feature (52)..(390): Homolog of NCBI NO: 28207757 NR Description: CR061 protein [Chlamydomonas reinhardtii]
  misc_feature (43)..(390): Homolog of NCBI NO: 7453575 NR Description: protein arginine N-methyltransferase 1-variant 2
  misc_feature (54)..(390): Homolog of NCBI NO: 34785428 NR Description: Unknown (protein for MGC:66201) [Danio rerio]
  misc_feature (47)..(390): Homolog of NCBI NO: 27882547 NR Description: Similar to heterogeneous nuclear
  misc_feature (43)..(390): Homolog of NCBI NO: 9790109 NR Description: heterogeneous nuclear ribonucleoproteins
  misc_feature (55)..(390): Homolog of NCBI NO: 7453576 NR Description: protein arginine N-methyltransferase 1-variant 3

SEQ ID NO: 85812 - protein, 341 aa, Arabidopsis thaliana; identical to SEQ ID NO: 80603
  peptide (1)..(341): Ceres Seq. ID no. 12683928
  misc_feature (58)..(131): Pfam Name: Met-10+ like-protein Pfam Description: Met-10+ like-protein
  misc_feature (1)..(341): Homolog of NCBI NO: 15233606 NR Description: arginine methyltransferase (pam1); protein id: supported by cDNA: 38601., supported by cDNA: gi_17381027
  misc_feature (1)..(341): Homolog of NCBI NO: 17381028 NR Description: putative arginine methyltransferase pam1
  misc_feature (1)..(327): Homolog of NCBI NO: 25456391 NR Description: protein-arginine N-methyltransferase (EC 2.1.1.23)
  misc_feature (1)..(341): Homolog of NCBI NO: 15224820 NR Description: putative arginine N-methyltransferase; protein id:
  misc_feature (3)..(341): Homolog of NCBI NO: 28207757 NR Description: CR061 protein [Chlamydomonas reinhardtii]
  misc_feature (1)..(341): Homolog of NCBI NO: 7453575 NR Description: protein arginine N-methyltransferase 1-variant 2
  misc_feature (5)..(341): Homolog of NCBI NO: 34785428 NR Description: Unknown (protein for MGC:66201) [Danio rerio]
  misc_feature (1)..(341): Homolog of NCBI NO: 27882547 NR Description: Similar to heterogeneous nuclear
  misc_feature (1)..(341): Homolog of NCBI NO: 9790109 NR Description: heterogeneous nuclear ribonucleoproteins
  misc_feature (6)..(341): Homolog of NCBI NO: 7453576 NR Description: protein arginine N-methyltransferase 1-variant 3

SEQ ID NO: 85813 - protein, 306 aa, Arabidopsis thaliana; identical to SEQ ID NO: 80604
  peptide (1)..(306): Ceres Seq. ID no. 12683929
  misc_feature (23)..(96): Pfam Name: Met-10+ like-protein Pfam Description: Met-10+ like-protein
  misc_feature (1)..(306): Homolog of NCBI NO: 15233606 NR Description: arginine methyltransferase (pam1); protein id: supported by cDNA: 38601., supported by cDNA: gi_17381027
  misc_feature (1)..(306): Homolog of NCBI NO: 17381028 NR Description: putative arginine methyltransferase pam1
  misc_feature (1)..(292): Homolog of NCBI NO: 25456391 NR Description: protein-arginine N-methyltransferase (EC 2.1.1.23)
  misc_feature (1)..(306): Homolog of NCBI NO: 15224820 NR Description: putative arginine N-methyltransferase; protein id:
  misc_feature (1)..(306): Homolog of NCBI NO: 28207757 NR Description: CR061 protein [Chlamydomonas reinhardtii]
  misc_feature (1)..(306): Homolog of NCBI NO: 7453575 NR Description: protein arginine N-methyltransferase 1-variant 2
  misc_feature (1)..(306): Homolog of NCBI NO: 34785428 NR Description: Unknown (protein for MGC:66201) [Danio rerio]
  misc_feature (1)..(306): Homolog of NCBI NO: 27882547 NR Description: Similar to heterogeneous nuclear
  misc_feature (1)..(306): Homolog of NCBI NO: 9790109 NR Description: heterogeneous nuclear ribonucleoproteins
  misc_feature (1)..(306): Homolog of NCBI NO: 7453576 NR Description: protein arginine N-methyltransferase 1-variant 3

SEQ ID NO: 85814 - DNA, 1296 bp, Arabidopsis thaliana
  misc_feature (1)..(1296): Ceres Seq. ID no. 12683938
  misc_feature: MA Experiment ID: 20000173 Result: Down-regulated in Transcription
  misc_feature: MA Experiment 20000173 PARAMETER Experiment Name: At_42deg_Heat_P Parameter: Age (day) Value: 14
  misc_feature: MA Experiment 20000173 PARAMETER Experiment Name: At_42deg_Heat_P Parameter: Organism Value: A. thaliana
  misc_feature: MA Experiment 20000173 PARAMETER Experiment Name: At_42deg_Heat_P Parameter: Plant Line Value: WS
  misc_feature: MA Experiment 20000173 PARAMETER Experiment Name: At_42deg_Heat_P Parameter: Temperature (deg C) Value: 42 vs. 22
  misc_feature: MA Experiment 20000173 PARAMETER Experiment Name: At_42deg_Heat_P Parameter: Timepoint (hr) Value: 6
  misc_feature: MA Experiment 20000173 PARAMETER Experiment Name: At_42deg_Heat_P Parameter: Tissue Value: Aerial
  misc_feature: MA Experiment ID: 20000182 Result: Up-regulated in Transcription
  misc_feature: MA Experiment 20000182 PARAMETER Experiment Name: At_2mM_SA_P Parameter: Age (day) Value: 14
  misc_feature: MA Experiment 20000182 PARAMETER Experiment Name: At_2mM_SA_P Parameter: Organism Value: A. thaliana
  misc_feature: MA Experiment 20000182 PARAMETER Experiment Name: At_2mM_SA_P Parameter: Plant Line Value: WS
  misc_feature: MA Experiment 20000182 PARAMETER Experiment Name: At_2mM_SA_P Parameter: Timepoint (hr) Value: 6
  misc_feature: MA Experiment 20000182 PARAMETER Experiment Name: At_2mM_SA_P Parameter: Tissue Value: Aerial
  misc_feature: MA Experiment 20000182 PARAMETER Experiment Name: At_2mM_SA_P Parameter: Treatment Value: 2mM SA vs. No Treatment
  misc_feature: MA Experiment ID: 20000184 Result: Down-regulated in Transcription
  misc_feature: MA Experiment 20000184 PARAMETER Experiment Name: At_Shoots__P Parameter: Age (day) Value: 7
  misc_feature: MA Experiment 20000184 PARAMETER Experiment Name: At_Shoots__P Parameter: Tissue Value: Shoots vs. Whole Plant
  misc_feature: MA Experiment ID: 20000496 Result: Up-regulated in Transcription
  misc_feature: MA Experiment 20000496 PARAMETER Experiment Name: At_Guard_Cells_P Parameter: Harvest Date Value: 7/19/2002
  misc_feature: MA Experiment 20000496 PARAMETER Experiment Name: At_Guard_Cells_P Parameter: Organism Value: Canola
  misc_feature: MA Experiment 20000496 PARAMETER Experiment Name: At_Guard_Cells_P Parameter: Tissue Value: Guard Cells vs. Leaves
  misc_feature: MA Experiment ID: 20000794 Result: Down-regulated in Transcription
  misc_feature: MA Experiment 20000794 PARAMETER Experiment Name: At_Petals_P Parameter: Age (day) Value: 23-25 days
  misc_feature: MA Experiment 20000794 PARAMETER Experiment Name: At_Petals_P Parameter: Plant Line Value: WS
  misc_feature: MA Experiment 20000794 PARAMETER Experiment Name: At_Petals_P Parameter: Tissue Value: Petals vs. Whole plant
agcgaagaacgaagtagacgaagacgatgaagaaaggtggattcagcaataatctcaagctcgcaattcctgttgctggcgagcaatccatcaccaaattcctgactcaaagcggtacgtttaaggatggagatctacgtgttaacaaggatggagttcgaatcatttctcaattggagcctgaagtcctgtctccaattaagccagctgatgatcagctgagcttgtcggatttggatatggttaaagtcattggcaaaggaagtagtggtgttgttcagctggttcaacacaaatggactggccaatttttcgccttgaaggtcattcaactaaatattgatgaagcaattcgcaaggcaattgcacaagagctcaaaataaatcaatcgtcacagtgtccaaatcttgttacctcgtaccagtcattttatgacaatggcgcaatctcactaatcttggagtacatggacggaggatctctagcagactttctcaagtcagttaaagccatccctgactcctatctttctgccatctttagacaagtgcttcaaggattaatctatcttcatcacgataggcatatcatccatcgtgacttgaaaccatccaatctgttgatcaaccacagaggagaagtcaaaataactgactttggtgtgagtaccgttatgacaaacaccgcaggtttagcaaacacatttgtggggacttacaattatatgtctccagagagaatcgttggaaacaagtacggaaataaaagtgatatatggagcttgggtttagtagtactcgaatgtgcaacaggaaagttcccttatgcacctccgaatcaagaggaaacatggaccagtgttttcgagttgatggaagccattgttgaccaaccgccacccgctcttccttcaggaaatttctcccctgagttatcttcattcatctccacatgtttgcagaaggatccaaacagtcgaagctctgcaaaggaactgatggaacatcctttcttgaacaaatacgactactcggggatcaatctcgcgtcctacttcacagatgcaggatcgccacttgcaacacttgggaacctgtctggtacgttctccgtgtaaactacaagggagacataatatcaccatctggttcctgttatcatctgaagatttcttgttttaccttccagtgataaaatgatctttataatacatatagatatattaaattgctgtattttaagattatagatatataaggtacatgagagtgtttatttaaaaaaattcacttgga

SEQ ID NO: 85815 - protein, 363 aa, Arabidopsis thaliana; identical to SEQ ID NO: 44141
  peptide (1)..(363): Ceres Seq. ID no. 12683939
  misc_feature (70)..(330): Pfam Name: Protein kinase domain Pfam Description: Protein kinase domain
  misc_feature (1)..(363): Homolog of NCBI NO: 15233715 NR Description: MAP kinase kinase 2; protein id: At4g29810.1, by cDNA: gi_14326470, supported by cDNA: gi_18700199, supported
  misc_feature (1)..(363): Homolog of NCBI NO: 11259772 NR Description: mitogen-activated protein kinase kinase (EC
  misc_feature (1)..(353): Homolog of NCBI NO: 37625027 NR Description: putative mitogen-activated protein kinase kinase
  misc_feature (1)..(354): Homolog of NCBI NO: 15528441 NR Description: MAP kinase kinase [Medicago sativa subsp. x varia]
  misc_feature (1)..(357): Homolog of NCBI NO: 7682432 NR Description: MAP kinase kinase [Nicotiana tabacum]
  misc_feature (1)..(357): Homolog of NCBI NO: 9843771 NR Description: MAP kinase kinase [Lycopersicon esculentum]
  misc_feature (1)..(357): Homolog of NCBI NO: 7434316 NR Description: protein kinase MEK1 - tomato
  misc_feature (1)..(356): Homolog of NCBI NO: 15236108 NR Description: mitogen activated protein kinase kinase (nMAPKK); id: At4g26070.1, supported by cDNA: 31259., supported by cDNA: [Arabidopsis thaliana] >gi|7434309|pir||T04262 thaliana]
  misc_feature (1)..(308): Homolog of NCBI NO: 30687096 NR Description: mitogen-activated protein kinase kinase [Arabidopsis thaliana] >gi|15292681|gb|AAK92709.1| putative
  misc_feature (10)..(351): Homolog of NCBI NO: 7434320 NR Description: protein kinase MEK1 (EC 2.7.1.-) - maize

SEQ ID NO: 85816 - protein, 292 aa, Arabidopsis thaliana; identical to SEQ ID NO: 44142
  peptide (1)..(292): Ceres Seq. ID no. 12683940
  misc_feature (1)..(259): Pfam Name: Protein kinase domain Pfam Description: Protein kinase domain
  misc_feature (1)..(292): Homolog of NCBI NO: 15233715 NR Description: MAP kinase kinase 2; protein id: At4g29810.1, by cDNA: gi_14326470, supported by cDNA: gi_18700199, supported
  misc_feature (1)..(292): Homolog of NCBI NO: 11259772 NR Description: mitogen-activated protein kinase kinase (EC
  misc_feature (1)..(282): Homolog of NCBI NO: 37625027 NR Description: putative mitogen-activated protein kinase kinase
  misc_feature (1)..(283): Homolog of NCBI NO: 15528441 NR Description: MAP kinase kinase [Medicago sativa subsp. x varia]
  misc_feature (1)..(286): Homolog of NCBI NO: 7682432 NR Description: MAP kinase kinase [Nicotiana tabacum]
  misc_feature (1)..(286): Homolog of NCBI NO: 9843771 NR Description: MAP kinase kinase [Lycopersicon esculentum]
  misc_feature (1)..(286): Homolog of NCBI NO: 7434316 NR Description: protein kinase MEK1 - tomato
  misc_feature (1)..(285): Homolog of NCBI NO: 15236108 NR Description: mitogen activated protein kinase kinase (nMAPKK); id: At4g26070.1, supported by cDNA: 31259., supported by cDNA: [Arabidopsis thaliana] >gi|7434309|pir||T04262 thaliana]
  misc_feature (1)..(237): Homolog of NCBI NO: 30687096 NR Description: mitogen-activated protein kinase kinase [Arabidopsis thaliana] >gi|15292681|gb|AAK92709.1| putative
  misc_feature (1)..(280): Homolog of NCBI NO: 7434320 NR Description: protein kinase MEK1 (EC 2.7.1.-) - maize

SEQ ID NO: 85817 - protein, 216 aa, Arabidopsis thaliana; identical to SEQ ID NO: 44143
  peptide (1)..(216): Ceres Seq. ID no. 12683941
  misc_feature (1)..(183): Pfam Name: Protein kinase domain Pfam Description: Protein kinase domain
  misc_feature (1)..(216): Homolog of NCBI NO: 15233715 NR Description: MAP kinase kinase 2; protein id: At4g29810.1, by cDNA: gi_14326470, supported by cDNA: gi_18700199, supported
  misc_feature (1)..(216): Homolog of NCBI NO: 11259772 NR Description: mitogen-activated protein kinase kinase (EC
  misc_feature (1)..(206): Homolog of NCBI NO: 37625027 NR Description: putative mitogen-activated protein kinase kinase
  misc_feature (1)..(207): Homolog of NCBI NO: 15528441 NR Description: MAP kinase kinase [Medicago sativa subsp. x varia]
  misc_feature (1)..(210): Homolog of NCBI NO: 7682432 NR Description: MAP kinase kinase [Nicotiana tabacum]
  misc_feature (1)..(210): Homolog of NCBI NO: 9843771 NR Description: MAP kinase kinase [Lycopersicon esculentum]
  misc_feature (1)..(210): Homolog of NCBI NO: 7434316 NR Description: protein kinase MEK1 - tomato
  misc_feature (1)..(209): Homolog of NCBI NO: 15236108 NR Description: mitogen activated protein kinase kinase (nMAPKK); id: At4g26070.1, supported by cDNA: 31259., supported by cDNA: [Arabidopsis thaliana] >gi|7434309|pir||T04262 thaliana]
  misc_feature (1)..(161): Homolog of NCBI NO: 30687096 NR Description: mitogen-activated protein kinase kinase [Arabidopsis thaliana] >gi|15292681|gb|AAK92709.1| putative
  misc_feature (1)..(204): Homolog of NCBI NO: 7434320 NR Description: protein kinase MEK1 (EC 2.7.1.-) - maize

SEQ ID NO: 85818 - DNA, 1469 bp, Arabidopsis thaliana
  misc_feature (1)..(1469): Ceres Seq. ID no. 12683960
  misc_feature: MA Experiment ID: 108434 Result: Down-regulated in Transcription
  misc_feature: MA Experiment 108434 PARAMETER Experiment Name: At_Root_Tips_cDNA_P Parameter: Tissue Value: Root Tips
  misc_feature: MA Experiment ID: 108488 Result: Down-regulated in Transcription
  misc_feature: MA Experiment ID: 108579 Result: Up-regulated in Transcription
  misc_feature: MA Experiment 108579 PARAMETER Experiment Name: At_4deg_Cold_cDNA_P Parameter: Temperature (deg C) Value: 4 vs. 22
  misc_feature: MA Experiment 108579 PARAMETER Experiment Name: At_4deg_Cold_cDNA_P Parameter: Timepoint (hr) Value: 6
  misc_feature: MA Experiment 108579 PARAMETER Experiment Name: At_4deg_Cold_cDNA_P Parameter: Tissue Value: Aerial
  misc_feature: MA Experiment ID: 108594 Result: Down-regulated in Transcription
  misc_feature: MA Experiment 108594 PARAMETER Experiment Name: At_Ler-rhl_Root_cDNA_P Parameter: Plant Line Value: null
  misc_feature: MA Experiment ID: 20000069 Result: Up-regulated in Transcription
  misc_feature: MA Experiment 20000069 PARAMETER Experiment Name: At_100uM_ABA_Mutants_cDNA_P Parameter: Plant Line Value: CS23
  misc_feature: MA Experiment 20000069 PARAMETER Experiment Name: At_100uM_ABA_Mutants_cDNA_P Parameter: Timepoint (hr) Value: 6
  misc_feature: MA Experiment 20000069 PARAMETER Experiment Name: At_100uM_ABA_Mutants_cDNA_P Parameter: Tissue Value: Aerial
  misc_feature: MA Experiment 20000069 PARAMETER Experiment Name: At_100uM_ABA_Mutants_cDNA_P Parameter: Treatment Value: 100uM ABA vs. No Treatment
  misc_feature: MA Experiment ID: 20000070 Result: Up-regulated in Transcription
  misc_feature: MA Experiment 20000070 PARAMETER Experiment Name: At_100uM_ABA_Mutants_cDNA_P Parameter: Plant Line Value: CS24
  misc_feature: MA Experiment 20000070 PARAMETER Experiment Name: At_100uM_ABA_Mutants_cDNA_P Parameter: Timepoint (hr) Value: 6
  misc_feature: MA Experiment 20000070 PARAMETER Experiment Name: At_100uM_ABA_Mutants_cDNA_P Parameter: Tissue Value: Aerial
  misc_feature: MA Experiment 20000070 PARAMETER Experiment Name: At_100uM_ABA_Mutants_cDNA_P Parameter: Treatment Value: 100uM ABA vs. No Treatment
  misc_feature: MA Experiment ID: 20000071 Result: Up-regulated in Transcription
  misc_feature: MA Experiment 20000071 PARAMETER Experiment Name: At_100uM_ABA_Mutants_cDNA_P Parameter: Plant Line Value: CS8104
  misc_feature: MA Experiment 20000071 PARAMETER Experiment Name: At_100uM_ABA_Mutants_cDNA_P Parameter: Timepoint (hr) Value: 6
  misc_feature: MA Experiment 20000071 PARAMETER Experiment Name: At_100uM_ABA_Mutants_cDNA_P Parameter: Tissue Value: Aerial
  misc_feature: MA Experiment 20000071 PARAMETER Experiment Name: At_100uM_ABA_Mutants_cDNA_P Parameter: Treatment Value: 100uM ABA vs. No Treatment
  misc_feature: MA Experiment ID: 20000072 Result: Up-regulated in Transcription
  misc_feature: MA Experiment 20000072 PARAMETER Experiment Name: At_100uM_ABA_Mutants_cDNA_P Parameter: Plant Line Value: CS8105
  misc_feature: MA Experiment 20000072 PARAMETER Experiment Name: At_100uM_ABA_Mutants_cDNA_P Parameter: Timepoint (hr) Value: 6
  misc_feature: MA Experiment 20000072 PARAMETER Experiment Name: At_100uM_ABA_Mutants_cDNA_P Parameter: Tissue Value: Aerial
  misc_feature: MA Experiment 20000072 PARAMETER Experiment Name: At_100uM_ABA_Mutants_cDNA_P Parameter: Treatment Value: 100uM ABA vs. No Treatment
  misc_feature: MA Experiment ID: 20000086 Result: Up-regulated in Transcription
  misc_feature: MA Experiment 20000086 PARAMETER Experiment Name: At_100uM_ABA_Mutants_cDNA_P Parameter: Plant Line Value: CS22
  misc_feature: MA Experiment 20000086 PARAMETER Experiment Name: At_100uM_ABA_Mutants_cDNA_P Parameter: Timepoint (hr) Value: 6
  misc_feature: MA Experiment 20000086 PARAMETER Experiment Name: At_100uM_ABA_Mutants_cDNA_P Parameter: Tissue Value: Aerial
  misc_feature: MA Experiment 20000086 PARAMETER Experiment Name: At_100uM_ABA_Mutants_cDNA_P Parameter: Treatment Value: 100uM ABA vs. No Treatment
  misc_feature: MA Experiment ID: 20000088 Result: Up-regulated in Transcription
  misc_feature: MA Experiment 20000088 PARAMETER Experiment Name: At_100uM_ABA_Mutants_cDNA_P Parameter: Plant Line Value: Landsberg
  misc_feature: MA Experiment 20000088 PARAMETER Experiment Name: At_100uM_ABA_Mutants_cDNA_P Parameter: Timepoint (hr) Value: 6
  misc_feature: MA Experiment 20000088 PARAMETER Experiment Name: At_100uM_ABA_Mutants_cDNA_P Parameter: Tissue Value: Aerial
  misc_feature: MA Experiment 20000088 PARAMETER Experiment Name: At_100uM_ABA_Mutants_cDNA_P Parameter: Treatment Value: 100uM ABA vs. No Treatment
  misc_feature: MA Experiment ID: 20000089 Result: Up-regulated in Transcription
  misc_feature: MA Experiment ID: 20000090 Result: Up-regulated in Transcription
  misc_feature: MA Experiment ID: 20000093 Result: Up-regulated in Transcription
  misc_feature: MA Experiment 20000093 PARAMETER Experiment Name: At_42deg_Heat_cDNA_P Parameter: Temperature (deg C) Value: 42 vs. 22
  misc_feature: MA Experiment 20000093 PARAMETER Experiment Name: At_42deg_Heat_cDNA_P Parameter: Timepoint (hr) Value: 0.5
  misc_feature: MA Experiment 20000093 PARAMETER Experiment Name: At_42deg_Heat_cDNA_P Parameter: Tissue Value: Aerial
  misc_feature: MA Experiment ID: 20000112 Result: Up-regulated in Transcription
  misc_feature: MA Experiment 20000112 PARAMETER Experiment Name: At_42deg_Heat_cDNA_P Parameter: Temperature (deg C) Value: 42 vs. 22
  misc_feature: MA Experiment 20000112 PARAMETER Experiment Name: At_42deg_Heat_cDNA_P Parameter: Timepoint (hr) Value: 2
  misc_feature: MA Experiment 20000112 PARAMETER Experiment Name: At_42deg_Heat_cDNA_P Parameter: Tissue Value: Aerial
  misc_feature: MA Experiment ID: 20000117 Result: Up-regulated in Transcription
  misc_feature: MA Experiment 20000117 PARAMETER Experiment Name: At_100uM_ABA_Mutants_cDNA_P Parameter: Plant Line Value: Columbia
  misc_feature: MA Experiment 20000117 PARAMETER Experiment Name: At_100uM_ABA_Mutants_cDNA_P Parameter: Timepoint (hr) Value: 6
  misc_feature: MA Experiment 20000117 PARAMETER Experiment Name: At_100uM_ABA_Mutants_cDNA_P Parameter: Tissue Value: Aerial
  misc_feature: MA Experiment 20000117 PARAMETER Experiment Name: At_100uM_ABA_Mutants_cDNA_P Parameter: Treatment Value: 100uM ABA vs. No Treatment
  misc_feature: MA Experiment ID: 20000144 Result: Up-regulated in Transcription
  misc_feature: MA Experiment 20000144 PARAMETER Experiment Name: At_42deg_Heat_cDNA_P Parameter: Temperature (deg C) Value: 42 vs. 22
  misc_feature: MA Experiment 20000144 PARAMETER Experiment Name: At_42deg_Heat_cDNA_P Parameter: Timepoint (hr) Value: 1
  misc_feature: MA Experiment 20000144 PARAMETER Experiment Name: At_42deg_Heat_cDNA_P Parameter: Tissue Value: Aerial
  misc_feature: MA Experiment ID: 20000171 Result: Up-regulated in Transcription
  misc_feature: MA Experiment 20000171 PARAMETER Experiment Name: At_42deg_Heat_P Parameter: Age (day) Value: 14
  misc_feature: MA Experiment 20000171 PARAMETER Experiment Name: At_42deg_Heat_P Parameter: Organism Value: A. thaliana
  misc_feature: MA Experiment 20000171 PARAMETER Experiment Name: At_42deg_Heat_P Parameter: Plant Line Value: WS
  misc_feature: MA Experiment 20000171 PARAMETER Experiment Name: At_42deg_Heat_P Parameter: Temperature (deg C) Value: 42 vs. 22
  misc_feature: MA Experiment 20000171 PARAMETER Experiment Name: At_42deg_Heat_P Parameter: Timepoint (hr) Value: 1
  misc_feature: MA Experiment 20000171 PARAMETER Experiment Name: At_42deg_Heat_P Parameter: Tissue Value: Aerial
  misc_feature: MA Experiment ID: 20000184 Result: Down-regulated in Transcription
  misc_feature: MA Experiment 20000184 PARAMETER Experiment Name: At_Shoots__P Parameter: Age (day) Value: 7
  misc_feature: MA Experiment 20000184 PARAMETER Experiment Name: At_Shoots__P Parameter: Tissue Value: Shoots vs. Whole Plant
  misc_feature: MA Experiment ID: 20000438 Result: Down-regulated in Transcription
  misc_feature: MA Experiment 20000438 PARAMETER Experiment Name: At_Shoots__P Parameter: Age (day) Value: 14
  misc_feature: MA Experiment 20000438 PARAMETER Experiment Name: At_Shoots__P Parameter: Tissue Value: Shoots vs. Whole Plant
  misc_feature: MA Experiment ID: 20000794 Result: Up-regulated in Transcription
  misc_feature: MA Experiment 20000794 PARAMETER Experiment Name: At_Petals_P Parameter: Age (day) Value: 23-25 days
  misc_feature: MA Experiment 20000794 PARAMETER Experiment Name: At_Petals_P Parameter: Plant Line Value: WS
  misc_feature: MA Experiment 20000794 PARAMETER Experiment Name: At_Petals_P Parameter: Tissue Value: Petals vs. Whole plant
  misc_feature: MA Experiment ID: 20001757 Result: Down-regulated in Transcription
  misc_feature: MA Experiment 20001757 PARAMETER Experiment Name: At_50mM_NH4NO3_L-to-H_P Parameter: Timepoint (hr) Value: 6
  misc_feature: MA Experiment 20001757 PARAMETER Experiment Name: At_50mM_NH4NO3_L-to-H_P Parameter: Tissue Value: Leaf
  misc_feature: MA Experiment 20001757 PARAMETER Experiment Name: At_50mM_NH4NO3_L-to-H_P Parameter: Treatment Value: 50mM NH4NO3 vs 100mM Mannitol
gaagaaagcaaagaaatatcgaagaatttaaggaataaaaaataaaaacagaaagctggaggaagaaaaaataaaaattccttctttcctcctgaaggcaaaaaaggaagagaagagaagagaagagaaggaagcagaatctaattttggattataatcggagagagaatctattccgacgaatcttttcgggttgattttttggtctttaatttgaagggtttaggtgtggtttcgaagatgatggtagcgaatagtttcgatctatggcaaaaggatgtttttttctctgcagctgaggaggttcaagaatctgctgatataatggaatctgcgtataggttgtggtttaaagagaagagagacggtcgagtatccgtagaatcagacgagctctgcaaagaactccaagctgctttgagcactgctaaatggcagttggaagagtttgagagggcagtgagcttaagccatggaaattgtcgagatgacactaccttaactaggcataaacagtttgttaccgctattgaaaaccagatttatcaagtggaatctactctgctagagtcgttaagcgagaatgggaaacaacctttgcgttgggtggatcttaacaaagaagagcgtgatgatctcgccatgtttctatctggatcttctcagacgtcagagagtttaaacagtgatagcatcaacttgagagattcctcaacgagttctgtagctgagaatccacgtgggatcaatggcagaagagagggtagatgttatggcgacagtcctgattgtgtgatagacattgacgacataggaagtccggaaagtgcagataaaaaaggcggtacaagaagaacatggagttcaccaaatgtaccaaatatcagtgcgttgaggattaatgtccctgttaatgcaaaagaagaagagagggagaagttcctatcacatattgaagacactcctaaagagaaaggagctaaacctatgttttggctgcagagatgtcgtgattataaccagctctttgacagagtcaaggtttatcaaagacgatttcgcgttccattgagccgccctattaagctcattctttccttaacgctaatcttgattcttctattattcatcttgagaacttaaaaccgcggtttcagaaactctcaagaaacattgacaggttttttcacagattcttgcgtattgggttacacactcgttagatgctacatgattcaacatccttcgagggaaggaggagagattaaaagactttgtcaagattcaaatgaaggacaaagcctgatttattactctctcttaatcctcagggaacatataggaacctgtaaatttgtaagatcaatttgtaaaacttgaagctacgacgtttcgttaaactttagacgtgtacctaaaggaaaccaatgcgtgtttgtgctcaatgatatctccagtgtttgtttgtc

SEQ ID NO: 85819 - protein, 300 aa, Arabidopsis thaliana; identical to SEQ ID NO: 40352
  peptide (1)..(300): Ceres Seq. ID no. 12683961
  misc_feature (1)..(296): Homolog of NCBI NO: 7486766 NR Description: hypothetical protein F9N11.90 - Arabidopsis >gi|5730134|emb|CAB52468.1| putative protein [Arabidopsis >gi|7269924|emb|CAB81017.1| putative protein [Arabidopsis
  misc_feature (1)..(300): Homolog of NCBI NO: 18417554 NR Description: putative protein; protein id: At4g30240.1, by cDNA: gi_16226656 [Arabidopsis thaliana] AT4g30240/F9N11_90 [Arabidopsis thaliana]
  misc_feature (1)..(298): Homolog of NCBI NO: 30680486 NR Description: expressed protein [Arabidopsis thaliana]
  misc_feature (1)..(270): Homolog of NCBI NO: 7485788 NR Description: hypothetical protein At2g18860 [imported] - thaliana >gi|4185152|gb|AAD08955.1| unknown protein [Arabidopsis >gi|20197038|gb|AAM14887.1| unknown protein [Arabidopsis
  misc_feature (1)..(176): Homolog of NCBI NO: 40253501 NR Description: clathrin-coat assembly protein-like [Oryza sativa
  misc_feature (3)..(146): Homolog of NCBI NO: 18396454 NR Description: putative clathrin-coat assembly protein; protein At1g27700.1, supported by cDNA: gi_15450632, supported by cDNA: [Arabidopsis thaliana] >gi|15450633|gb|AAK96588.1|
  misc_feature (3)..(146): Homolog of NCBI NO: 25403328 NR Description: protein T22C5.15 [imported] - Arabidopsis >gi|6693035|gb|AAF24961.1|AC012375_24 T22C5.15 [Arabidopsis
  misc_feature (3)..(141): Homolog of NCBI NO: 26006490 NR Description: Hypothetical protein [Oryza sativa (japonica
  misc_feature (52)..(243): Homolog of NCBI NO: 37533116 NR Description: unknown protein [Oryza sativa (japonica
  misc_feature (3)..(68): Homolog of NCBI NO: 37533116 NR Description: unknown protein [Oryza sativa (japonica

SEQ ID NO: 85820 - protein, 299 aa, Arabidopsis thaliana; identical to SEQ ID NO: 40353
  peptide (1)..(299): Ceres Seq. ID no. 12683962
  misc_feature (1)..(295): Homolog of NCBI NO: 7486766 NR Description: hypothetical protein F9N11.90 - Arabidopsis >gi|5730134|emb|CAB52468.1| putative protein [Arabidopsis >gi|7269924|emb|CAB81017.1| putative protein [Arabidopsis
  misc_feature (1)..(299): Homolog of NCBI NO: 18417554 NR Description: putative protein; protein id: At4g30240.1, by cDNA: gi_16226656 [Arabidopsis thaliana] AT4g30240/F9N11_90 [Arabidopsis thaliana]
  misc_feature (1)..(297): Homolog of NCBI NO: 30680486 NR Description: expressed protein [Arabidopsis thaliana]
  misc_feature (1)..(269): Homolog of NCBI NO: 7485788 NR Description: hypothetical protein At2g18860 [imported] - thaliana >gi|4185152|gb|AAD08955.1| unknown protein [Arabidopsis >gi|20197038|gb|AAM14887.1| unknown protein [Arabidopsis
  misc_feature (1)..(175): Homolog of NCBI NO: 40253501 NR Description: clathrin-coat assembly protein-like [Oryza sativa
  misc_feature (2)..(145): Homolog of NCBI NO: 18396454 NR Description: putative clathrin-coat assembly protein; protein At1g27700.1, supported by cDNA: gi_15450632, supported by cDNA: [Arabidopsis thaliana] >gi|15450633|gb|AAK96588.1|
  misc_feature (2)..(145): Homolog of NCBI NO: 25403328 NR Description: protein T22C5.15 [imported] - Arabidopsis >gi|6693035|gb|AAF24961.1|AC012375_24 T22C5.15 [Arabidopsis
  misc_feature (2)..(140): Homolog of NCBI NO: 26006490 NR Description: Hypothetical protein [Oryza sativa (japonica
  misc_feature (51)..(242): Homolog of NCBI NO: 37533116 NR Description: unknown protein [Oryza sativa (japonica
  misc_feature (2)..(67): Homolog of NCBI NO: 37533116 NR Description: unknown protein [Oryza sativa (japonica

SEQ ID NO: 85821 - protein, 272 aa, Arabidopsis thaliana; identical to SEQ ID NO: 40354
  peptide (1)..(272): Ceres Seq. ID no. 12683963
  misc_feature (1)..(268): Homolog of NCBI NO: 7486766 NR Description: hypothetical protein F9N11.90 - Arabidopsis >gi|5730134|emb|CAB52468.1| putative protein [Arabidopsis >gi|7269924|emb|CAB81017.1| putative protein [Arabidopsis
  misc_feature (1)..(272): Homolog of NCBI NO: 18417554 NR Description: putative protein; protein id: At4g30240.1, by cDNA: gi_16226656 [Arabidopsis thaliana] AT4g30240/F9N11_90 [Arabidopsis thaliana]
  misc_feature (1)..(270): Homolog of NCBI NO: 30680486 NR Description: expressed protein [Arabidopsis thaliana]
  misc_feature (1)..(242): Homolog of NCBI NO: 7485788 NR Description: hypothetical protein At2g18860 [imported] - thaliana >gi|4185152|gb|AAD08955.1| unknown protein [Arabidopsis >gi|20197038|gb|AAM14887.1| unknown protein [Arabidopsis
  misc_feature (1)..(148): Homolog of NCBI NO: 40253501 NR Description: clathrin-coat assembly protein-like [Oryza sativa
  misc_feature (1)..(118): Homolog of NCBI NO: 18396454 NR Description: putative clathrin-coat assembly protein; protein At1g27700.1, supported by cDNA: gi_15450632, supported by cDNA: [Arabidopsis thaliana] >gi|15450633|gb|AAK96588.1|
  misc_feature (1)..(118): Homolog of NCBI NO: 25403328 NR Description: protein T22C5.15 [imported] - Arabidopsis >gi|6693035|gb|AAF24961.1|AC012375_24 T22C5.15 [Arabidopsis
  misc_feature (1)..(113): Homolog of NCBI NO: 26006490 NR Description: Hypothetical protein [Oryza sativa (japonica
  misc_feature (24)..(215): Homolog of NCBI NO: 37533116 NR Description: unknown protein [Oryza sativa (japonica
  misc_feature (1)..(40): Homolog of NCBI NO: 37533116 NR Description: unknown protein [Oryza sativa (japonica

SEQ ID NO: 85822 - DNA, 1367 bp, Arabidopsis thaliana
  misc_feature (1)..(1367): Ceres Seq. ID no. 12683987
  misc_feature: MA Experiment ID: 108434 Result: Down-regulated in Transcription
  misc_feature: MA Experiment 108434 PARAMETER Experiment Name: At_Root_Tips_cDNA_P Parameter: Tissue Value: Root Tips
  misc_feature: MA Experiment ID: 108462 Result: Up-regulated in Transcription
  misc_feature: MA Experiment 108462 PARAMETER Experiment Name: At_Germinating_Seeds_cDNA_P Parameter: Age (day) Value: 2 vs. 0
  misc_feature: MA Experiment 108462 PARAMETER Experiment Name: At_Germinating_Seeds_cDNA_P Parameter: Tissue Value: Germinating Seeds
  misc_feature: MA Experiment ID: 108463 Result: Up-regulated in Transcription
  misc_feature: MA Experiment 108463 PARAMETER Experiment Name: At_Germinating_Seeds_cDNA_P Parameter: Age (day) Value: 3 vs. 0
  misc_feature: MA Experiment 108463 PARAMETER Experiment Name: At_Germinating_Seeds_cDNA_P Parameter: Tissue Value: Germinating Seeds
  misc_feature: MA Experiment ID: 108464 Result: Up-regulated in Transcription
  misc_feature: MA Experiment 108464 PARAMETER Experiment Name: At_Germinating_Seeds_cDNA_P Parameter: Age (day) Value: 4 vs. 0
  misc_feature: MA Experiment 108464 PARAMETER Experiment Name: At_Germinating_Seeds_cDNA_P Parameter: Tissue Value: Germinating Seeds
  misc_feature: MA Experiment ID: 108469 Result: Up-regulated in Transcription
  misc_feature: MA Experiment ID: 108488 Result: Down-regulated in Transcription
  misc_feature: MA Experiment ID: 108489 Result: Up-regulated in Transcription
  misc_feature: MA Experiment ID: 108573 Result: Up-regulated in Transcription
  misc_feature: MA Experiment 108573 PARAMETER Experiment Name: At_Drought_cDNA_P Parameter: Timepoint (hr) Value: 6
  misc_feature: MA Experiment 108573 PARAMETER Experiment Name: At_Drought_cDNA_P Parameter: Tissue Value: Aerial
  misc_feature: MA Experiment 108573 PARAMETER Experiment Name: At_Drought_cDNA_P Parameter: Treatment Value: Drought vs. No Drought
  misc_feature: MA Experiment ID: 108585 Result: Up-regulated in Transcription
  misc_feature: MA Experiment 108585 PARAMETER Experiment Name: At_5mM_NaNP_cDNA_P Parameter: Timepoint (hr) Value: 6
  misc_feature: MA Experiment 108585 PARAMETER Experiment Name: At_5mM_NaNP_cDNA_P Parameter: Tissue Value: Aerial
  misc_feature: MA Experiment 108585 PARAMETER Experiment Name: At_5mM_NaNP_cDNA_P Parameter: Treatment Value: null
  misc_feature: MA Experiment ID: 108668 Result: Up-regulated in Transcription
  misc_feature: MA Experiment 108668 PARAMETER Experiment Name: At_2mM_SA_cDNA_P Parameter: Plant Line Value: WS
  misc_feature: MA Experiment 108668 PARAMETER Experiment Name: At_2mM_SA_cDNA_P Parameter: Timepoint (hr) Value: 6
  misc_feature: MA Experiment 108668 PARAMETER Experiment Name: At_2mM_SA_cDNA_P Parameter: Treatment Value: 2mM SA vs. No Treatment
  misc_feature: MA Experiment ID: 20000069 Result: Up-regulated in Transcription
  misc_feature: MA Experiment 20000069 PARAMETER Experiment Name: At_100uM_ABA_Mutants_cDNA_P Parameter: Plant Line Value: CS23
  misc_feature: MA Experiment 20000069 PARAMETER Experiment Name: At_100uM_ABA_Mutants_cDNA_P Parameter: Timepoint (hr) Value: 6
  misc_feature: MA Experiment 20000069 PARAMETER Experiment Name: At_100uM_ABA_Mutants_cDNA_P Parameter: Tissue Value: Aerial
  misc_feature: MA Experiment 20000069 PARAMETER Experiment Name: At_100uM_ABA_Mutants_cDNA_P Parameter: Treatment Value: 100uM ABA vs. No Treatment
  misc_feature: MA Experiment ID: 20000071 Result: Up-regulated in Transcription
  misc_feature: MA Experiment 20000071 PARAMETER Experiment Name: At_100uM_ABA_Mutants_cDNA_P Parameter: Plant Line Value: CS8104
  misc_feature: MA Experiment 20000071 PARAMETER Experiment Name: At_100uM_ABA_Mutants_cDNA_P Parameter: Timepoint (hr) Value: 6
  misc_feature: MA Experiment 20000071 PARAMETER Experiment Name: At_100uM_ABA_Mutants_cDNA_P Parameter: Tissue Value: Aerial
  misc_feature: MA Experiment 20000071 PARAMETER Experiment Name: At_100uM_ABA_Mutants_cDNA_P Parameter: Treatment Value: 100uM ABA vs. No Treatment
  misc_feature: MA Experiment ID: 20000072 Result: Up-regulated in Transcription
  misc_feature: MA Experiment 20000072 PARAMETER Experiment Name: At_100uM_ABA_Mutants_cDNA_P Parameter: Plant Line Value: CS8105
  misc_feature: MA Experiment 20000072 PARAMETER Experiment Name: At_100uM_ABA_Mutants_cDNA_P Parameter: Timepoint (hr) Value: 6
  misc_feature: MA Experiment 20000072 PARAMETER Experiment Name: At_100uM_ABA_Mutants_cDNA_P Parameter: Tissue Value: Aerial
  misc_feature: MA Experiment 20000072 PARAMETER Experiment Name: At_100uM_ABA_Mutants_cDNA_P Parameter: Treatment Value: 100uM ABA vs. No Treatment
  misc_feature: MA Experiment ID: 20000086 Result: Up-regulated in Transcription
  misc_feature: MA Experiment 20000086 PARAMETER Experiment Name: At_100uM_ABA_Mutants_cDNA_P Parameter: Plant Line Value: CS22
  misc_feature: MA Experiment 20000086 PARAMETER Experiment Name: At_100uM_ABA_Mutants_cDNA_P Parameter: Timepoint (hr) Value: 6
  misc_feature: MA Experiment 20000086 PARAMETER Experiment Name: At_100uM_ABA_Mutants_cDNA_P Parameter: Tissue Value: Aerial
  misc_feature: MA Experiment 20000086 PARAMETER Experiment Name: At_100uM_ABA_Mutants_cDNA_P Parameter: Treatment Value: 100uM ABA vs. No Treatment
  misc_feature: MA Experiment ID: 20000087 Result: Up-regulated in Transcription
  misc_feature: MA Experiment 20000087 PARAMETER Experiment Name: At_100uM_ABA_Mutants_cDNA_P Parameter: Plant Line Value: WS
  misc_feature: MA Experiment 20000087 PARAMETER Experiment Name: At_100uM_ABA_Mutants_cDNA_P Parameter: Timepoint (hr) Value: 6
  misc_feature: MA Experiment 20000087 PARAMETER Experiment Name: At_100uM_ABA_Mutants_cDNA_P Parameter: Tissue Value: Aerial
  misc_feature: MA Experiment 20000087 PARAMETER Experiment Name: At_100uM_ABA_Mutants_cDNA_P Parameter: Treatment Value: 100uM ABA vs. No Treatment
  misc_feature: MA Experiment ID: 20000182 Result: Up-regulated in Transcription
  misc_feature: MA Experiment 20000182 PARAMETER Experiment Name: At_2mM_SA_P Parameter: Age (day) Value: 14
  misc_feature: MA Experiment 20000182 PARAMETER Experiment Name: At_2mM_SA_P Parameter: Organism Value: A. thaliana
  misc_feature: MA Experiment 20000182 PARAMETER Experiment Name: At_2mM_SA_P Parameter: Plant Line Value: WS
  misc_feature: MA Experiment 20000182 PARAMETER Experiment Name: At_2mM_SA_P Parameter: Timepoint (hr) Value: 6
  misc_feature: MA Experiment 20000182 PARAMETER Experiment Name: At_2mM_SA_P Parameter: Tissue Value: Aerial
  misc_feature: MA Experiment 20000182 PARAMETER Experiment Name: At_2mM_SA_P Parameter: Treatment Value: 2mM SA vs. No Treatment
  misc_feature: MA Experiment ID: 20000185 Result: Up-regulated in Transcription
  misc_feature: MA Experiment 20000185 PARAMETER Experiment Name: At_Roots__P Parameter: Age (day) Value: 7 vs. 21
  misc_feature: MA Experiment 20000185 PARAMETER Experiment Name: At_Roots__P Parameter: Organism Value: A. thaliana
  misc_feature: MA Experiment 20000185 PARAMETER Experiment Name: At_Roots__P Parameter: Tissue Value: Roots vs. Whole Plant
  misc_feature: MA Experiment ID: 20000265 Result: Down-regulated in Transcription
  misc_feature: MA Experiment 20000265 PARAMETER Experiment Name: At_Open_Flower_P Parameter: Age (day) Value: 21
  misc_feature: MA Experiment 20000265 PARAMETER Experiment Name: At_Open_Flower_P Parameter: Plant Line Value: WS
  misc_feature: MA Experiment 20000265 PARAMETER Experiment Name: At_Open_Flower_P Parameter: Tissue Value: Closed Flower vs. Whole Plant
  misc_feature: MA Experiment ID: 20000267 Result: Up-regulated in Transcription
  misc_feature: MA Experiment 20000267 PARAMETER Experiment Name: At_Drought_P Parameter: Age (day) Value: 7
  misc_feature: MA Experiment 20000267 PARAMETER Experiment Name: At_Drought_P Parameter: Organism Value: A. thaliana
  misc_feature: MA Experiment 20000267 PARAMETER Experiment Name: At_Drought_P Parameter: Plant Line Value: WS
  misc_feature: MA Experiment 20000267 PARAMETER Experiment Name: At_Drought_P Parameter: Timepoint (hr) Value: 6
  misc_feature: MA Experiment 20000267 PARAMETER Experiment Name: At_Drought_P Parameter: Tissue Value: Whole Plant
  misc_feature: MA Experiment 20000267 PARAMETER Experiment Name: At_Drought_P Parameter: Treatment Value: Drought vs. No Drought
  misc_feature: MA Experiment ID: 20000436 Result: Up-regulated in Transcription
  misc_feature: MA Experiment 20000436 PARAMETER Experiment Name: At_Drought_P Parameter: Age (day) Value: 7
  misc_feature: MA Experiment 20000436 PARAMETER Experiment Name: At_Drought_P Parameter: Organism Value: A. thaliana
  misc_feature: MA Experiment 20000436 PARAMETER Experiment Name: At_Drought_P Parameter: Plant Line Value: WS
  misc_feature: MA Experiment 20000436 PARAMETER Experiment Name: At_Drought_P Parameter: Timepoint (hr) Value: 12
  misc_feature: MA Experiment 20000436 PARAMETER Experiment Name: At_Drought_P Parameter: Tissue Value: Whole Plant
  misc_feature: MA Experiment 20000436 PARAMETER Experiment Name: At_Drought_P Parameter: Treatment Value: Drought vs. No Drought
  misc_feature: MA Experiment ID: 20000437 Result: Up-regulated in Transcription
  misc_feature: MA Experiment 20000437 PARAMETER Experiment Name: At_Drought_P Parameter: Age (day) Value: 8
  misc_feature: MA Experiment 20000437 PARAMETER Experiment Name: At_Drought_P Parameter: Organism Value: A. thaliana
  misc_feature: MA Experiment 20000437 PARAMETER Experiment Name: At_Drought_P Parameter: Plant Line Value: WS
  misc_feature: MA Experiment 20000437 PARAMETER Experiment Name: At_Drought_P Parameter: Timepoint (hr) Value: 24
  misc_feature: MA Experiment 20000437 PARAMETER Experiment Name: At_Drought_P Parameter: Tissue Value: Whole Plant
  misc_feature: MA Experiment 20000437 PARAMETER Experiment Name: At_Drought_P Parameter: Treatment Value: Drought vs. No Drought
  misc_feature: MA Experiment ID: 20000439 Result: Up-regulated in Transcription
  misc_feature: MA Experiment 20000439 PARAMETER Experiment Name: At_Roots__P Parameter: Age (day) Value: 14 vs. 21
  misc_feature: MA Experiment 20000439 PARAMETER Experiment Name: At_Roots__P Parameter: Organism Value: A. thaliana
  misc_feature: MA Experiment 20000439 PARAMETER Experiment Name: At_Roots__P Parameter: Tissue Value: Roots vs. Whole Plant
  misc_feature: MA Experiment ID: 20000453 Result: Up-regulated in Transcription
  misc_feature: MA Experiment 20000453 PARAMETER Experiment Name: At_100uM_ABA_P Parameter: Age (day) Value: 15
  misc_feature: MA Experiment 20000453 PARAMETER Experiment Name: At_100uM_ABA_P Parameter: Organism Value: A. thaliana
  misc_feature: MA Experiment 20000453 PARAMETER Experiment Name: At_100uM_ABA_P Parameter: Plant Line Value: WS
  misc_feature: MA Experiment 20000453 PARAMETER Experiment Name: At_100uM_ABA_P Parameter: Timepoint (hr) Value: 24
  misc_feature: MA Experiment 20000453 PARAMETER Experiment Name: At_100uM_ABA_P Parameter: Tissue Value: Aerial
  misc_feature: MA Experiment 20000453 PARAMETER Experiment Name: At_100uM_ABA_P Parameter: Treatment Value: 100uM ABA vs. No Treatment
  misc_feature: MA Experiment ID: 20001557 Result: Up-regulated in Transcription
  misc_feature: MA Experiment 20001557 PARAMETER Experiment Name: At_Drought_Soil_Dry_P Parameter: Age (day) Value: 27
  misc_feature: MA Experiment 20001557 PARAMETER Experiment Name: At_Drought_Soil_Dry_P Parameter: Organism Value: A. thaliana
  misc_feature: MA Experiment 20001557 PARAMETER Experiment Name: At_Drought_Soil_Dry_P Parameter: Plant Line Value: WS
  misc_feature: MA Experiment 20001557 PARAMETER Experiment Name: At_Drought_Soil_Dry_P Parameter: Post Timepoint (hr) Value: 3
  misc_feature: MA Experiment 20001557 PARAMETER Experiment Name: At_Drought_Soil_Dry_P Parameter: Post-Treatment Value: Re-Water vs. No Drought
  misc_feature: MA Experiment 20001557 PARAMETER Experiment Name: At_Drought_Soil_Dry_P Parameter: Timepoint (day) Value: 13
  misc_feature: MA Experiment 20001557 PARAMETER Experiment Name: At_Drought_Soil_Dry_P Parameter: Treatment Value: Drought vs. No Drought
  misc_feature: MA Experiment ID: 20001906 Result: Up-regulated in Transcription
  misc_feature: MA Experiment 20001906 PARAMETER Experiment Name: At_Drought_Reproduction_P Parameter: Age (day) Value: 35
  misc_feature: MA Experiment 20001906 PARAMETER Experiment Name: At_Drought_Reproduction_P Parameter: Organism Value: A. thaliana
  misc_feature: MA Experiment 20001906 PARAMETER Experiment Name: At_Drought_Reproduction_P Parameter: Plant Line Value: WS
  misc_feature: MA Experiment 20001906 PARAMETER Experiment Name: At_Drought_Reproduction_P Parameter: Timepoint (day) Value: 5
  misc_feature: MA Experiment 20001906 PARAMETER Experiment Name: At_Drought_Reproduction_P Parameter: Tissue Value: Siliques
  misc_feature: MA Experiment 20001906 PARAMETER Experiment Name: At_Drought_Reproduction_P Parameter: Treatment Value: Drought vs. No Drought
  misc_feature: MA Experiment ID: 20001908 Result: Up-regulated in Transcription
  misc_feature: MA Experiment 20001908 PARAMETER Experiment Name: At_Drought_Reproduction_P Parameter: Age (day) Value: 40
  misc_feature: MA Experiment 20001908 PARAMETER Experiment Name: At_Drought_Reproduction_P Parameter: Organism Value: A. thaliana
  misc_feature: MA Experiment 20001908 PARAMETER Experiment Name: At_Drought_Reproduction_P Parameter: Plant Line Value: WS
  misc_feature: MA Experiment 20001908 PARAMETER Experiment Name: At_Drought_Reproduction_P Parameter: Timepoint (day) Value: 10
  misc_feature: MA Experiment 20001908 PARAMETER Experiment Name: At_Drought_Reproduction_P Parameter: Tissue Value: Siliques
  misc_feature: MA Experiment 20001908 PARAMETER Experiment Name: At_Drought_Reproduction_P Parameter: Treatment Value: Drought vs. No Drought
  misc_feature: MA Experiment ID: 20001911 Result: Up-regulated in Transcription
  misc_feature: MA Experiment 20001911 PARAMETER Experiment Name: At_Drought_Reproduction_P Parameter: Age (day) Value: 40
  misc_feature: MA Experiment 20001911 PARAMETER Experiment Name: At_Drought_Reproduction_P Parameter: Organism Value: A. thaliana
  misc_feature: MA Experiment 20001911 PARAMETER Experiment Name: At_Drought_Reproduction_P Parameter: Plant Line Value: WS
  misc_feature: MA Experiment 20001911 PARAMETER Experiment Name: At_Drought_Reproduction_P Parameter: Timepoint (day) Value: 10
  misc_feature: MA Experiment 20001911 PARAMETER Experiment Name: At_Drought_Reproduction_P Parameter: Tissue Value: Flowers
  misc_feature: MA Experiment 20001911 PARAMETER Experiment Name: At_Drought_Reproduction_P Parameter: Treatment Value: Drought vs. No Drought
aaataagcttatcattcttacaaaaatatttctgggtttctgatattgttcttgttctcttgaatctttattacttgaaaaacatataaagtgatggcggttgtggttgaagaaggtgtggtgttgaatcatggaggtgaagagcttgtggatttgccacctggtttcaggtttcatccaacagacgaagagatcataacatgttaccttaaggagaaggttttaaacagccgattcacggctgtggccatgggagaagctgatctcaacaagtgtgagccttgggatttgccaagagggcaaagatgggggagaaagagttctacttcttctgtcaaagggacaggaagtatccgactgggatgaggacgaaccgtgcgacggagtcaggatactggaaagccaccgggaaggataaggagatcttcaaaggcaaaggttgtctcgttgggatgaagaaaacacttgtgttttatagaggaagagctccaaaaggtgaaaagactaattgggtcatgcatgaatatcgtcttgaaggcaaatattcgtattacaatctcccaaaatctgcaagggacgaatgggtcgtgtgtagggtttttcacaagaacaatccttctaccacaacccaaccaatgacgagaatacccgttgaagatttcacaaggatggattctctagagaacattgatcatctcctagacttctcatctcttcctcctctcatagacccgagtttcatgagtcaaaccgaacaaccaaacttcaaacccatcaaccctccaacttacgatatctcatcaccaatccaaccccatcatttcaattcttaccaatcaatctttaaccaccaggtttttggttctgcttcgggctctacgtacaacaacaacaacgagatgatcaagatggagcaatcacttgttagtgtatctcaagaaacatgcctaagctcagatgtgaacgcgaacatgactacaaccacggaggtatcttcgggtcctgtaatgaaacaagaaatggggatgatgggaatggtgaatggtagcaagtcgtatgaagatctatgtgacttgaggggggacttgtgggacttctaattaatcatttgactgtggtgaaagagtatatttgttgggatttaaatcatgttagttaatacatatacatataggatttactagaggcttaatcctagttaactattttcacttcattgatattatttaattagttgattgtttaattagtttatactttatagtgtggttaaaaaagaaaagaaaggattgtgataatttgggattttagtgcataagttatatctcaatgtaaactgtatttgtatacatataattagtcttctc

SEQ ID NO: 85823 - protein, 264 aa, Arabidopsis thaliana; identical to SEQ ID NO: 42737
  peptide (1)..(264): Ceres Seq. ID no. 12683988
  misc_feature (1)..(77): Pfam Name: No apical meristem (NAM) protein Pfam Description: No apical meristem (NAM) protein
  misc_feature (1)..(264): Homolog of NCBI NO: 9758909 NR Description: NAM (no apical meristem)-like protein thaliana] >gi|28973617|gb|AAO64133.1| putative NAM (no apical protein [Arabidopsis thaliana] >gi|29824189|gb|AAP04055.1|
  misc_feature (1)..(264): Homolog of NCBI NO: 30686737 NR Description: NAM (no apical meristem)-related protein
  misc_feature (1)..(263): Homolog of NCBI NO: 15229219 NR Description: NAM-like protein (no apical meristem); protein At3g04060.1, supported by cDNA: 119460., supported by cDNA:
  misc_feature (1)..(238): Homolog of NCBI NO: 15240252 NR Description: NAM, no apical meristem, - like protein; protein At5g61430.1, supported by cDNA: 12970., supported by cDNA:
  misc_feature (1)..(238): Homolog of NCBI NO: 21537315 NR Description: NAM, no apical meristem,-like protein

SEQ ID NO: 85824 - protein, 245 aa, Arabidopsis thaliana
  peptide (1)..(245): Ceres Seq. ID no. 12683989
  misc_feature (1)..(58): Pfam Name: No apical meristem (NAM) protein Pfam Description: No apical meristem (NAM) protein
  misc_feature (1)..(245): Homolog of NCBI NO: 9758909 NR Description: NAM (no apical meristem)-like protein thaliana] >gi|28973617|gb|AAO64133.1| putative NAM (no apical protein [Arabidopsis thaliana] >gi|29824189|gb|AAP04055.1|
  misc_feature (1)..(245): Homolog of NCBI NO: 30686737 NR Description: NAM (no apical meristem)-related protein
  misc_feature (1)..(244): Homolog of NCBI NO: 15229219 NR Description: NAM-like protein (no apical meristem); protein At3g04060.1, supported by cDNA: 119460., supported by cDNA:
  misc_feature (1)..(219): Homolog of NCBI NO: 15240252 NR Description: NAM, no apical meristem, - like protein; protein At5g61430.1, supported by cDNA: 12970., supported by cDNA:
  misc_feature (1)..(219): Homolog of NCBI NO: 21537315 NR Description: NAM, no apical meristem,-like protein
MRTNRATESGYWKATGKDKEIFKGKGCLVGMKKTLVFYRGRAPKGEKTNWVMHEYRLEGKYSYYNLPKSARDEWVVCRVFHKNNPSTTTQPMTRIPVEDFTRMDSLENIDHLLDFSSLPPLIDPSFMSQTEQPNFKPINPPTYDISSPIQPHHFNSYQSIFNHQVFGSASGSTYNNNNEMIKMEQSLVSVSQETCLSSDVNANMTTTTEVSSGPVMKQEMGMMGMVNGSKSYEDLCDLRGDLWDF

SEQ ID NO: 85825 - protein, 215 aa, Arabidopsis thaliana
  peptide (1)..(215): Ceres Seq. ID no. 12683990
  misc_feature (1)..(215): Homolog of NCBI NO: 9758909 NR Description: NAM (no apical meristem)-like protein thaliana] >gi|28973617|gb|AAO64133.1| putative NAM (no apical protein [Arabidopsis thaliana] >gi|29824189|gb|AAP04055.1|
  misc_feature (1)..(215): Homolog of NCBI NO: 30686737 NR Description: NAM (no apical meristem)-related protein
  misc_feature (1)..(214): Homolog of NCBI NO: 15229219 NR Description: NAM-like protein (no apical meristem); protein At3g04060.1, supported by cDNA: 119460., supported by cDNA:
  misc_feature (1)..(189): Homolog of NCBI NO: 15240252 NR Description: NAM, no apical meristem, - like protein; protein At5g61430.1, supported by cDNA: 12970., supported by cDNA:
  misc_feature (1)..(189): Homolog of NCBI NO: 21537315 NR Description: NAM, no apical meristem,-like protein
MKKTLVFYRGRAPKGEKTNWVMHEYRLEGKYSYYNLPKSARDEWVVCRVFHKNNPSTTTQPMTRIPVEDFTRMDSLENIDHLLDFSSLPPLIDPSFMSQTEQPNFKPINPPTYDISSPIQPHHFNSYQSIFNHQVFGSASGSTYNNNNEMIKMEQSLVSVSQETCLSSDVNANMTTTTEVSSGPVMKQEMGMMGMVNGSKSYEDLCDLRGDLWDF

SEQ ID NO: 85826 - DNA, 1398 bp, Arabidopsis thaliana
  misc_feature (1)..(1398): Ceres Seq. ID no. 12684066
  misc_feature: MA Experiment ID: 20000184 Result: Down-regulated in Transcription
  misc_feature: MA Experiment 20000184 PARAMETER Experiment Name: At_Shoots__P Parameter: Age (day) Value: 7
  misc_feature: MA Experiment 20000184 PARAMETER Experiment Name: At_Shoots__P Parameter: Tissue Value: Shoots vs. Whole Plant
atgagtcgctacgatagccggaccggcgattccacctcgtaccgtgaccgtcgaagtgactcagggtttggtgggacttcatcatatggaagctcaggtagtcatacatctagcaaaaaggataacgatggcaatgaatctccaaggaagctagatttagatggtttgactccttttgagaagaatttttatgtcgagtctcccgctgtggcggctatgacagacacagaagtagaggaatatcgaaagctaagggaaattactgttgaaggcaaagatattccaaaacctgtcaagagttttcgtgatgttggctttcctgattatgttttggaagaggttaagaaggctggttttactgaacctacgcctatacaatctcaggggtggccaatggctatgaagggacgtgatcttatcggcattgctgaaactggttctggaaagactctttcttacttactacctgctattgtccatgttaatgcccaaccaatgttagctcatggtgacggcccaatcgtcttggttcttgctcccactcgtgaactggctgtgcagatacagcaagaggcatctaaatttggttcatcctcaaaaattaagaccacttgcatttatggtggggttccaaaagggcctcaagtgcgtgatctccagaaaggtgtggagatcgttatagctactcctgggaggttaatagacatgatggagtcgaacaacacaaacctacgaagggttacttatcttgttttggatgaggctgatcgaatgcttgatatggggtttgaccctcagatccggaaaattgtttcacatattcggccagaccgtcaaactttgtactggagtgccacttggcctaaggaggtggaacaactatcgaagaagttggtgaaactgcttgaggacataatggatggaagcagaattcttgtcttcctcgatacaaaaaagggctgtgaccaaatcactcgtcagcttcgcatggatggttggcctgctttgtcaatacatggagataaaagtcaagcggaaagagattgggttctctcggagtttagatcaggcaaaagccctataatgactgctacagacgttgcagctcgtggattagacgtgaaagatgtgaagtatgtgataaactatgacttccctggatcactggaggattatgttcacaggattggacgaacaggtagagccggggctaaaggaacagcttacactttcttcacagttgcaaatgcgagattcgccaaggaacttaccaacatactacaagaagctggacagaaagtgagtcccgaattggcttcaatgggtcgcagtaccgctcctcctcctccagggcttggaggattcagagaccgtgggagcagaagagggtggagctga

SEQ ID NO: 85827 - protein, 465 aa, Arabidopsis thaliana
  peptide (1)..(465): Ceres Seq. ID no. 12684067
  misc_feature (112)..(299): Pfam Name: DEAD/DEAH box helicase Pfam Description: DEAD/DEAH box helicase
  misc_feature (1)..(299): Homolog of NCBI NO: 15221998 NR Description: ethylene-responsive DEAD/DEAH box RNA helicase putative; protein id: At1g55150.1, supported by cDNA: gi_17065337
  misc_feature (293)..(465): Homolog of NCBI NO: 15221998 NR Description: ethylene-responsive DEAD/DEAH box RNA helicase putative; protein id: At1g55150.1, supported by cDNA: gi_17065337
  misc_feature (1)..(464): Homolog of NCBI NO: 5669638 NR Description: ethylene-responsive RNA helicase [Lycopersicon
  misc_feature (1)..(299): Homolog of NCBI NO: 34903586 NR Description: putative ethylene-responsive RNA helicase [Oryza
  misc_feature (293)..(465): Homolog of NCBI NO: 34903586 NR Description: putative ethylene-responsive RNA helicase [Oryza
  misc_feature (9)..(300): Homolog of NCBI NO: 10177293 NR Description: ATP-dependent RNA helicase-like protein
  misc_feature (297)..(463): Homolog of NCBI NO: 10177293 NR Description: ATP-dependent RNA helicase-like protein
  misc_feature (4)..(296): Homolog of NCBI NO: 19113315 NR Description: p68-like protein. [Schizosaccharomyces pombe]
  misc_feature (293)..(463): Homolog of NCBI NO: 19113315 NR Description: p68-like protein. [Schizosaccharomyces pombe]
  misc_feature (14)..(300): Homolog of NCBI NO: 28838521 NR Description: Similar to DEAD/H (Asp-Glu-Ala-Asp/His) box
MSRYDSRTGDSTSYRDRRSDSGFGGTSSYGSSGSHTSSKKDNDGNESPRKLDLDGLTPFEKNFYVESPAVAAMTDTEVEEYRKLREITVEGKDIPKPVKSFRDVGFPDYVLEEVKKAGFTEPTPIQSQGWPMAMKGRDLIGIAETGSGKTLSYLLPAIVHVNAQPMLAHGDGPIVLVLAPTRELAVQIQQEASKFGSSSKIKTTCIYGGVPKGPQVRDLQKGVEIVIATPGRLIDMMESNNTNLRRVTYLVLDEADRMLDMGFDPQIRKIVSHIRPDRQTLYWSATWPKEVEQLSKKLVKLLEDIMDGSRILVFLDTKKGCDQITRQLRMDGWPALSIHGDKSQAERDWVLSEFRSGKSPIMTATDVAARGLDVKDVKYVINYDFPGSLEDYVHRIGRTGRAGAKGTAYTFFTVANARFAKELTNILQEAGQKVSPELASMGRSTAPPPPGLGGFRDRGSRRGWS

SEQ ID NO: 85828 - protein, 393 aa, Arabidopsis thaliana
  peptide (1)..(393): Ceres Seq. ID no. 12684068
  misc_feature (40)..(227): Pfam Name: DEAD/DEAH box helicase Pfam Description: DEAD/DEAH box helicase
  misc_feature (1)..(227): Homolog of NCBI NO: 15221998 NR Description: ethylene-responsive DEAD/DEAH box RNA helicase putative; protein id: At1g55150.1, supported by cDNA: gi_17065337
  misc_feature (221)..(393): Homolog of NCBI NO: 15221998 NR Description: ethylene-responsive DEAD/DEAH box RNA helicase putative; protein id: At1g55150.1, supported by cDNA: gi_17065337
  misc_feature (1)..(392): Homolog of NCBI NO: 5669638 NR Description: ethylene-responsive RNA helicase [Lycopersicon
  misc_feature (1)..(227): Homolog of NCBI NO: 34903586 NR Description: putative ethylene-responsive RNA helicase [Oryza
  misc_feature (221)..(393): Homolog of NCBI NO: 34903586 NR Description: putative ethylene-responsive RNA helicase [Oryza
  misc_feature (1)..(228): Homolog of NCBI NO: 10177293 NR Description: ATP-dependent RNA helicase-like protein
  misc_feature (225)..(391): Homolog of NCBI NO: 10177293 NR Description: ATP-dependent RNA helicase-like protein
  misc_feature (1)..(224): Homolog of NCBI NO: 19113315 NR Description: p68-like protein. [Schizosaccharomyces pombe]
  misc_feature (221)..(391): Homolog of NCBI NO: 19113315 NR Description: p68-like protein. [Schizosaccharomyces pombe]
  misc_feature (1)..(228): Homolog of NCBI NO: 28838521 NR Description: Similar to DEAD/H (Asp-Glu-Ala-Asp/His) box
MTDTEVEEYRKLREITVEGKDIPKPVKSFRDVGFPDYVLEEVKKAGFTEPTPIQSQGWPMAMKGRDLIGIAETGSGKTLSYLLPAIVHVNAQPMLAHGDGPIVLVLAPTRELAVQIQQEASKFGSSSKIKTTCIYGGVPKGPQVRDLQKGVEIVIATPGRLIDMMESNNTNLRRVTYLVLDEADRMLDMGFDPQIRKIVSHIRPDRQTLYWSATWPKEVEQLSKKLVKLLEDIMDGSRILVFLDTKKGCDQITRQLRMDGWPALSIHGDKSQAERDWVLSEFRSGKSPIMTATDVAARGLDVKDVKYVINYDFPGSLEDYVHRIGRTGRAGAKGTAYTFFTVANARFAKELTNILQEAGQKVSPELASMGRSTAPPPPGLGGFRDRGSRRGWS

SEQ ID NO: 85829 - protein, 334 aa, Arabidopsis thaliana
  peptide (1)..(334): Ceres Seq. ID no. 12684069
  misc_feature (1)..(168): Pfam Name: DEAD/DEAH box helicase Pfam Description: DEAD/DEAH box helicase
  misc_feature (1)..(168): Homolog of NCBI NO: 15221998 NR Description: ethylene-responsive DEAD/DEAH box RNA helicase putative; protein id: At1g55150.1, supported by cDNA: gi_17065337
  misc_feature (162)..(334): Homolog of NCBI NO: 15221998 NR Description: ethylene-responsive DEAD/DEAH box RNA helicase putative; protein id: At1g55150.1, supported by cDNA: gi_17065337
  misc_feature (1)..(333): Homolog of NCBI NO: 5669638 NR Description: ethylene-responsive RNA helicase [Lycopersicon
  misc_feature (1)..(168): Homolog of NCBI NO: 34903586 NR Description: putative ethylene-responsive RNA helicase [Oryza
  misc_feature (162)..(334): Homolog of NCBI NO: 34903586 NR Description: putative ethylene-responsive RNA helicase [Oryza
  misc_feature (1)..(169): Homolog of NCBI NO: 10177293 NR Description: ATP-dependent RNA helicase-like protein
  misc_feature (166)..(332): Homolog of NCBI NO: 10177293 NR Description: ATP-dependent RNA helicase-like protein
  misc_feature (1)..(165): Homolog of NCBI NO: 19113315 NR Description: p68-like protein. [Schizosaccharomyces pombe]
  misc_feature (162)..(332): Homolog of NCBI NO: 19113315 NR Description: p68-like protein. [Schizosaccharomyces pombe]
  misc_feature (1)..(169): Homolog of NCBI NO: 28838521 NR Description: Similar to DEAD/H (Asp-Glu-Ala-Asp/His) box
MAMKGRDLIGIAETGSGKTLSYLLPAIVHVNAQPMLAHGDGPIVLVLAPTRELAVQIQQEASKFGSSSKIKTTCIYGGVPKGPQVRDLQKGVEIVIATPGRLIDMMESNNTNLRRVTYLVLDEADRMLDMGFDPQIRKIVSHIRPDRQTLYWSATWPKEVEQLSKKLVKLLEDIMDGSRILVFLDTKKGCDQITRQLRMDGWPALSIHGDKSQAERDWVLSEFRSGKSPIMTATDVAARGLDVKDVKYVINYDFPGSLEDYVHRIGRTGRAGAKGTAYTFFTVANARFAKELTNILQEAGQKVSPELASMGRSTAPPPPGLGGFRDRGSRRGWS

SEQ ID NO: 85830 - DNA, 1149 bp, Arabidopsis thaliana
  misc_feature (1)..(1149): Ceres Seq. ID no. 12684120
  misc_feature: MA Experiment ID: 20000327 Result: Up-regulated in Transcription
  misc_feature: MA Experiment 20000327 PARAMETER Experiment Name: At_42deg_Heat_Sub_P Parameter: Age (day) Value: 14
  misc_feature: MA Experiment 20000327 PARAMETER Experiment Name: At_42deg_Heat_Sub_P Parameter: Organism Value: A. thaliana
  misc_feature: MA Experiment 20000327 PARAMETER Experiment Name: At_42deg_Heat_Sub_P Parameter: Plant Line Value: WS
  misc_feature: MA Experiment 20000327 PARAMETER Experiment Name: At_42deg_Heat_Sub_P Parameter: Temperature (deg C) Value: 42 vs. 22
  misc_feature: MA Experiment 20000327 PARAMETER Experiment Name: At_42deg_Heat_Sub_P Parameter: Timepoint (hr) Value: 1
  misc_feature: MA Experiment 20000327 PARAMETER Experiment Name: At_42deg_Heat_Sub_P Parameter: Tissue Value: Aerial
atgccgcagccgcgaccggaaactatacgtggcagtttaaaacctcacatcatggtgtttccatatccagcacaaggccacttgcttcctcttctcgacttaacccatcaactctgtcttcgtggcctcacagtctccatcatcgtcactcctaaaaaccttccttacctctctcctcttctctccgctcatccatccgctgtttccgtcgtcactttacctttccctcaccatcctttaatcccttccggggttgaaaacgttaaagatctaggtggttacggaaatcccttgatcatggcttctcttcgtcagcttcgagagcctatcgtcaactggttaagttctcatccaaatccaccggtcgctctcatttctgatttcttccttggatggaccaaagatcttgagcatctcccgtctttaatccctcagtctccattatcgcaagatcttgaaagtgttaaagacagtaccatgaatttttcgagttatggttgtattttcaatacttgtgagtgtctggaagaggattacatggagtatgtgaagcagaaagtgagtgagaaccgcgttttcggtgttggtccgctttcttcagtcgggttaagtaaggaagattccgtatccaatgtagacgcaaaggcattgttgagttggctagatggatgtccagatgattcagtgctctacatctgcttcggaagtcaaaaggtgttaaccaaagagcagtgtgatgatctggctcttggtctcgagaagagtatgacccgattcgtatgggtggttaagaaagacccgataccggatgggtttgaggatcgggtcgcaggtcgaggaatgattgtgagagggtgggctcctcaagtggctatgttgagtcatgtggcggttggcgggttcttaatccattgtggatggaactcggtgctggaagcgatggctagcggaacaatgatcttggcatggccaatggaagcagaccagtttgtagatgcgaggttggtagtggagcatatgggtgtggcggttagtgtatgtgaagggggtaagactgtgcctgacccgtatgagatgggtcggattatcgctgacacaatgggtgagagtggaggcgaggcgcgtgctcgggctaaggagatgggatag

SEQ ID NO: 85831 - protein, 382 aa, Arabidopsis thaliana
  peptide (1)..(382): Ceres Seq. ID no. 12684121
  misc_feature (110)..(382): Homolog of NCBI NO: 15223779 NR Description: putative glucosyl transferase; protein id: [Arabidopsis thaliana] >gi|25286807|pir||H96549 hypothetical
  misc_feature (1)..(136): Homolog of NCBI NO: 15223779 NR Description: putative glucosyl transferase; protein id: [Arabidopsis thaliana] >gi|25286807|pir||H96549 hypothetical
  misc_feature (137)..(381): Homolog of NCBI NO: 15242769 NR Description: putative protein; protein id: At5g03490.1
  misc_feature (12)..(136): Homolog of NCBI NO: 15242769 NR Description: putative protein; protein id: At5g03490.1
  misc_feature (153)..(381): Homolog of NCBI NO: 22330612 NR Description: putative glucosyltransferase; protein id:
  misc_feature (153)..(381): Homolog of NCBI NO: 25406301 NR Description: protein glucosyltransferase F2P9.25 [imported] - thaliana >gi|12325153|gb|AAG52529.1|AC016662_23 putative
  misc_feature (14)..(136): Homolog of NCBI NO: 22330612 NR Description: putative glucosyltransferase; protein id:
  misc_feature (14)..(136): Homolog of NCBI NO: 25406301 NR Description: protein glucosyltransferase F2P9.25 [imported] - thaliana >gi|12325153|gb|AAG52529.1|AC016662_23 putative
  misc_feature (136)..(381): Homolog of NCBI NO: 2232354 NR Description: UDPG glucosyltransferase [Solanum berthaultii]
  misc_feature (16)..(136): Homolog of NCBI NO: 2232354 NR Description: UDPG glucosyltransferase [Solanum berthaultii]
MPQPRPETIRGSLKPHIMVFPYPAQGHLLPLLDLTHQLCLRGLTVSIIVTPKNLPYLSPLLSAHPSAVSVVTLPFPHHPLIPSGVENVKDLGGYGNPLIMASLRQLREPIVNWLSSHPNPPVALISDFFLGWTKDLEHLPSLIPQSPLSQDLESVKDSTMNFSSYGCIFNTCECLEEDYMEYVKQKVSENRVFGVGPLSSVGLSKEDSVSNVDAKALLSWLDGCPDDSVLYICFGSQKVLTKEQCDDLALGLEKSMTRFVWVVKKDPIPDGFEDRVAGRGMIVRGWAPQVAMLSHVAVGGFLIHCGWNSVLEAMASGTMILAWPMEADQFVDARLVVEHMGVAVSVCEGGKTVPDPYEMGRIIADTMGESGGEARARAKEMG

SEQ ID NO: 85832 - protein, 365 aa, Arabidopsis thaliana
  peptide (1)..(365): Ceres Seq. ID no. 12684122
  misc_feature (93)..(365): Homolog of NCBI NO: 15223779 NR Description: putative glucosyl transferase; protein id: [Arabidopsis thaliana] >gi|25286807|pir||H96549 hypothetical
  misc_feature (1)..(119): Homolog of NCBI NO: 15223779 NR Description: putative glucosyl transferase; protein id: [Arabidopsis thaliana] >gi|25286807|pir||H96549 hypothetical
  misc_feature (120)..(364): Homolog of NCBI NO: 15242769 NR Description: putative protein; protein id: At5g03490.1
  misc_feature (1)..(119): Homolog of NCBI NO: 15242769 NR Description: putative protein; protein id: At5g03490.1
  misc_feature (136)..(364): Homolog of NCBI NO: 22330612 NR Description: putative glucosyltransferase; protein id:
  misc_feature (136)..(364): Homolog of NCBI NO: 25406301 NR Description: protein glucosyltransferase F2P9.25 [imported] - thaliana >gi|12325153|gb|AAG52529.1|AC016662_23 putative
  misc_feature (1)..(119): Homolog of NCBI NO: 22330612 NR Description: putative glucosyltransferase; protein id:
  misc_feature (1)..(119): Homolog of NCBI NO: 25406301 NR Description: protein glucosyltransferase F2P9.25 [imported] - thaliana >gi|12325153|gb|AAG52529.1|AC016662_23 putative
  misc_feature (119)..(364): Homolog of NCBI NO: 2232354 NR Description: UDPG glucosyltransferase [Solanum berthaultii]
  misc_feature (1)..(119): Homolog of NCBI NO: 2232354 NR Description: UDPG glucosyltransferase [Solanum berthaultii]
MVFPYPAQGHLLPLLDLTHQLCLRGLTVSIIVTPKNLPYLSPLLSAHPSAVSVVTLPFPHHPLIPSGVENVKDLGGYGNPLIMASLRQLREPIVNWLSSHPNPPVALISDFFLGWTKDLEHLPSLIPQSPLSQDLESVKDSTMNFSSYGCIFNTCECLEEDYMEYVKQKVSENRVFGVGPLSSVGLSKEDSVSNVDAKALLSWLDGCPDDSVLYICFGSQKVLTKEQCDDLALGLEKSMTRFVWVVKKDPIPDGFEDRVAGRGMIVRGWAPQVAMLSHVAVGGFLIHCGWNSVLEAMASGTMILAWPMEADQFVDARLVVEHMGVAVSVCEGGKTVPDPYEMGRIIADTMGESGGEARARAKEMG

SEQ ID NO: 85833 - protein, 283 aa, Arabidopsis thaliana
  peptide (1)..(283): Ceres Seq. ID no. 12684123
  misc_feature (11)..(283): Homolog of NCBI NO: 15223779 NR Description: putative glucosyl transferase; protein id: [Arabidopsis thaliana] >gi|25286807|pir||H96549 hypothetical
  misc_feature (1)..(37): Homolog of NCBI NO: 15223779 NR Description: putative glucosyl transferase; protein id: [Arabidopsis thaliana] >gi|25286807|pir||H96549 hypothetical
  misc_feature (38)..(282): Homolog of NCBI NO: 15242769 NR Description: putative protein; protein id: At5g03490.1
  misc_feature (1)..(37): Homolog of NCBI NO: 15242769 NR Description: putative protein; protein id: At5g03490.1
  misc_feature (54)..(282): Homolog of NCBI NO: 22330612 NR Description: putative glucosyltransferase; protein id:
  misc_feature (54)..(282): Homolog of NCBI NO: 25406301 NR Description: protein glucosyltransferase F2P9.25 [imported] - thaliana >gi|12325153|gb|AAG52529.1|AC016662_23 putative
  misc_feature (1)..(37): Homolog of NCBI NO: 22330612 NR Description: putative glucosyltransferase; protein id:
  misc_feature (1)..(37): Homolog of NCBI NO: 25406301 NR Description: protein glucosyltransferase F2P9.25 [imported] - thaliana >gi|12325153|gb|AAG52529.1|AC016662_23 putative
  misc_feature (37)..(282): Homolog of NCBI NO: 2232354 NR Description: UDPG glucosyltransferase [Solanum berthaultii]
  misc_feature (1)..(37): Homolog of NCBI NO: 2232354 NR Description: UDPG glucosyltransferase [Solanum berthaultii]
MASLRQLREPIVNWLSSHPNPPVALISDFFLGWTKDLEHLPSLIPQSPLSQDLESVKDSTMNFSSYGCIFNTCECLEEDYMEYVKQKVSENRVFGVGPLSSVGLSKEDSVSNVDAKALLSWLDGCPDDSVLYICFGSQKVLTKEQCDDLALGLEKSMTRFVWVVKKDPIPDGFEDRVAGRGMIVRGWAPQVAMLSHVAVGGFLIHCGWNSVLEAMASGTMILAWPMEADQFVDARLVVEHMGVAVSVCEGGKTVPDPYEMGRIIADTMGESGGEARARAKEMG

SEQ ID NO: 85834 - DNA, 1287 bp, Arabidopsis thaliana
  misc_feature (1)..(1287): Ceres Seq. ID no. 12684146
  misc_feature: MA Experiment ID: 20000180 Result: Up-regulated in Transcription
  misc_feature: MA Experiment 20000180 PARAMETER Experiment Name: At_Germinating_Seeds_P Parameter: Age (hr) Value: 24 vs. 0
  misc_feature: MA Experiment 20000180 PARAMETER Experiment Name: At_Germinating_Seeds_P Parameter: Tissue Value: Germinating Seeds
  misc_feature: MA Experiment ID: 20000185 Result: Up-regulated in Transcription
  misc_feature: MA Experiment 20000185 PARAMETER Experiment Name: At_Roots__P Parameter: Age (day) Value: 7 vs. 21
  misc_feature: MA Experiment 20000185 PARAMETER Experiment Name: At_Roots__P Parameter: Organism Value: A. thaliana
  misc_feature: MA Experiment 20000185 PARAMETER Experiment Name: At_Roots__P Parameter: Tissue Value: Roots vs. Whole Plant
  misc_feature: MA Experiment ID: 20000227 Result: Up-regulated in Transcription
  misc_feature: MA Experiment 20000227 PARAMETER Experiment Name: At_Root-Tips-vs-Tops_P Parameter: Tissue Value: Root Tips vs. Root Tops
  misc_feature: MA Experiment ID: 20000264 Result: Up-regulated in Transcription
  misc_feature: MA Experiment 20000264 PARAMETER Experiment Name: At_Open_Flower_P Parameter: Age (day) Value: 21
  misc_feature: MA Experiment 20000264 PARAMETER Experiment Name: At_Open_Flower_P Parameter: Plant Line Value: WS
  misc_feature: MA Experiment 20000264 PARAMETER Experiment Name: At_Open_Flower_P Parameter: Tissue Value: Open Flower vs. Whole Plant
  misc_feature: MA Experiment ID: 20000265 Result: Up-regulated in Transcription
  misc_feature: MA Experiment 20000265 PARAMETER Experiment Name: At_Open_Flower_P Parameter: Age (day) Value: 21
  misc_feature: MA Experiment 20000265 PARAMETER Experiment Name: At_Open_Flower_P Parameter: Plant Line Value: WS
  misc_feature: MA Experiment 20000265 PARAMETER Experiment Name: At_Open_Flower_P Parameter: Tissue Value: Closed Flower vs. Whole Plant
  misc_feature: MA Experiment ID: 20000286 Result: Up-regulated in Transcription
  misc_feature: MA Experiment 20000286 PARAMETER Experiment Name: At_Open_Flower_P Parameter: Age (day) Value: 21
  misc_feature: MA Experiment 20000286 PARAMETER Experiment Name: At_Open_Flower_P Parameter: Plant Line Value: WS
  misc_feature: MA Experiment 20000286 PARAMETER Experiment Name: At_Open_Flower_P Parameter: Tissue Value: Half Open vs. Whole Plant
  misc_feature: MA Experiment ID: 20000439 Result: Up-regulated in Transcription
  misc_feature: MA Experiment 20000439 PARAMETER Experiment Name: At_Roots__P Parameter: Age (day) Value: 14 vs. 21
  misc_feature: MA Experiment 20000439 PARAMETER Experiment Name: At_Roots__P Parameter: Organism Value: A. thaliana
  misc_feature: MA Experiment 20000439 PARAMETER Experiment Name: At_Roots__P Parameter: Tissue Value: Roots vs. Whole Plant
  misc_feature: MA Experiment ID: 20000527 Result: Down-regulated in Transcription
  misc_feature: MA Experiment 20000527 PARAMETER Experiment Name: At_10percent_PEG_P Parameter: Age (day) Value: 20
  misc_feature: MA Experiment 20000527 PARAMETER Experiment Name: At_10percent_PEG_P Parameter: Organism Value: A. thaliana
  misc_feature: MA Experiment 20000527 PARAMETER Experiment Name: At_10percent_PEG_P Parameter: Plant Line Value: WS
  misc_feature: MA Experiment 20000527 PARAMETER Experiment Name: At_10percent_PEG_P Parameter: Timepoint (day) Value: 20
  misc_feature: MA Experiment 20000527 PARAMETER Experiment Name: At_10percent_PEG_P Parameter: Tissue Value: Whole Plant
  misc_feature: MA Experiment 20000527 PARAMETER Experiment Name: At_10percent_PEG_P Parameter: Treatment Value: 10percent PEG vs. No Treatment
  misc_feature: MA Experiment ID: 20000794 Result: Up-regulated in Transcription
  misc_feature: MA Experiment 20000794 PARAMETER Experiment Name: At_Petals_P Parameter: Age (day) Value: 23-25 days
  misc_feature: MA Experiment 20000794 PARAMETER Experiment Name: At_Petals_P Parameter: Plant Line Value: WS
  misc_feature: MA Experiment 20000794 PARAMETER Experiment Name: At_Petals_P Parameter: Tissue Value: Petals vs. Whole plant
  misc_feature: MA Experiment ID: 20001556 Result: Up-regulated in Transcription
  misc_feature: MA Experiment 20001556 PARAMETER Experiment Name: At_Drought_Soil_Dry_P Parameter: Age (day) Value: 26
  misc_feature: MA Experiment 20001556 PARAMETER Experiment Name: At_Drought_Soil_Dry_P Parameter: Organism Value: A. thaliana
  misc_feature: MA Experiment 20001556 PARAMETER Experiment Name: At_Drought_Soil_Dry_P Parameter: Plant Line Value: WS
  misc_feature: MA Experiment 20001556 PARAMETER Experiment Name: At_Drought_Soil_Dry_P Parameter: Post Timepoint (hr) Value: None
  misc_feature: MA Experiment 20001556 PARAMETER Experiment Name: At_Drought_Soil_Dry_P Parameter: Post-Treatment Value: None
  misc_feature: MA Experiment 20001556 PARAMETER Experiment Name: At_Drought_Soil_Dry_P Parameter: Timepoint (day) Value: 12
  misc_feature: MA Experiment 20001556 PARAMETER Experiment Name: At_Drought_Soil_Dry_P Parameter: Treatment Value: Drought vs. No Drought
  misc_feature: MA Experiment ID: 20001558 Result: Up-regulated in Transcription
  misc_feature: MA Experiment 20001558 PARAMETER Experiment Name: At_Drought_Soil_Dry_P Parameter: Age (day) Value: 27
  misc_feature: MA Experiment 20001558 PARAMETER Experiment Name: At_Drought_Soil_Dry_P Parameter: Organism Value: A. thaliana
  misc_feature: MA Experiment 20001558 PARAMETER Experiment Name: At_Drought_Soil_Dry_P Parameter: Plant Line Value: WS
  misc_feature: MA Experiment 20001558 PARAMETER Experiment Name: At_Drought_Soil_Dry_P Parameter: Post Timepoint (hr) Value: 6
  misc_feature: MA Experiment 20001558 PARAMETER Experiment Name: At_Drought_Soil_Dry_P Parameter: Post-Treatment Value: Re-Water vs. No Drought
  misc_feature: MA Experiment 20001558 PARAMETER Experiment Name: At_Drought_Soil_Dry_P Parameter: Timepoint (day) Value: 13
  misc_feature: MA Experiment 20001558 PARAMETER Experiment Name: At_Drought_Soil_Dry_P Parameter: Treatment Value: Drought vs. No Drought
  misc_feature: MA Experiment ID: 20001904 Result: Up-regulated in Transcription
  misc_feature: MA Experiment 20001904 PARAMETER Experiment Name: At_Drought_Reproduction_P Parameter: Age (day) Value: 37
  misc_feature: MA Experiment 20001904 PARAMETER Experiment Name: At_Drought_Reproduction_P Parameter: Organism Value: A. thaliana
  misc_feature: MA Experiment 20001904 PARAMETER Experiment Name: At_Drought_Reproduction_P Parameter: Plant Line Value: WS
  misc_feature: MA Experiment 20001904 PARAMETER Experiment Name: At_Drought_Reproduction_P Parameter: Timepoint (day) Value: 7
  misc_feature: MA Experiment 20001904 PARAMETER Experiment Name: At_Drought_Reproduction_P Parameter: Tissue Value: Rosettes
  misc_feature: MA Experiment 20001904 PARAMETER Experiment Name: At_Drought_Reproduction_P Parameter: Treatment Value: Drought vs. No Drought
atggcaattccaaaagctcactactctttagcagttcttgtccttctctttgtcgtcgtttcgagtagccaaaaaattgaaggtgcagcacatagagcacttaatggatgggactatttcacgcatagatatccagaaaaagtaccggatcgtagttcagcagatcttgcttgtgattcgtatgatctttataaggatgatgtcaaactgctaaaaagaatgaatgttcaagcataccgtctctcgatagcatggtcaagggtcttaccaaagggaagactgactgggggagtggacgagaatgggataacatactacaacaatctcattaacgagttgaaagcaaatggcatagaaccatatgttactatatttcattgggatgttccccagactttagaagacgaatatggaggcttcttaagcacacgtatagtggaggactacacaaactacgctgagcttctattccaaagattcggagacagggtcaaattttggatcactttaaatcagcctctctctcttgcactcaaaggctatggaaatggatcttatccaccaggacggtgcaccggctgtgaacttggaggagattctggagttgaaccttatacagttgcacataaccaacttctagctcatgcaaaaactgtctctttatacagaaaaagatatcagaaatttcaaggtggtaagataggaacaaccttgatcgggagatggttcgtcccgctaaatgaatttagtgaactcgacaaggctgctgcaaaacgagcattcgacttttttgttggatggttcttggatccattggtgtacggaaaatatccaacaataatgagagagatggtaggagatagattgccagaattcacacctgaggaatcagctttagttaaaggatcacttgattttctagggttgaactattacgtttcacaatatgcaactgacgcacctcctccgacacaacctaatgcaataacggatgcacgagttactcttggattttaccgcaatggaagtcctattggtgttgcttctagcttcgtctactatcctccaggattccgtcagattctaaactacatcaaagacaactacaaaaatccacttacctacatcaccgaaaacggatattttgcatggtcattgatggacaattacgaattcggaaatggttacaccctccggtttggtatgaattgggtcaacttcactaatcctgctgatcgtaaagagaaagcttctggaaaatggttctctaagttcctcgcaaaataa

SEQ ID NO: 85835 - protein, 428 aa, Arabidopsis thaliana
  peptide (1)..(428): Ceres Seq. ID no. 12684147
  misc_feature (17)..(380): Pfam Name: Glycosyl hydrolase family 1 Pfam Description: Glycosyl hydrolase family 1
  misc_feature (17)..(380): Homolog of NCBI NO: 30694982 NR Description: glycosyl hydrolase family 1 [Arabidopsis thaliana]
  misc_feature (380)..(428): Homolog of NCBI NO: 30694982 NR Description: glycosyl hydrolase family 1 [Arabidopsis thaliana]
  misc_feature (1)..(26): Homolog of NCBI NO: 30694982 NR Description: glycosyl hydrolase family 1 [Arabidopsis thaliana]
  misc_feature (17)..(380): Homolog of NCBI NO: 30694106 NR Description: glycosyl hydrolase family 1 [Arabidopsis >gi|23306442|gb|AAN17448.1| thioglucosidase, putative thaliana] >gi|25084292|gb|AAN72213.1| thioglucosidase, putative
  misc_feature (380)..(428): Homolog of NCBI NO: 30694106 NR Description: glycosyl hydrolase family 1 [Arabidopsis >gi|23306442|gb|AAN17448.1| thioglucosidase, putative thaliana] >gi|25084292|gb|AAN72213.1| thioglucosidase, putative
  misc_feature (1)..(26): Homolog of NCBI NO: 30694106 NR Description: glycosyl hydrolase family 1 [Arabidopsis >gi|23306442|gb|AAN17448.1| thioglucosidase, putative thaliana] >gi|25084292|gb|AAN72213.1| thioglucosidase, putative
  misc_feature (17)..(380): Homolog of NCBI NO: 25289450 NR Description: hypothetical protein F16N3.11 [imported] - thaliana >gi|5668800|gb|AAD46026.1|AC007519_11 Similar to
  misc_feature (380)..(428): Homolog of NCBI NO: 25289450 NR Description: hypothetical protein F16N3.11 [imported] - thaliana >gi|5668800|gb|AAD46026.1|AC007519_11 Similar to
  misc_feature (1)..(26): Homolog of NCBI NO: 25289450 NR Description: hypothetical protein F16N3.11 [imported] - thaliana >gi|5668800|gb|AAD46026.1|AC007519_11 Similar to
  misc_feature (1)..(380): Homolog of NCBI NO: 25289451 NR Description: probable myrosinase precursor 53323-50499 - Arabidopsis thaliana >gi|12325369|gb|AAG52628.1|AC024261_15
MAIPKAHYSLAVLVLLFVVVSSSQKIEGAAHRALNGWDYFTHRYPEKVPDRSSADLACDSYDLYKDDVKLLKRMNVQAYRLSIAWSRVLPKGRLTGGVDENGITYYNNLINELKANGIEPYVTIFHWDVPQTLEDEYGGFLSTRIVEDYTNYAELLFQRFGDRVKFWITLNQPLSLALKGYGNGSYPPGRCTGCELGGDSGVEPYTVAHNQLLAHAKTVSLYRKRYQKFQGGKIGTTLIGRWFVPLNEFSELDKAAAKRAFDFFVGWFLDPLVYGKYPTIMREMVGDRLPEFTPEESALVKGSLDFLGLNYYVSQYATDAPPPTQPNAITDARVTLGFYRNGSPIGVASSFVYYPPGFRQILNYIKDNYKNPLTYITENGYFAWSLMDNYEFGNGYTLRFGMNWVNFTNPADRKEKASGKWFSKFLAK

SEQ ID NO: 85836 - protein, 355 aa, Arabidopsis thaliana
  peptide (1)..(355): Ceres Seq. ID no. 12684148
  misc_feature (1)..(307): Pfam Name: Glycosyl hydrolase family 1 Pfam Description: Glycosyl hydrolase family 1
  misc_feature (1)..(307): Homolog of NCBI NO: 30694982 NR Description: glycosyl hydrolase family 1 [Arabidopsis thaliana]
  misc_feature (307)..(355): Homolog of NCBI NO: 30694982 NR Description: glycosyl hydrolase family 1 [Arabidopsis thaliana]
  misc_feature (1)..(307): Homolog of NCBI NO: 30694106 NR Description: glycosyl hydrolase family 1 [Arabidopsis >gi|23306442|gb|AAN17448.1| thioglucosidase, putative thaliana] >gi|25084292|gb|AAN72213.1| thioglucosidase, putative
  misc_feature (307)..(355): Homolog of NCBI NO: 30694106 NR Description: glycosyl hydrolase family 1 [Arabidopsis >gi|23306442|gb|AAN17448.1| thioglucosidase, putative thaliana] >gi|25084292|gb|AAN72213.1| thioglucosidase, putative
  misc_feature (1)..(307): Homolog of NCBI NO: 25289450 NR Description: hypothetical protein F16N3.11 [imported] - thaliana >gi|5668800|gb|AAD46026.1|AC007519_11 Similar to
  misc_feature (307)..(355): Homolog of NCBI NO: 25289450 NR Description: hypothetical protein F16N3.11 [imported] - thaliana >gi|5668800|gb|AAD46026.1|AC007519_11 Similar to
  misc_feature (1)..(307): Homolog of NCBI NO: 25289451 NR Description: probable myrosinase precursor 53323-50499 - Arabidopsis thaliana >gi|12325369|gb|AAG52628.1|AC024261_15
  misc_feature (307)..(355): Homolog of NCBI NO: 25289451 NR Description: probable myrosinase precursor 53323-50499 - Arabidopsis thaliana >gi|12325369|gb|AAG52628.1|AC024261_15
  misc_feature (1)..(355): Homolog of NCBI NO: 15217941 NR Description: glycosyl hydrolase family 1; protein id: [Arabidopsis thaliana] >gi|25289505|pir||C96553 hypothetical
  misc_feature (1)..(307): Homolog of NCBI NO: 38344470 NR Description: OSJNBa0022H21.5 [Oryza sativa (japonica
MNVQAYRLSIAWSRVLPKGRLTGGVDENGITYYNNLINELKANGIEPYVTIFHWDVPQTLEDEYGGFLSTRIVEDYTNYAELLFQRFGDRVKFWITLNQPLSLALKGYGNGSYPPGRCTGCELGGDSGVEPYTVAHNQLLAHAKTVSLYRKRYQKFQGGKIGTTLIGRWFVPLNEFSELDKAAAKRAFDFFVGWFLDPLVYGKYPTIMREMVGDRLPEFTPEESALVKGSLDFLGLNYYVSQYATDAPPPTQPNAITDARVTLGFYRNGSPIGVASSFVYYPPGFRQILNYIKDNYKNPLTYITENGYFAWSLMDNYEFGNGYTLRFGMNWVNFTNPADRKEKASGKWFSKFLAK

SEQ ID NO: 85837 - DNA, 3309 bp, Arabidopsis thaliana
  misc_feature (1)..(3309): Ceres Seq. ID no. 12684160
  misc_feature: MA Experiment ID: 20001451 Result: Down-regulated in Transcription
  misc_feature: MA Experiment 20001451 PARAMETER Experiment Name: At_Far-red-induction_P Parameter: Age (day) Value: 7
  misc_feature: MA Experiment 20001451 PARAMETER Experiment Name: At_Far-red-induction_P Parameter: Light Value: Far-red vs. White
  misc_feature: MA Experiment 20001451 PARAMETER Experiment Name: At_Far-red-induction_P Parameter: Organism Value: A. thaliana
  misc_feature: MA Experiment 20001451 PARAMETER Experiment Name: At_Far-red-induction_P Parameter: Plant Line Value: Columbia
  misc_feature: MA Experiment 20001451 PARAMETER Experiment Name: At_Far-red-induction_P Parameter: Timepoint (hr) Value: 24
  misc_feature: MA Experiment 20001451 PARAMETER Experiment Name: At_Far-red-induction_P Parameter: Tissue Value: Whole Plant
atggattcaagtaaagagagtagcttgattgaaacccattttctaaaaccctatgtaacctccattgatggtgctgtagcagagcttcctcgtcaccgtctctctgtttcttcatcagacctaaatgagtcgttttctaggatttctttcaatgggttttggtctgcacaacccaatttcaaatcatgggctaaaaaaatggaagctttgcacgaacccatttggagaaaagctgggatttttgaggcaataaaggcatcgatgtacaaaatccgtaaaaatcagtctttgcttctagctcttgttgagaaatggtgtcctgaaaccaaatctttcctcttcccttggggtgaagcaacgataacgcttgaggatgtgcttgtgcttttagggttttctgttcagggttctcctgtttttgcccctttagaaagctcagagatgagagattccgtagagaaactggagaaagctagattggagaatagaggccaggatgggctagtgagacaaaacttatgggtttcgagcttcttgggtagaggtgatcaaatggagcatgaagcttttcttgcattttggctttcgcagttcgtttttccggatatgtgtcgtcgttctatttcgacaaaagttctccctatggctgttcgtttagctagaggcgaaaggattgcttttgctcctgctgttctagctagactatacagagatttgggtcaaattcaagcgtctgctagagaaaagtccactccaaatgtcactctgaaatcactgtttaagttagtccaactctgggcatgggagagattcaagagtaccagtccaaaagctagagtgataccaaaaggtgaacctaggatatctcggtggcactcacaaacatctaagaatgtgagattgaatcttgttgattttgattggcgtccttacactaaacctttacagatttggaaccctcctcggttttaccctgaagaagctatgtggatgactgttgatgacaatcttgatgatggattcgtttcctttgctcgatgtatgagagtttctcagcttgttggggttggtattgtggaggattactatccaaaccgagtggcaatgcagttcgggctggctcaagatcttcctggtttggttactgatcatagcagcttcacagaaaaagaagcatgggatggttacaataagtctcttgatggtttaatgctttacataccttctcgtgtcgctacgacttctgttactgaaagatatcgtgactggtggttgaaatctatttcaaagttttttctggattcttcagaatcaactgaaacgtttgatgcaagtaacacaattgatcattatgataataatgatgaggatgatgagctactgcctttgggtcaagtgcttcagaattttggagagagctttcttaagaaactcgaaagatgtagggcgcgtaggctagctaaaaatcatcgattcaagataaataaagacaagattggtgatggtggtgcatcagcttcaacagaattaccacttagtcagttgtttaaaaaggaggtgatgaagagaacaagtgagcatttgaaaaacaagggacggaagcgagctcgtgaggatgatgtaagttctatggatcacaaagatgatgacgttaccatcgctcagatgatcaaatctagaaggaatgatgaatgtggaagcaaaggaaagaagagtagtatggttcaaagaccatctaacgaaaacaactcttcagatcctcttgttgattctaatggaggtataattgacatttctgtgtcaccatcagagacaaggcaaacgtgtgatgatgagcttcatgtagatagaagcaagaaagaagagttggtccatgaagatgaagaaaagcaaagaagcaatgagaatttgtgcagtgaagctgagaaagaagaagatattgatgaaagattgaaacagagaaagcttgctatagaggagatagcattgaagctggagacacgtgttatggaggttgagaagaggttatgtcaaggtagaagagacagaacaaagatagatatggtaaggaagcagaagtacgggaaggtagtgttggtttcttgcatcgcgcttctagcaaccggactcattgccgactttctctgggctacttctcatcgattctcctccgccgcaatctccgccggattatctctaccttcttcacttaccaccgtaatcgttcctggccaggagaaagatacaaagaagaagaaggatagtgtgaaggaaaggaaactgtctaatacgtttcaagatttgcctgctcctgaattgaaatgggagaagatggcagcttcacctgtacctcgtctagacggagctgcaattcagattagggatcttctttatgtatttgctggatatggaaccattgatcttgtgcattcacatgtcgatatctacaatttcactgataactcgtggggaggaagattcaatatgccaaaagatatggcgcattctcatttagggatggtaacggatgggcgatacatttatattgttactggtcagtttggtccacaatgcagaggtcctacagctaaaacatttgtgcttgatactgatacaaatacatggaaggactttgttcctttaccagttcctaggtatgcaccagctactcagctttggagaggaagacttcatgtgatgggtggaagcaaagagaatcgatttacaccaggacttgaacattggagcatcgcagtgaaagatggcaaatctttggaaaatgagtggagaagtgaaatcccgatccctcgtggaggacctcacagggcatgtgtagtagttgatgaccgactatttgtaattggtggtcaagaaggtgatttcatggctaaacctggatctccaatcttcaaatgctcacgccgtatggaggtggtattcagtgatgtctacatgttggatgaggaaatgaaatggaaagttatgccgccgatgccaaaaccggactcccatatcgaatttgcttggaaagtcgttaataactccattgtaatcgttggaggcacaacagagaaacatcctgaaaccaaaaagatggttctcgttggtgaaatcttccagttcaacttaaatacactgaaatggtatgtgattgggaaattaccataccgtgtgaagacaacgctggctgggtattgggatggacagttatacttcacctcaggacaaagagacaaaggtccagatgatcccgccccgaggaaggtcatggcagagatgtggagaaccaaattgatactcaacccatga

SEQ ID NO: 85838 - protein, 1102 aa, Arabidopsis thaliana
  peptide (1)..(1102): Ceres Seq. ID no. 12684161
  misc_feature (938)..(999): Pfam Name: Kelch motif Pfam Description: Kelch motif
  misc_feature (688)..(1102): Homolog of NCBI NO: 28416695 NR Description: At1g51540 [Arabidopsis thaliana]
  misc_feature (9)..(685): Homolog of NCBI NO: 15238856 NR Description: putative protein; protein id: At5g18510.1
  misc_feature (697)..(1100): Homolog of NCBI NO: 29150199 NR Description: hypothetical protein [Oryza sativa (indica
  misc_feature (697)..(1100): Homolog of NCBI NO: 38344229 NR Description: OJ991113_30.6 [Oryza sativa (japonica
  misc_feature (1)..(628): Homolog of NCBI NO: 15223656 NR Description: hypothetical protein; protein id: At1g50830.1
  misc_feature (704)..(1098): Homolog of NCBI NO: 18405273 NR Description: expressed protein; protein id: At3g27220.1, by cDNA: gi_15081754, supported by cDNA: gi_15912244 [Arabidopsis >gi|9294215|dbj|BAB02117.1| gene_id:K17E12.4~unknown protein
  misc_feature (704)..(1098): Homolog of NCBI NO: 15912245 NR Description: AT3g27220/K17E12_4 [Arabidopsis thaliana]
  misc_feature (11)..(586): Homolog of NCBI NO: 22328697 NR Description: hypothetical protein; protein id: At4g16050.1, by cDNA: gi_19699014 [Arabidopsis thaliana] unknown protein [Arabidopsis thaliana]
  misc_feature (68)..(586): Homolog of NCBI NO: 7485155 NR Description: hypothetical protein d14065w - Arabidopsis >gi|2244963|emb|CAB10384.1| hypothetical protein [Arabidopsis >gi|7268354|emb|CAB78647.1| hypothetical protein [Arabidopsis
  misc_feature (2)..(630): Homolog of NCBI NO: 15223653 NR Description: hypothetical protein; protein id: At1g50790.1
MDSSKESSLIETHFLKPYVTSIDGAVAELPRHRLSVSSSDLNESFSRISFNGFWSAQPNFKSWAKKMEALHEPIWRKAGIFEAIKASMYKIRKNQSLLLALVEKWCPETKSFLFPWGEATITLEDVLVLLGFSVQGSPVFAPLESSEMRDSVEKLEKARLENRGQDGLVRQNLWVSSFLGRGDQMEHEAFLAFWLSQFVFPDMCRRSISTKVLPMAVRLARGERIAFAPAVLARLYRDLGQIQASAREKSTPNVTLKSLFKLVQLWAWERFKSTSPKARVIPKGEPRISRWHSQTSKNVRLNLVDFDWRPYTKPLQIWNPPRFYPEEAMWMTVDDNLDDGFVSFARCMRVSQLVGVGIVEDYYPNRVAMQFGLAQDLPGLVTDHSSFTEKEAWDGYNKSLDGLMLYIPSRVATTSVTERYRDWWLKSISKFFLDSSESTETFDASNTIDHYDNNDEDDELLPLGQVLQNFGESFLKKLERCRARRLAKNHRFKINKDKIGDGGASASTELPLSQLFKKEVMKRTSEHLKNKGRKRAREDDVSSMDHKDDDVTIAQMIKSRRNDECGSKGKKSSMVQRPSNENNSSDPLVDSNGGIIDISVSPSETRQTCDDELHVDRSKKEELVHEDEEKQRSNENLCSEAEKEEDIDERLKQRKLAIEEIALKLETRVMEVEKRLCQGRRDRTKIDMVRKQKYGKVVLVSCIALLATGLIADFLWATSHRFSSAAISAGLSLPSSLTTVIVPGQEKDTKKKKDSVKERKLSNTFQDLPAPELKWEKMAASPVPRLDGAAIQIRDLLYVFAGYGTIDLVHSHVDIYNFTDNSWGGRFNMPKDMAHSHLGMVTDGRYIYIVTGQFGPQCRGPTAKTFVLDTDTNTWKDFVPLPVPRYAPATQLWRGRLHVMGGSKENRFTPGLEHWSIAVKDGKSLENEWRSEIPIPRGGPHRACVVVDDRLFVIGGQEGDFMAKPGSPIFKCSRRMEVVFSDVYMLDEEMKWKVMPPMPKPDSHIEFAWKVVNNSIVIVGGTTEKHPETKKMVLVGEIFQFNLNTLKWYVIGKLPYRVKTTLAGYWDGQLYFTSGQRDKGPDDPAPRKVMAEMWRTKLILNP

SEQ ID NO: 85839 - protein, 1036 aa, Arabidopsis thaliana; identical to SEQ ID NO: 71539
  peptide (1)..(1036): Ceres Seq. ID no. 12684162
  misc_feature (872)..(933): Pfam Name: Kelch motif Pfam Description: Kelch motif
  misc_feature (622)..(1036): Homolog of NCBI NO: 28416695 NR Description: At1g51540 [Arabidopsis thaliana]
  misc_feature (1)..(619): Homolog of NCBI NO: 15238856 NR Description: putative protein; protein id: At5g18510.1
  misc_feature (631)..(1034): Homolog of NCBI NO: 29150199 NR Description: hypothetical protein [Oryza sativa (indica
  misc_feature (631)..(1034): Homolog of NCBI NO: 38344229 NR Description: OJ991113_30.6 [Oryza sativa (japonica
  misc_feature (1)..(562): Homolog of NCBI NO: 15223656 NR Description: hypothetical protein; protein id: At1g50830.1
  misc_feature (638)..(1032): Homolog of NCBI NO: 18405273 NR Description: expressed protein; protein id: At3g27220.1, by cDNA: gi_15081754, supported by cDNA: gi_15912244 [Arabidopsis >gi|9294215|dbj|BAB02117.1| gene_id:K17E12.4~unknown protein
  misc_feature (638)..(1032): Homolog of NCBI NO: 15912245 NR Description: AT3g27220/K17E12_4 [Arabidopsis thaliana]
  misc_feature (1)..(520): Homolog of NCBI NO: 22328697 NR Description: hypothetical protein; protein id: At4g16050.1, by cDNA: gi_19699014 [Arabidopsis thaliana] unknown protein [Arabidopsis thaliana]
  misc_feature (2)..(520): Homolog of NCBI NO: 7485155 NR Description: hypothetical protein d14065w - Arabidopsis >gi|2244963|emb|CAB10384.1| hypothetical protein [Arabidopsis >gi|7268354|emb|CAB78647.1| hypothetical protein [Arabidopsis
  misc_feature (1)..(564): Homolog of NCBI NO: 15223653 NR Description: hypothetical protein; protein id: At1g50790.1

SEQ ID NO: 85840 - protein, 1015 aa, Arabidopsis thaliana; identical to SEQ ID NO: 71540
  peptide (1)..(1015): Ceres Seq. ID no. 12684163
  misc_feature (851)..(912): Pfam Name: Kelch motif Pfam Description: Kelch motif
  misc_feature (601)..(1015): Homolog of NCBI NO: 28416695 NR Description: At1g51540 [Arabidopsis thaliana]
  misc_feature (1)..(598): Homolog of NCBI NO: 15238856 NR Description: putative protein; protein id: At5g18510.1
  misc_feature (610)..(1013): Homolog of NCBI NO: 29150199 NR Description: hypothetical protein [Oryza sativa (indica
  misc_feature (610)..(1013): Homolog of NCBI NO: 38344229 NR Description: OJ991113_30.6 [Oryza sativa (japonica
  misc_feature (1)..(541): Homolog of NCBI NO: 15223656 NR Description: hypothetical protein; protein id: At1g50830.1
  misc_feature (617)..(1011): Homolog of NCBI NO: 18405273 NR Description: expressed protein; protein id: At3g27220.1, by cDNA: gi_15081754, supported by cDNA: gi_15912244 [Arabidopsis >gi|9294215|dbj|BAB02117.1| gene_id:K17E12.4~unknown protein
  misc_feature (617)..(1011): Homolog of NCBI NO: 15912245 NR Description: AT3g27220/K17E12_4 [Arabidopsis thaliana]
  misc_feature (1)..(499): Homolog of NCBI NO: 22328697 NR Description: hypothetical protein; protein id: At4g16050.1, by cDNA: gi_19699014 [Arabidopsis thaliana] unknown protein [Arabidopsis thaliana]
  misc_feature (1)..(499): Homolog of NCBI NO: 7485155 NR Description: hypothetical protein d14065w - Arabidopsis >gi|2244963|emb|CAB10384.1| hypothetical protein [Arabidopsis >gi|7268354|emb|CAB78647.1| hypothetical protein [Arabidopsis
  misc_feature (1)..(543): Homolog of NCBI NO: 15223653 NR Description: hypothetical protein; protein id: At1g50790.1

SEQ ID NO: 85841 - DNA, 1343 bp, Arabidopsis thaliana
  misc_feature (1)..(1343): Ceres Seq. ID no. 12684172
  misc_feature: MA Experiment ID: 108463 Result: Down-regulated in Transcription
  misc_feature: MA Experiment 108463 PARAMETER Experiment Name: At_Germinating_Seeds_cDNA_P Parameter: Age (day) Value: 3 vs. 0
  misc_feature: MA Experiment 108463 PARAMETER Experiment Name: At_Germinating_Seeds_cDNA_P Parameter: Tissue Value: Germinating Seeds
  misc_feature: MA Experiment ID: 108464 Result: Down-regulated in Transcription
  misc_feature: MA Experiment 108464 PARAMETER Experiment Name: At_Germinating_Seeds_cDNA_P Parameter: Age (day) Value: 4 vs. 0
  misc_feature: MA Experiment 108464 PARAMETER Experiment Name: At_Germinating_Seeds_cDNA_P Parameter: Tissue Value: Germinating Seeds
  misc_feature: MA Experiment ID: 20000180 Result: Down-regulated in Transcription
  misc_feature: MA Experiment 20000180 PARAMETER Experiment Name: At_Germinating_Seeds_P Parameter: Age (hr) Value: 24 vs. 0
  misc_feature: MA Experiment 20000180 PARAMETER Experiment Name: At_Germinating_Seeds_P Parameter: Tissue Value: Germinating Seeds
gtctctttagcccccactggttcgtctctttcttcgatttctctttctatctggtttccattttcgtctcgttggtgttctggtgggtttggtttgtctctgttcttctatttgtggcgttatccatcggttcaattgtcatcttcatcgtttccgtcgtgttatttggtgtttctcgtttgggtctttcgaacatctttcattcttctctttttggtgttgctccccacgaacaggtagattgatgaaaagcaaccatggatgacctacatggaagcaatgctcgaatgcacattagagaagctcaagatccaatgcatgtgcaatttgaacatcatgctttgcatcacatccacaatggaagcggtatggttgatgaccaggctgatgatggcaatgctggtgggatgagtgagggtgtggaaacagacattccttctcaccctggaaatgtaactgacaatcgtggtgaagtggtcgaccgtggtagtgaacaaggagatcagttaacattgtcttttcagggccaagtctacgtttttgacagtgtcttgcctgagaaggttcaagctgtgcttctattattgggtggtcgtgaattacctcaggcagcccctcctggcctaggatcacctcatcagaacaacagagtatcgagtttacctggtactcctcaaaggtttagtattccgcagcgattagcttctttggtcagatttcgagagaaacggaaaggaaggaattttgataagaagattcggtatacagtccgcaaggaggtagctttgaggatgcaacgcaataaaggtcagttcacatctgccaagtcaaacaatgatgaagctgcatctgctggatctagctgggggtcgaatcaaacctgggccatagaaagtagtgaggctcagcatcaagagatctcatgtcggcactgtggaattggcgagaagtcaactccaatgatgcgacgtggacctgccgggccaagaacactttgcaatgcatgtggacttatgtgggcaaacaagggtgcttttagggacttatccaaagcctctcctcaaacagcccagaatcttcctttaaataagaatgaagatgcaaatcttgagactgatcatcaaataatgataacagtggccaatgacataagcaactcacagtgaggacatgttggctcttgccattacaagcaagagaaagatcccaacagagtttgaatcgcctcaggttctgtagctttatcattccctttgaaagaatctgactcgatttaggttatcaggatttgatctatgacaatgtaatctgagtgataatgatctgcaatgttttgcttcttc

SEQ ID NO: 85842 - protein, 302 aa, Arabidopsis thaliana; identical to SEQ ID NO: 41929
  peptide (1)..(302): Ceres Seq. ID no. 12684173
  misc_feature (152)..(191): Pfam Name: CCT motif Pfam Description: CCT motif
  misc_feature (1)..(302): Homolog of NCBI NO: 18403600 NR Description: flowering protein CONSTANS, putative; protein id: supported by cDNA: gi_15028098 [Arabidopsis thaliana]
  misc_feature (1)..(302): Homolog of NCBI NO: 15028099 NR Description: putative flowering protein CONSTANS [Arabidopsis
  misc_feature (1)..(302): Homolog of NCBI NO: 25405485 NR Description: hypothetical protein F19C24.17 [imported] - thaliana >gi|12321671|gb|AAG50873.1|AC025294_11 hypothetical [Arabidopsis thaliana] >gi|12325361|gb|AAG52620.1|AC024261_7
  misc_feature (1)..(302): Homolog of NCBI NO: 21537322 NR Description: flowering protein CONSTANS, putative [Arabidopsis
  misc_feature (1)..(302): Homolog of NCBI NO: 18402914 NR Description: GATA zinc finger protein; protein id: supported by cDNA: 12996. [Arabidopsis thaliana] emb|CAB45082.1~gene_id:MXL8.2~similar to unknown protein
  misc_feature (1)..(302): Homolog of NCBI NO: 30686115 NR Description: GATA zinc finger protein [Arabidopsis thaliana] Unknown protein [Arabidopsis thaliana]
  misc_feature (40)..(271): Homolog of NCBI NO: 13174240 NR Description: putative zinc finger protein [Oryza sativa]
  misc_feature (67)..(300): Homolog of NCBI NO: 11358938 NR Description: zinc-finger protein - Arabidopsis thaliana
  misc_feature (67)..(300): Homolog of NCBI NO: 15233844 NR Description: Zinc finger protein, Zim; protein id: supported by cDNA: 20769., supported by cDNA: gi_8918530
  misc_feature (179)..(302): Homolog of NCBI NO: 26451385 NR Description: unknown protein [Arabidopsis thaliana]

SEQ ID NO: 85843 - protein, 292 aa, Arabidopsis thaliana; identical to SEQ ID NO: 41930
  peptide (1)..(292): Ceres Seq. ID no. 12684174
  misc_feature (142)..(181): Pfam Name: CCT motif Pfam Description: CCT motif
  misc_feature (1)..(292): Homolog of NCBI NO: 18403600 NR Description: flowering protein CONSTANS, putative; protein id: supported by cDNA: gi_15028098 [Arabidopsis thaliana]
  misc_feature (1)..(292): Homolog of NCBI NO: 15028099 NR Description: putative flowering protein CONSTANS [Arabidopsis
  misc_feature (1)..(292): Homolog of NCBI NO: 25405485 NR Description: hypothetical protein F19C24.17 [imported] - thaliana >gi|12321671|gb|AAG50873.1|AC025294_11 hypothetical [Arabidopsis thaliana] >gi|12325361|gb|AAG52620.1|AC024261_7
  misc_feature (1)..(292): Homolog of NCBI NO: 21537322 NR Description: flowering protein CONSTANS, putative [Arabidopsis
  misc_feature (1)..(292): Homolog of NCBI NO: 18402914 NR Description: GATA zinc finger protein; protein id: supported by cDNA: 12996. [Arabidopsis thaliana] emb|CAB45082.1~gene_id:MXL8.2~similar to unknown protein
  misc_feature (1)..(292): Homolog of NCBI NO: 30686115 NR Description: GATA zinc finger protein [Arabidopsis thaliana] Unknown protein [Arabidopsis thaliana]
  misc_feature (30)..(261): Homolog of NCBI NO: 13174240 NR Description: putative zinc finger protein [Oryza sativa]
  misc_feature (57)..(290): Homolog of NCBI NO: 11358938 NR Description: zinc-finger protein - Arabidopsis thaliana
  misc_feature (57)..(290): Homolog of NCBI NO: 15233844 NR Description: Zinc finger protein, Zim; protein id: supported by cDNA: 20769., supported by cDNA: gi_8918530
  misc_feature (169)..(292): Homolog of NCBI NO: 26451385 NR Description: unknown protein [Arabidopsis thaliana]

SEQ ID NO: 85844 - protein, 283 aa, Arabidopsis thaliana; identical to SEQ ID NO: 41931
  peptide (1)..(283): Ceres Seq. ID no. 12684175
  misc_feature (133)..(172): Pfam Name: CCT motif Pfam Description: CCT motif
  misc_feature (1)..(283): Homolog of NCBI NO: 18403600 NR Description: flowering protein CONSTANS, putative; protein id: supported by cDNA: gi_15028098 [Arabidopsis thaliana]
  misc_feature (1)..(283): Homolog of NCBI NO: 15028099 NR Description: putative flowering protein CONSTANS [Arabidopsis
  misc_feature (1)..(283): Homolog of NCBI NO: 25405485 NR Description: hypothetical protein F19C24.17 [imported] - thaliana >gi|12321671|gb|AAG50873.1|AC025294_11 hypothetical [Arabidopsis thaliana] >gi|12325361|gb|AAG52620.1|AC024261_7
  misc_feature (1)..(283): Homolog of NCBI NO: 21537322 NR Description: flowering protein CONSTANS, putative [Arabidopsis
  misc_feature (1)..(283): Homolog of NCBI NO: 18402914 NR Description: GATA zinc finger protein; protein id: supported by cDNA: 12996. [Arabidopsis thaliana] emb|CAB45082.1~gene_id:MXL8.2~similar to unknown protein
  misc_feature (1)..(283): Homolog of NCBI NO: 30686115 NR Description: GATA zinc finger protein [Arabidopsis thaliana] Unknown protein [Arabidopsis thaliana]
  misc_feature (21)..(252): Homolog of NCBI NO: 13174240 NR Description: putative zinc finger protein [Oryza sativa]
  misc_feature (48)..(281): Homolog of NCBI NO: 11358938 NR Description: zinc-finger protein - Arabidopsis thaliana
  misc_feature (48)..(281): Homolog of NCBI NO: 15233844 NR Description: Zinc finger protein, Zim; protein id: supported by cDNA: 20769., supported by cDNA: gi_8918530
  misc_feature (160)..(283): Homolog of NCBI NO: 26451385 NR Description: unknown protein [Arabidopsis thaliana]

SEQ ID NO: 85845 - DNA, 2814 bp, Arabidopsis thaliana
  misc_feature (1)..(2814): Ceres Seq. ID no. 12684196
  misc_feature: MA Experiment ID: 20000182 Result: Up-regulated in Transcription
  misc_feature: MA Experiment 20000182 PARAMETER Experiment Name: At_2mM_SA_P Parameter: Age (day) Value: 14
  misc_feature: MA Experiment 20000182 PARAMETER Experiment Name: At_2mM_SA_P Parameter: Organism Value: A. thaliana
  misc_feature: MA Experiment 20000182 PARAMETER Experiment Name: At_2mM_SA_P Parameter: Plant Line Value: WS
  misc_feature: MA Experiment 20000182 PARAMETER Experiment Name: At_2mM_SA_P Parameter: Timepoint (hr) Value: 6
  misc_feature: MA Experiment 20000182 PARAMETER Experiment Name: At_2mM_SA_P Parameter: Tissue Value: Aerial
  misc_feature: MA Experiment 20000182 PARAMETER Experiment Name: At_2mM_SA_P Parameter: Treatment Value: 2mM SA vs. No Treatment
  misc_feature: MA Experiment ID: 20000185 Result: Up-regulated in Transcription
  misc_feature: MA Experiment 20000185 PARAMETER Experiment Name: At_Roots__P Parameter: Age (day) Value: 7 vs. 21
  misc_feature: MA Experiment 20000185 PARAMETER Experiment Name: At_Roots__P Parameter: Organism Value: A. thaliana
  misc_feature: MA Experiment 20000185 PARAMETER Experiment Name: At_Roots__P Parameter: Tissue Value: Roots vs. Whole Plant
  misc_feature: MA Experiment ID: 20000227 Result: Down-regulated in Transcription
  misc_feature: MA Experiment 20000227 PARAMETER Experiment Name: At_Root-Tips-vs-Tops_P Parameter: Tissue Value: Root Tips vs. Root Tops
  misc_feature: MA Experiment ID: 20000234 Result: Down-regulated in Transcription
  misc_feature: MA Experiment 20000234 PARAMETER Experiment Name: At_Siliques_P Parameter: Age (day) Value: 21
  misc_feature: MA Experiment 20000234 PARAMETER Experiment Name: At_Siliques_P Parameter: Organism Value: A. thaliana
  misc_feature: MA Experiment 20000234 PARAMETER Experiment Name: At_Siliques_P Parameter: Plant Line Value: WS
  misc_feature: MA Experiment 20000234 PARAMETER Experiment Name: At_Siliques_P Parameter: Tissue Value: Less Than 5mm Siliques vs. Whole Plant
  misc_feature: MA Experiment ID: 20000436 Result: Down-regulated in Transcription
  misc_feature: MA Experiment 20000436 PARAMETER Experiment Name: At_Drought_P Parameter: Age (day) Value: 7
  misc_feature: MA Experiment 20000436 PARAMETER Experiment Name: At_Drought_P Parameter: Organism Value: A. thaliana
  misc_feature: MA Experiment 20000436 PARAMETER Experiment Name: At_Drought_P Parameter: Plant Line Value: WS
  misc_feature: MA Experiment 20000436 PARAMETER Experiment Name: At_Drought_P Parameter: Timepoint (hr) Value: 12
  misc_feature: MA Experiment 20000436 PARAMETER Experiment Name: At_Drought_P Parameter: Tissue Value: Whole Plant
  misc_feature: MA Experiment 20000436 PARAMETER Experiment Name: At_Drought_P Parameter: Treatment Value: Drought vs. No Drought
  misc_feature: MA Experiment ID: 20000437 Result: Down-regulated in Transcription
  misc_feature: MA Experiment 20000437 PARAMETER Experiment Name: At_Drought_P Parameter: Age (day) Value: 8
  misc_feature: MA Experiment 20000437 PARAMETER Experiment Name: At_Drought_P Parameter: Organism Value: A. thaliana
  misc_feature: MA Experiment 20000437 PARAMETER Experiment Name: At_Drought_P Parameter: Plant Line Value: WS
  misc_feature: MA Experiment 20000437 PARAMETER Experiment Name: At_Drought_P Parameter: Timepoint (hr) Value: 24
  misc_feature: MA Experiment 20000437 PARAMETER Experiment Name: At_Drought_P Parameter: Tissue Value: Whole Plant
  misc_feature: MA Experiment 20000437 PARAMETER Experiment Name: At_Drought_P Parameter: Treatment Value: Drought vs. No Drought
  misc_feature: MA Experiment ID: 20000438 Result: Down-regulated in Transcription
  misc_feature: MA Experiment 20000438 PARAMETER Experiment Name: At_Shoots__P Parameter: Age (day) Value: 14
  misc_feature: MA Experiment 20000438 PARAMETER Experiment Name: At_Shoots__P Parameter: Tissue Value: Shoots vs. Whole Plant
  misc_feature: MA Experiment ID: 20000439 Result: Up-regulated in Transcription
  misc_feature: MA Experiment 20000439 PARAMETER Experiment Name: At_Roots__P Parameter: Age (day) Value: 14 vs. 21
  misc_feature: MA Experiment 20000439 PARAMETER Experiment Name: At_Roots__P Parameter: Organism Value: A. thaliana
  misc_feature: MA Experiment 20000439 PARAMETER Experiment Name: At_Roots__P Parameter: Tissue Value: Roots vs. Whole Plant
  misc_feature: MA Experiment ID: 20000527 Result: Down-regulated in Transcription
  misc_feature: MA Experiment 20000527 PARAMETER Experiment Name: At_10percent_PEG_P Parameter: Age (day) Value: 20
  misc_feature: MA Experiment 20000527 PARAMETER Experiment Name: At_10percent_PEG_P Parameter: Organism Value: A. thaliana
  misc_feature: MA Experiment 20000527 PARAMETER Experiment Name: At_10percent_PEG_P Parameter: Plant Line Value: WS
  misc_feature: MA Experiment 20000527 PARAMETER Experiment Name: At_10percent_PEG_P Parameter: Timepoint (day) Value: 20
  misc_feature: MA Experiment 20000527 PARAMETER Experiment Name: At_10percent_PEG_P Parameter: Tissue Value: Whole Plant
  misc_feature: MA Experiment 20000527 PARAMETER Experiment Name: At_10percent_PEG_P Parameter: Treatment Value: 10percent PEG vs. No Treatment
  misc_feature: MA Experiment ID: 20001554 Result: Down-regulated in Transcription
  misc_feature: MA Experiment 20001554 PARAMETER Experiment Name: At_Drought_Soil_Dry_P Parameter: Age (day) Value: 21
  misc_feature: MA Experiment 20001554 PARAMETER Experiment Name: At_Drought_Soil_Dry_P Parameter: Organism Value: A. thaliana
  misc_feature: MA Experiment 20001554 PARAMETER Experiment Name: At_Drought_Soil_Dry_P Parameter: Plant Line Value: WS
  misc_feature: MA Experiment 20001554 PARAMETER Experiment Name: At_Drought_Soil_Dry_P Parameter: Post Timepoint (hr) Value: None
  misc_feature: MA Experiment 20001554 PARAMETER Experiment Name: At_Drought_Soil_Dry_P Parameter: Post-Treatment Value: None
  misc_feature: MA Experiment 20001554 PARAMETER Experiment Name: At_Drought_Soil_Dry_P Parameter: Timepoint (day) Value: 7
  misc_feature: MA Experiment 20001554 PARAMETER Experiment Name: At_Drought_Soil_Dry_P Parameter: Treatment Value: Drought vs. No Drought
  misc_feature: MA Experiment ID: 20001555 Result: Down-regulated in Transcription
  misc_feature: MA Experiment 20001555 PARAMETER Experiment Name: At_Drought_Soil_Dry_P Parameter: Age (day) Value: 24
  misc_feature: MA Experiment 20001555 PARAMETER Experiment Name: At_Drought_Soil_Dry_P Parameter: Organism Value: A. thaliana
  misc_feature: MA Experiment 20001555 PARAMETER Experiment Name: At_Drought_Soil_Dry_P Parameter: Plant Line Value: WS
  misc_feature: MA Experiment 20001555 PARAMETER Experiment Name: At_Drought_Soil_Dry_P Parameter: Post Timepoint (hr) Value: None
  misc_feature: MA Experiment 20001555 PARAMETER Experiment Name: At_Drought_Soil_Dry_P Parameter: Post-Treatment Value: None
  misc_feature: MA Experiment 20001555 PARAMETER Experiment Name: At_Drought_Soil_Dry_P Parameter: Timepoint (day) Value: 10
  misc_feature: MA Experiment 20001555 PARAMETER Experiment Name: At_Drought_Soil_Dry_P Parameter: Treatment Value: Drought vs. No Drought
  misc_feature: MA Experiment ID: 20001556 Result: Down-regulated in Transcription
  misc_feature: MA Experiment 20001556 PARAMETER Experiment Name: At_Drought_Soil_Dry_P Parameter: Age (day) Value: 26
  misc_feature: MA Experiment 20001556 PARAMETER Experiment Name: At_Drought_Soil_Dry_P Parameter: Organism Value: A. thaliana
  misc_feature: MA Experiment 20001556 PARAMETER Experiment Name: At_Drought_Soil_Dry_P Parameter: Plant Line Value: WS
  misc_feature: MA Experiment 20001556 PARAMETER Experiment Name: At_Drought_Soil_Dry_P Parameter: Post Timepoint (hr) Value: None
  misc_feature: MA Experiment 20001556 PARAMETER Experiment Name: At_Drought_Soil_Dry_P Parameter: Post-Treatment Value: None
  misc_feature: MA Experiment 20001556 PARAMETER Experiment Name: At_Drought_Soil_Dry_P Parameter: Timepoint (day) Value: 12
  misc_feature: MA Experiment 20001556 PARAMETER Experiment Name: At_Drought_Soil_Dry_P Parameter: Treatment Value: Drought vs. No Drought
  misc_feature: MA Experiment ID: 20001560 Result: Down-regulated in Transcription
  misc_feature: MA Experiment 20001560 PARAMETER Experiment Name: At_Drought_Soil_Dry_P Parameter: Age (day) Value: 28
  misc_feature: MA Experiment 20001560 PARAMETER Experiment Name: At_Drought_Soil_Dry_P Parameter: Organism Value: A. thaliana
  misc_feature: MA Experiment 20001560 PARAMETER Experiment Name: At_Drought_Soil_Dry_P Parameter: Plant Line Value: WS
  misc_feature: MA Experiment 20001560 PARAMETER Experiment Name: At_Drought_Soil_Dry_P Parameter: Post Timepoint (hr) Value: None
  misc_feature: MA Experiment 20001560 PARAMETER Experiment Name: At_Drought_Soil_Dry_P Parameter: Post-Treatment Value: None
  misc_feature: MA Experiment 20001560 PARAMETER Experiment Name: At_Drought_Soil_Dry_P Parameter: Timepoint (day) Value: 14
  misc_feature: MA Experiment 20001560 PARAMETER Experiment Name: At_Drought_Soil_Dry_P Parameter: Treatment Value: Drought vs. No Drought
  misc_feature: MA Experiment ID: 20001904 Result: Down-regulated in Transcription
  misc_feature: MA Experiment 20001904 PARAMETER Experiment Name: At_Drought_Reproduction_P Parameter: Age (day) Value: 37
  misc_feature: MA Experiment 20001904 PARAMETER Experiment Name: At_Drought_Reproduction_P Parameter: Organism Value: A. thaliana
  misc_feature: MA Experiment 20001904 PARAMETER Experiment Name: At_Drought_Reproduction_P Parameter: Plant Line Value: WS
  misc_feature: MA Experiment 20001904 PARAMETER Experiment Name: At_Drought_Reproduction_P Parameter: Timepoint (day) Value: 7
  misc_feature: MA Experiment 20001904 PARAMETER Experiment Name: At_Drought_Reproduction_P Parameter: Tissue Value: Rosettes
  misc_feature: MA Experiment 20001904 PARAMETER Experiment Name: At_Drought_Reproduction_P Parameter: Treatment Value: Drought vs. No Drought
atgacatcgaaggcgaaggcgcttacgttcatttgttgtgtggctcttctcaatcttgccattgcccaggatcaatcagggttcattagcatagattgcgggttacaaccagaaaattccagctacacggaaacatcgaccgatattaagtatgtttcggattcaagttatacggatacagggacaagctatttcgttgcgcctgaaaatagacaaaatatgaagcagagcatgtggtccgtcagaagttttccagagggaatcagaaactgttacactattgctgttaatagcagcaccaagtatctgatccgggcggattttatgtacggtaactacgattcgagaaacgagataccgggtttcgatcttcacttaggtccaaacaaatgggacactgttgaattggtgtctcctctgcaaacagtgtccaaggagatcatatattatgtgttgacagatacaatacaagtgtgtttagtgaatacaggaaatggtacgccttttatatcggtattggaacttagacagttgccgaattcttcctatgcagctcaatctgaatcacttcaactatttcaacggttggattttggatcaacgacaaatctaacggttaggtatccaaacgatgtttttgatcggatttggtttcccgccacgccaaatgggacgaagccgttaagtgacccgtcgacttctctcacaagcaacagtaccggtaatttccgtcttccacaagttgtaatgagaactggaattgtaccagataatccaagaggatttgtagattttggatggattccagatgatccgtctcttgagtttttcttttacttgtatttcacggaacttcaacaacctaattccggaaccgtagaaacaagagaattcgtgatcttgttgaacgggaagtcttttggggaaccgttaagtcttaactacttccggaccttagccttgttcacttcaaaccctttgaaagcagagagcttccagttttctcttcgtcagactcagagttcatctcttccacctctgatcaatgctatggagacttactttgtaaacaaacttccacaatcatcaacggatccaaacgacctttctgctatgaggaatattaagtctgcatataaagtcaagagaaactgggaaggagacgtgtgtgtgcctcaagcttacacatgggaaggtctgaattgtagcttcaatggcacaaacatgccaagaaagttattagctctatgcaacagaaacttatcgtccgccggattgactggagagataacgtctgatatatcgcgtctttcgcagttgcaaattctggacttatcaaataacaatttgagtggacctgcagtaccagctttcttagcgcaactccaattcctgagagtcctacatttggcgaacaaccagcttagtggtcctataccctctagtctcatagagagactagactcgtttagtatcagtgggaatccaagtatttgttctgcaaatgcgtgtgaagaggtctcacaaaatagatcaaagaagaataaacttcccagctttgtcattcctttagttgcatcacttgcagggctgcttcttctttttatcatatctgcagctatatttttaatcctcatgagaaaaaagaaacaaggtcgaacgattaaccggacagttacagctacgagtaatggaccgtcattacagaggagagatactggttcaatgcgtccatctatgcagcgaagagaaaccggtttttcaacaagaccatctttacagagaatagagagcggaatgacagactacggagggaatgaaacagcggttgatgcgtttgatttggaaccatcaaataggaagtttacatatgcagagattgtgaacattacaaatgggtttgatagagatcaagggaaggtaggatttggaagaaactaccttggaaagttagatggtaaagaagtaactgtcaagcttgtttcttcactatcttctcaaggctacaaacaactcagagcagaggtcaaacatcttttcagaattcatcataaaaaccttataaccatgcttggttactgcaacgaaggcgataaaatggcggttatatacgagtacatggctaatggaaacttgaaacaacatatctcagagaacagtacaactgtttttagctgggaagataggctcggtatcgcggttgatgtcgcgcaaggacttgagtatttgcatactggttgcaagccgccgatcattcatagaaacgtcaagtgtacaaatgtattcttagatgaaagtttcaatgcgaagttaggcggttttggcctttcgagagcgtttgatgcagccgagggaagtcatttgaatacagctattgctgggactcctggatatgttgaccccgagtattacacatcaaacatgttaacagagaagagtgatgtgtacagtttcggtgtagttctattagagatcgttactgcgaaacccgctatcataaagaatgaggaaaggatgcatataagtcaatgggttgagtctttgctttcaagagaaaatattgtagagattcttgacccgagtctttgcggagactatgacccaaactcggcattcaagaccgtggaaatagccgtggcttgcgtttgtcgaaattcgggcgacagacctgggatgagtcaagtggtgacggctcttaaggagagtttagctgtagaagttgagaggaaaaagcatttgccggttggatcaacagattcacttgaagagcttgcacttggctttggatctaatccacctcctcgtttgagatga

SEQ ID NO: 85846 - protein, 937 aa, Arabidopsis thaliana
  peptide (1)..(937): Ceres Seq. ID no. 12684197
  misc_feature (8)..(582): Homolog of NCBI NO: 9837280 NR Description: leaf senescence-associated receptor-like protein
  misc_feature (739)..(937): Homolog of NCBI NO: 9837280 NR Description: leaf senescence-associated receptor-like protein
  misc_feature (596)..(739): Homolog of NCBI NO: 9837280 NR Description: leaf senescence-associated receptor-like protein
  misc_feature (8)..(552): Homolog of NCBI NO: 15224738 NR Description: putative receptor-like protein kinase; protein id:
  misc_feature (605)..(904): Homolog of NCBI NO: 15224738 NR Description: putative receptor-like protein kinase; protein id:
  misc_feature (8)..(548): Homolog of NCBI NO: 25387105 NR Description: probable protein kinase [imported] - Arabidopsis >gi|9802789|gb|AAF99858.1|AC015448_8 Putative protein kinase
  misc_feature (620)..(911): Homolog of NCBI NO: 25387105 NR Description: probable protein kinase [imported] - Arabidopsis >gi|9802789|gb|AAF99858.1|AC015448_8 Putative protein kinase
  misc_feature (8)..(551): Homolog of NCBI NO: 15224743 NR Description: putative receptor-like protein kinase; protein id:
  misc_feature (618)..(903): Homolog of NCBI NO: 15224743 NR Description: putative receptor-like protein kinase; protein id:
  misc_feature (11)..(584): Homolog of NCBI NO: 15218052 NR Description: receptor-like protein kinase, putative; protein
MTSKAKALTFICCVALLNLAIAQDQSGFISIDCGLQPENSSYTETSTDIKYVSDSSYTDTGTSYFVAPENRQNMKQSMWSVRSFPEGIRNCYTIAVNSSTKYLIRADFMYGNYDSRNEIPGFDLHLGPNKWDTVELVSPLQTVSKEIIYYVLTDTIQVCLVNTGNGTPFISVLELRQLPNSSYAAQSESLQLFQRLDFGSTTNLTVRYPNDVFDRIWFPATPNGTKPLSDPSTSLTSNSTGNFRLPQVVMRTGIVPDNPRGFVDFGWIPDDPSLEFFFYLYFTELQQPNSGTVETREFVILLNGKSFGEPLSLNYFRTLALFTSNPLKAESFQFSLRQTQSSSLPPLINAMETYFVNKLPQSSTDPNDLSAMRNIKSAYKVKRNWEGDVCVPQAYTWEGLNCSFNGTNMPRKLLALCNRNLSSAGLTGEITSDISRLSQLQILDLSNNNLSGPAVPAFLAQLQFLRVLHLANNQLSGPIPSSLIERLDSFSISGNPSICSANACEEVSQNRSKKNKLPSFVIPLVASLAGLLLLFIISAAIFLILMRKKKQGRTINRTVTATSNGPSLQRRDTGSMRPSMQRRETGFSTRPSLQRIESGMTDYGGNETAVDAFDLEPSNRKFTYAEIVNITNGFDRDQGKVGFGRNYLGKLDGKEVTVKLVSSLSSQGYKQLRAEVKHLFRIHHKNLITMLGYCNEGDKMAVIYEYMANGNLKQHISENSTTVFSWEDRLGIAVDVAQGLEYLHTGCKPPIIHRNVKCTNVFLDESFNAKLGGFGLSRAFDAAEGSHLNTAIAGTPGYVDPEYYTSNMLTEKSDVYSFGVVLLEIVTAKPAIIKNEERMHISQWVESLLSRENIVEILDPSLCGDYDPNSAFKTVEIAVACVCRNSGDRPGMSQVVTALKESLAVEVERKKHLPVGSTDSLEELALGFGSNPPPRLR

SEQ ID NO: 85847 - protein, 864 aa, Arabidopsis thaliana
  peptide (1)..(864): Ceres Seq. ID no. 12684198
  misc_feature (1)..(509): Homolog of NCBI NO: 9837280 NR Description: leaf senescence-associated receptor-like protein
  misc_feature (666)..(864): Homolog of NCBI NO: 9837280 NR Description: leaf senescence-associated receptor-like protein
  misc_feature (523)..(666): Homolog of NCBI NO: 9837280 NR Description: leaf senescence-associated receptor-like protein
  misc_feature (1)..(479): Homolog of NCBI NO: 15224738 NR Description: putative receptor-like protein kinase; protein id:
  misc_feature (532)..(831): Homolog of NCBI NO: 15224738 NR Description: putative receptor-like protein kinase; protein id:
  misc_feature (1)..(475): Homolog of NCBI NO: 25387105 NR Description: probable protein kinase [imported] - Arabidopsis >gi|9802789|gb|AAF99858.1|AC015448_8 Putative protein kinase
  misc_feature (547)..(838): Homolog of NCBI NO: 25387105 NR Description: probable protein kinase [imported] - Arabidopsis >gi|9802789|gb|AAF99858.1|AC015448_8 Putative protein kinase
  misc_feature (1)..(478): Homolog of NCBI NO: 15224743 NR Description: putative receptor-like protein kinase; protein id:
  misc_feature (545)..(830): Homolog of NCBI NO: 15224743 NR Description: putative receptor-like protein kinase; protein id:
  misc_feature (1)..(511): Homolog of NCBI NO: 15218052 NR Description: receptor-like protein kinase, putative; protein
MKQSMWSVRSFPEGIRNCYTIAVNSSTKYLIRADFMYGNYDSRNEIPGFDLHLGPNKWDTVELVSPLQTVSKEIIYYVLTDTIQVCLVNTGNGTPFISVLELRQLPNSSYAAQSESLQLFQRLDFGSTTNLTVRYPNDVFDRIWFPATPNGTKPLSDPSTSLTSNSTGNFRLPQVVMRTGIVPDNPRGFVDFGWIPDDPSLEFFFYLYFTELQQPNSGTVETREFVILLNGKSFGEPLSLNYFRTLALFTSNPLKAESFQFSLRQTQSSSLPPLINAMETYFVNKLPQSSTDPNDLSAMRNIKSAYKVKRNWEGDVCVPQAYTWEGLNCSFNGTNMPRKLLALCNRNLSSAGLTGEITSDISRLSQLQILDLSNNNLSGPAVPAFLAQLQFLRVLHLANNQLSGPIPSSLIERLDSFSISGNPSICSANACEEVSQNRSKKNKLPSFVIPLVASLAGLLLLFIISAAIFLILMRKKKQGRTINRTVTATSNGPSLQRRDTGSMRPSMQRRETGFSTRPSLQRIESGMTDYGGNETAVDAFDLEPSNRKFTYAEIVNITNGFDRDQGKVGFGRNYLGKLDGKEVTVKLVSSLSSQGYKQLRAEVKHLFRIHHKNLITMLGYCNEGDKMAVIYEYMANGNLKQHISENSTTVFSWEDRLGIAVDVAQGLEYLHTGCKPPIIHRNVKCTNVFLDESFNAKLGGFGLSRAFDAAEGSHLNTAIAGTPGYVDPEYYTSNMLTEKSDVYSFGVVLLEIVTAKPAIIKNEERMHISQWVESLLSRENIVEILDPSLCGDYDPNSAFKTVEIAVACVCRNSGDRPGMSQVVTALKESLAVEVERKKHLPVGSTDSLEELALGFGSNPPPRLR

SEQ ID NO: 85848 - protein, 860 aa, Arabidopsis thaliana
  peptide (1)..(860): Ceres Seq. ID no. 12684199
  misc_feature (1)..(505): Homolog of NCBI NO: 9837280 NR Description: leaf senescence-associated receptor-like protein
  misc_feature (662)..(860): Homolog of NCBI NO: 9837280 NR Description: leaf senescence-associated receptor-like protein
  misc_feature (519)..(662): Homolog of NCBI NO: 9837280 NR Description: leaf senescence-associated receptor-like protein
  misc_feature (1)..(475): Homolog of NCBI NO: 15224738 NR Description: putative receptor-like protein kinase; protein id:
  misc_feature (528)..(827): Homolog of NCBI NO: 15224738 NR Description: putative receptor-like protein kinase; protein id:
  misc_feature (1)..(471): Homolog of NCBI NO: 25387105 NR Description: probable protein kinase [imported] - Arabidopsis >gi|9802789|gb|AAF99858.1|AC015448_8 Putative protein kinase
  misc_feature (543)..(834): Homolog of NCBI NO: 25387105 NR Description: probable protein kinase [imported] - Arabidopsis >gi|9802789|gb|AAF99858.1|AC015448_8 Putative protein kinase
  misc_feature (1)..(474): Homolog of NCBI NO: 15224743 NR Description: putative receptor-like protein kinase; protein id:
  misc_feature (541)..(826): Homolog of NCBI NO: 15224743 NR Description: putative receptor-like protein kinase; protein id:
  misc_feature (1)..(507): Homolog of NCBI NO: 15218052 NR Description: receptor-like protein kinase, putative; protein
MWSVRSFPEGIRNCYTIAVNSSTKYLIRADFMYGNYDSRNEIPGFDLHLGPNKWDTVELVSPLQTVSKEIIYYVLTDTIQVCLVNTGNGTPFISVLELRQLPNSSYAAQSESLQLFQRLDFGSTTNLTVRYPNDVFDRIWFPATPNGTKPLSDPSTSLTSNSTGNFRLPQVVMRTGIVPDNPRGFVDFGWIPDDPSLEFFFYLYFTELQQPNSGTVETREFVILLNGKSFGEPLSLNYFRTLALFTSNPLKAESFQFSLRQTQSSSLPPLINAMETYFVNKLPQSSTDPNDLSAMRNIKSAYKVKRNWEGDVCVPQAYTWEGLNCSFNGTNMPRKLLALCNRNLSSAGLTGEITSDISRLSQLQILDLSNNNLSGPAVPAFLAQLQFLRVLHLANNQLSGPIPSSLIERLDSFSISGNPSICSANACEEVSQNRSKKNKLPSFVIPLVASLAGLLLLFIISAAIFLILMRKKKQGRTINRTVTATSNGPSLQRRDTGSMRPSMQRRETGFSTRPSLQRIESGMTDYGGNETAVDAFDLEPSNRKFTYAEIVNITNGFDRDQGKVGFGRNYLGKLDGKEVTVKLVSSLSSQGYKQLRAEVKHLFRIHHKNLITMLGYCNEGDKMAVIYEYMANGNLKQHISENSTTVFSWEDRLGIAVDVAQGLEYLHTGCKPPIIHRNVKCTNVFLDESFNAKLGGFGLSRAFDAAEGSHLNTAIAGTPGYVDPEYYTSNMLTEKSDVYSFGVVLLEIVTAKPAIIKNEERMHISQWVESLLSRENIVEILDPSLCGDYDPNSAFKTVEIAVACVCRNSGDRPGMSQVVTALKESLAVEVERKKHLPVGSTDSLEELALGFGSNPPPRLR

SEQ ID NO: 85849 - DNA, 2601 bp, Arabidopsis thaliana
  misc_feature (1)..(2601): Ceres Seq. ID no. 12684200
  misc_feature: MA Experiment ID: 20000182 Result: Up-regulated in Transcription
  misc_feature: MA Experiment 20000182 PARAMETER Experiment Name: At_2mM_SA_P Parameter: Age (day) Value: 14
  misc_feature: MA Experiment 20000182 PARAMETER Experiment Name: At_2mM_SA_P Parameter: Organism Value: A. thaliana
  misc_feature: MA Experiment 20000182 PARAMETER Experiment Name: At_2mM_SA_P Parameter: Plant Line Value: WS
  misc_feature: MA Experiment 20000182 PARAMETER Experiment Name: At_2mM_SA_P Parameter: Timepoint (hr) Value: 6
  misc_feature: MA Experiment 20000182 PARAMETER Experiment Name: At_2mM_SA_P Parameter: Tissue Value: Aerial
  misc_feature: MA Experiment 20000182 PARAMETER Experiment Name: At_2mM_SA_P Parameter: Treatment Value: 2mM SA vs. No Treatment
  misc_feature: MA Experiment ID: 20000185 Result: Up-regulated in Transcription
  misc_feature: MA Experiment 20000185 PARAMETER Experiment Name: At_Roots__P Parameter: Age (day) Value: 7 vs. 21
  misc_feature: MA Experiment 20000185 PARAMETER Experiment Name: At_Roots__P Parameter: Organism Value: A. thaliana
  misc_feature: MA Experiment 20000185 PARAMETER Experiment Name: At_Roots__P Parameter: Tissue Value: Roots vs. Whole Plant
  misc_feature: MA Experiment ID: 20000267 Result: Down-regulated in Transcription
  misc_feature: MA Experiment 20000267 PARAMETER Experiment Name: At_Drought_P Parameter: Age (day) Value: 7
  misc_feature: MA Experiment 20000267 PARAMETER Experiment Name: At_Drought_P Parameter: Organism Value: A. thaliana
  misc_feature: MA Experiment 20000267 PARAMETER Experiment Name: At_Drought_P Parameter: Plant Line Value: WS
  misc_feature: MA Experiment 20000267 PARAMETER Experiment Name: At_Drought_P Parameter: Timepoint (hr) Value: 6
  misc_feature: MA Experiment 20000267 PARAMETER Experiment Name: At_Drought_P Parameter: Tissue Value: Whole Plant
  misc_feature: MA Experiment 20000267 PARAMETER Experiment Name: At_Drought_P Parameter: Treatment Value: Drought vs. No Drought
  misc_feature: MA Experiment ID: 20000438 Result: Down-regulated in Transcription
  misc_feature: MA Experiment 20000438 PARAMETER Experiment Name: At_Shoots__P Parameter: Age (day) Value: 14
  misc_feature: MA Experiment 20000438 PARAMETER Experiment Name: At_Shoots__P Parameter: Tissue Value: Shoots vs. Whole Plant
  misc_feature: MA Experiment ID: 20000439 Result: Up-regulated in Transcription
  misc_feature: MA Experiment 20000439 PARAMETER Experiment Name: At_Roots__P Parameter: Age (day) Value: 14 vs. 21
  misc_feature: MA Experiment 20000439 PARAMETER Experiment Name: At_Roots__P Parameter: Organism Value: A. thaliana
  misc_feature: MA Experiment 20000439 PARAMETER Experiment Name: At_Roots__P Parameter: Tissue Value: Roots vs. Whole Plant
  misc_feature: MA Experiment ID: 20000456 Result: Up-regulated in Transcription
  misc_feature: MA Experiment 20000456 PARAMETER Experiment Name: At_100uM_BA_P Parameter: Age (day) Value: 14
  misc_feature: MA Experiment 20000456 PARAMETER Experiment Name: At_100uM_BA_P Parameter: Organism Value: A. thaliana
  misc_feature: MA Experiment 20000456 PARAMETER Experiment Name: At_100uM_BA_P Parameter: Plant Line Value: WS
  misc_feature: MA Experiment 20000456 PARAMETER Experiment Name: At_100uM_BA_P Parameter: Timepoint (hr) Value: 6
  misc_feature: MA Experiment 20000456 PARAMETER Experiment Name: At_100uM_BA_P Parameter: Tissue Value: Aerial
  misc_feature: MA Experiment 20000456 PARAMETER Experiment Name: At_100uM_BA_P Parameter: Treatment Value: 100uM BA vs. No Treatment
  misc_feature: MA Experiment ID: 20000527 Result: Down-regulated in Transcription
  misc_feature: MA Experiment 20000527 PARAMETER Experiment Name: At_10percent_PEG_P Parameter: Age (day) Value: 20
  misc_feature: MA Experiment 20000527 PARAMETER Experiment Name: At_10percent_PEG_P Parameter: Organism Value: A. thaliana
  misc_feature: MA Experiment 20000527 PARAMETER Experiment Name: At_10percent_PEG_P Parameter: Plant Line Value: WS
  misc_feature: MA Experiment 20000527 PARAMETER Experiment Name: At_10percent_PEG_P Parameter: Timepoint (day) Value: 20
  misc_feature: MA Experiment 20000527 PARAMETER Experiment Name: At_10percent_PEG_P Parameter: Tissue Value: Whole Plant
  misc_feature: MA Experiment 20000527 PARAMETER Experiment Name: At_10percent_PEG_P Parameter: Treatment Value: 10percent PEG vs. No Treatment
  misc_feature: MA Experiment ID: 20000573 Result: Up-regulated in Transcription
  misc_feature: MA Experiment 20000573 PARAMETER Experiment Name: At_100uM_ABA_Mutants__P Parameter: Organism Value: A. thaliana
  misc_feature: MA Experiment 20000573 PARAMETER Experiment Name: At_100uM_ABA_Mutants__P Parameter: Plant Line Value: CS22 vs. Ler wt
  misc_feature: MA Experiment 20000573 PARAMETER Experiment Name: At_100uM_ABA_Mutants__P Parameter: Timepoint (hr) Value: N/A
  misc_feature: MA Experiment 20000573 PARAMETER Experiment Name: At_100uM_ABA_Mutants__P Parameter: Tissue Value: Whole Plant
  misc_feature: MA Experiment 20000573 PARAMETER Experiment Name: At_100uM_ABA_Mutants__P Parameter: Treatment Value: None
  misc_feature: MA Experiment ID: 20000574 Result: Up-regulated in Transcription
  misc_feature: MA Experiment 20000574 PARAMETER Experiment Name: At_100uM_ABA_Mutants__P Parameter: Organism Value: A. thaliana
  misc_feature: MA Experiment 20000574 PARAMETER Experiment Name: At_100uM_ABA_Mutants__P Parameter: Plant Line Value: CS23 vs. Ler wt
  misc_feature: MA Experiment 20000574 PARAMETER Experiment Name: At_100uM_ABA_Mutants__P Parameter: Timepoint (hr) Value: N/A
  misc_feature: MA Experiment 20000574 PARAMETER Experiment Name: At_100uM_ABA_Mutants__P Parameter: Tissue Value: Whole Plant
  misc_feature: MA Experiment 20000574 PARAMETER Experiment Name: At_100uM_ABA_Mutants__P Parameter: Treatment Value: None
  misc_feature: MA Experiment ID: 20000575 Result: Down-regulated in Transcription
  misc_feature: MA Experiment 20000575 PARAMETER Experiment Name: At_100uM_ABA_Mutants__P Parameter: Organism Value: A. thaliana
  misc_feature: MA Experiment 20000575 PARAMETER Experiment Name: At_100uM_ABA_Mutants__P Parameter: Plant Line Value: CS22
  misc_feature: MA Experiment 20000575 PARAMETER Experiment Name: At_100uM_ABA_Mutants__P Parameter: Timepoint (hr) Value: 6
  misc_feature: MA Experiment 20000575 PARAMETER Experiment Name: At_100uM_ABA_Mutants__P Parameter: Tissue Value: Whole Plant
  misc_feature: MA Experiment 20000575 PARAMETER Experiment Name: At_100uM_ABA_Mutants__P Parameter: Treatment Value: 1uM ABA vs. No Treatment
  misc_feature: MA Experiment ID: 20000576 Result: Down-regulated in Transcription
  misc_feature: MA Experiment 20000576 PARAMETER Experiment Name: At_100uM_ABA_Mutants__P Parameter: Organism Value: A. thaliana
  misc_feature: MA Experiment 20000576 PARAMETER Experiment Name: At_100uM_ABA_Mutants__P Parameter: Plant Line Value: CS23
  misc_feature: MA Experiment 20000576 PARAMETER Experiment Name: At_100uM_ABA_Mutants__P Parameter: Timepoint (hr) Value: 6
  misc_feature: MA Experiment 20000576 PARAMETER Experiment Name: At_100uM_ABA_Mutants__P Parameter: Tissue Value: Whole Plant
  misc_feature: MA Experiment 20000576 PARAMETER Experiment Name: At_100uM_ABA_Mutants__P Parameter: Treatment Value: 1uM ABA vs. No Treatment
  misc_feature: MA Experiment ID: 20001451 Result: Down-regulated in Transcription
  misc_feature: MA Experiment 20001451 PARAMETER Experiment Name: At_Far-red-induction_P Parameter: Age (day) Value: 7
  misc_feature: MA Experiment 20001451 PARAMETER Experiment Name: At_Far-red-induction_P Parameter: Light Value: Far-red vs. White
  misc_feature: MA Experiment 20001451 PARAMETER Experiment Name: At_Far-red-induction_P Parameter: Organism Value: A. thaliana
  misc_feature: MA Experiment 20001451 PARAMETER Experiment Name: At_Far-red-induction_P Parameter: Plant Line Value: Columbia
  misc_feature: MA Experiment 20001451 PARAMETER Experiment Name: At_Far-red-induction_P Parameter: Timepoint (hr) Value: 24
  misc_feature: MA Experiment 20001451 PARAMETER Experiment Name: At_Far-red-induction_P Parameter: Tissue Value: Whole Plant
atggcgttttcttcttgttttctcttagttcttctgcaaatcttctcagctttacttctttgtcttgctcaagatcagtcaggattcatcagtttggattgcggttcgcctagagaaactagctttcgtgagaaaacaacaaacattacttacatttccgatgcgaatttcatcaataccggtgttggtggaagcatcaaacaaggataccggactcagtttcagcaacaaacatggaacctacggagttttccacaaggcataagaaactgctataccttaaacctaaccataggcgacgaatatctaatcagagccaatttccttcacggcggttatgacgacaaaccctcaacgcaattcgagctctacctcggacctaatctttggtctacagttacaaccacgaacgagaccgaagcatcaatctttgagatgattcatatcttgaccactgatcgtttacaaatctgtctggtcaagacaggaaacgcaacgccttttatctccgctttagagcttcgtaaactcatgaacacaacttacttgactcgacaaggttccttgtacggaatcgatgtgtttgatcgtgtctggactccgtataatttcggaaactggtcacagattagtaccaatcagtcagtgaatataaacaatgactatcaaccaccagagattgctatggtcacagcctctgttccaacagacccggacgcagctatgaacatttcgctagtcggggtggaacgtactgtgcagttctacgtttttatgcattttgcagagattcaagagctcaaatccaatgatacaagagagttcaacatcatgtacaataacaagcatatctatggaccttttagaccacttaatttcaccacgtcttccgtatttacacctaccgaagttgtcgccgatgcaaatgggcagtacatattttcgcttcaaagaacaggaaattcgactttacctcctctgctcaacgctatggagatttattcggttaacttgttgccgcaacaggaaactgatagaaaagaagttgatgcaatgatgaacatcaagtcggcttacggcgtgaacaagattgactgggaaggagatccttgcgtgccgctggattacaagtggtctggtgttaattgcacttatgttgacaatgagaccccaaagatcatttctttggatctgtctacaagtggcttgaccggagagatcttagaatttatatcagaccttaccagtttagaagttcttgacttgtctaacaattctttaactggttcagtcccagaaaatctatctggaaatgagctaaatggctctatccctgcaactctccttgataaagaacgacgaggatctattacgttaagtatcgaaggaaataccgggctttgttcatctacatcatgcgctaccacgaaaaagaagaagaaaaacactgttattgcacctgttgcagcatcacttgtttcagtattcctcattggagctggaatcgttactttccttatcctcaagaggaagaagagaaccaagcttggtttgaatcctaattcaggaactggtacaacaccgttacattcgaggtctcaccacggttttgaacctcccgttatagcgaaaaaccggaaattgacttacattgatgttgttaagatcacaaacaactttgagagggttcttggtaggggtggttttggtgtggtttattacggcgtcttgaataatgaaccagttgcggtaaagatgctcactgagtccactgcacttggttacaaacagtttaaagccgaggttgagttgcttcttagagttcatcacaaagatctcacatgtcttgttggatattgtgaagaaggagataaaatgtctctaatctatgagttcatggcgaatggtgacttgaaagagcacttatcagggaagcgtggaccgtcgatactaacttgggaaggaaggcttcgtatagcagcggaatcagcgcaaggattggaatatttgcacaatggatgcaaaccgcaaatagttcaccgcgacattaagactactaacatcttattaaacgagaaatttcaagctaagcttgcggatttcgggctttcacggtcttttccacttggaactgaaactcacgtctcaaccatagttgctggaactcccggatatcttgatcctgaatactacagaactaattggttgaccgagaaaagtgatgtgttcagctttggtgttgttctactagagctagtaacaaaccaacccgtgatagacatgaaaagagaaaaatcacacatagctgaatgggtaggtttgatgctatcaagaggagacattaacagcattgtagatcctaagcttcaaggagactttgatccaaacacgatatggaaagttgttgagaccgcaatgacttgcctgaatccgtcttcttcacggagaccgacaatgactcaagtcgtaatggatctgaaagaatgtctgaacatggagatggcaagaaacatgggaagccgtatgacggattcaactaatgattcttcaattgagctgtccatgaatttcacaacagagcttaatccaggagctagatga

SEQ ID NO: 85850 - protein, 866 aa, Arabidopsis thaliana
  peptide (1)..(866): Ceres Seq. ID no. 12684201
  misc_feature (110)..(866): Homolog of NCBI NO: 15232537 NR Description: serine/threonine-specific protein kinase,
  misc_feature (9)..(189): Homolog of NCBI NO: 15232537 NR Description: serine/threonine-specific protein kinase,
  misc_feature (186)..(866): Homolog of NCBI NO: 9294681 NR Description: receptor-like protein kinase [Arabidopsis
  misc_feature (9)..(189): Homolog of NCBI NO: 9294681 NR Description: receptor-like protein kinase [Arabidopsis
  misc_feature (190)..(866): Homolog of NCBI NO: 15218052 NR Description: receptor-like protein kinase, putative; protein
  misc_feature (7)..(237): Homolog of NCBI NO: 15218052 NR Description: receptor-like protein kinase, putative; protein
  misc_feature (10)..(866): Homolog of NCBI NO: 25387148 NR Description: probable protein kinase [imported] - Arabidopsis >gi|9802795|gb|AAF99864.1|AC015448_14 Putative protein kinase
  misc_feature (7)..(866): Homolog of NCBI NO: 25405503 NR Description: probable protein kinase [imported] - Arabidopsis >gi|9802787|gb|AAF99856.1|AC015448_6 Putative protein kinase
  misc_feature (7)..(866): Homolog of NCBI NO: 25387121 NR Description: probable protein kinase [imported] - Arabidopsis >gi|9802790|gb|AAF99859.1|AC015448_9 Putative protein kinase
  misc_feature (475)..(866): Homolog of NCBI NO: 15218054 NR Description: receptor-like protein kinase, putative; protein
MAFSSCFLLVLLQIFSALLLCLAQDQSGFISLDCGSPRETSFREKTTNITYISDANFINTGVGGSIKQGYRTQFQQQTWNLRSFPQGIRNCYTLNLTIGDEYLIRANFLHGGYDDKPSTQFELYLGPNLWSTVTTTNETEASIFEMIHILTTDRLQICLVKTGNATPFISALELRKLMNTTYLTRQGSLYGIDVFDRVWTPYNFGNWSQISTNQSVNINNDYQPPEIAMVTASVPTDPDAAMNISLVGVERTVQFYVFMHFAEIQELKSNDTREFNIMYNNKHIYGPFRPLNFTTSSVFTPTEVVADANGQYIFSLQRTGNSTLPPLLNAMEIYSVNLLPQQETDRKEVDAMMNIKSAYGVNKIDWEGDPCVPLDYKWSGVNCTYVDNETPKIISLDLSTSGLTGEILEFISDLTSLEVLDLSNNSLTGSVPENLSGNELNGSIPATLLDKERRGSITLSIEGNTGLCSSTSCATTKKKKKNTVIAPVAASLVSVFLIGAGIVTFLILKRKKRTKLGLNPNSGTGTTPLHSRSHHGFEPPVIAKNRKLTYIDVVKITNNFERVLGRGGFGVVYYGVLNNEPVAVKMLTESTALGYKQFKAEVELLLRVHHKDLTCLVGYCEEGDKMSLIYEFMANGDLKEHLSGKRGPSILTWEGRLRIAAESAQGLEYLHNGCKPQIVHRDIKTTNILLNEKFQAKLADFGLSRSFPLGTETHVSTIVAGTPGYLDPEYYRTNWLTEKSDVFSFGVVLLELVTNQPVIDMKREKSHIAEWVGLMLSRGDINSIVDPKLQGDFDPNTIWKVVETAMTCLNPSSSRRPTMTQVVMDLKECLNMEMARNMGSRMTDSTNDSSIELSMNFTTELNPGAR

SEQ ID NO: 85851 - protein, 721 aa, Arabidopsis thaliana
  peptide (1)..(721): Ceres Seq. ID no. 12684202
  misc_feature (1)..(721): Homolog of NCBI NO: 15232537 NR Description: serine/threonine-specific protein kinase,
  misc_feature (1)..(44): Homolog of NCBI NO: 15232537 NR Description: serine/threonine-specific protein kinase,
  misc_feature (41)..(721): Homolog of NCBI NO: 9294681 NR Description: receptor-like protein kinase [Arabidopsis
  misc_feature (1)..(44): Homolog of NCBI NO: 9294681 NR Description: receptor-like protein kinase [Arabidopsis
  misc_feature (45)..(721): Homolog of NCBI NO: 15218052 NR Description: receptor-like protein kinase, putative; protein
  misc_feature (1)..(92): Homolog of NCBI NO: 15218052 NR Description: receptor-like protein kinase, putative; protein
  misc_feature (1)..(721): Homolog of NCBI NO: 25387148 NR Description: probable protein kinase [imported] - Arabidopsis >gi|9802795|gb|AAF99864.1|AC015448_14 Putative protein kinase
  misc_feature (1)..(721): Homolog of NCBI NO: 25405503 NR Description: probable protein kinase [imported] - Arabidopsis >gi|9802787|gb|AAF99856.1|AC015448_6 Putative protein kinase
  misc_feature (1)..(721): Homolog of NCBI NO: 25387121 NR Description: probable protein kinase [imported] - Arabidopsis >gi|9802790|gb|AAF99859.1|AC015448_9 Putative protein kinase
  misc_feature (330)..(721): Homolog of NCBI NO: 15218054 NR Description: receptor-like protein kinase, putative; protein
MIHILTTDRLQICLVKTGNATPFISALELRKLMNTTYLTRQGSLYGIDVFDRVWTPYNFGNWSQISTNQSVNINNDYQPPEIAMVTASVPTDPDAAMNISLVGVERTVQFYVFMHFAEIQELKSNDTREFNIMYNNKHIYGPFRPLNFTTSSVFTPTEVVADANGQYIFSLQRTGNSTLPPLLNAMEIYSVNLLPQQETDRKEVDAMMNIKSAYGVNKIDWEGDPCVPLDYKWSGVNCTYVDNETPKIISLDLSTSGLTGEILEFISDLTSLEVLDLSNNSLTGSVPENLSGNELNGSIPATLLDKERRGSITLSIEGNTGLCSSTSCATTKKKKKNTVIAPVAASLVSVFLIGAGIVTFLILKRKKRTKLGLNPNSGTGTTPLHSRSHHGFEPPVIAKNRKLTYIDVVKITNNFERVLGRGGFGVVYYGVLNNEPVAVKMLTESTALGYKQFKAEVELLLRVHHKDLTCLVGYCEEGDKMSLIYEFMANGDLKEHLSGKRGPSILTWEGRLRIAAESAQGLEYLHNGCKPQIVHRDIKTTNILLNEKFQAKLADFGLSRSFPLGTETHVSTIVAGTPGYLDPEYYRTNWLTEKSDVFSFGVVLLELVTNQPVIDMKREKSHIAEWVGLMLSRGDINSIVDPKLQGDFDPNTIWKVVETAMTCLNPSSSRRPTMTQVVMDLKECLNMEMARNMGSRMTDSTNDSSIELSMNFTTELNPGAR

SEQ ID NO: 85852 - protein, 689 aa, Arabidopsis thaliana
  peptide (1)..(689): Ceres Seq. ID no. 12684203
  misc_feature (1)..(689): Homolog of NCBI NO: 15232537 NR Description: serine/threonine-specific protein kinase,
  misc_feature (1)..(12): Homolog of NCBI NO: 15232537 NR Description: serine/threonine-specific protein kinase,
  misc_feature (9)..(689): Homolog of NCBI NO: 9294681 NR Description: receptor-like protein kinase [Arabidopsis
  misc_feature (1)..(12): Homolog of NCBI NO: 9294681 NR Description: receptor-like protein kinase [Arabidopsis
  misc_feature (13)..(689): Homolog of NCBI NO: 15218052 NR Description: receptor-like protein kinase, putative; protein
  misc_feature (1)..(60): Homolog of NCBI NO: 15218052 NR Description: receptor-like protein kinase, putative; protein
  misc_feature (1)..(689): Homolog of NCBI NO: 25387148 NR Description: probable protein kinase [imported] - Arabidopsis >gi|9802795|gb|AAF99864.1|AC015448_14 Putative protein kinase
  misc_feature (1)..(689): Homolog of NCBI NO: 25405503 NR Description: probable protein kinase [imported] - Arabidopsis >gi|9802787|gb|AAF99856.1|AC015448_6 Putative protein kinase
  misc_feature (1)..(689): Homolog of NCBI NO: 25387121 NR Description: probable protein kinase [imported] - Arabidopsis >gi|9802790|gb|AAF99859.1|AC015448_9 Putative protein kinase
  misc_feature (298)..(689): Homolog of NCBI NO: 15218054 NR Description: receptor-like protein kinase, putative; protein
MNTTYLTRQGSLYGIDVFDRVWTPYNFGNWSQISTNQSVNINNDYQPPEIAMVTASVPTDPDAAMNISLVGVERTVQFYVFMHFAEIQELKSNDTREFNIMYNNKHIYGPFRPLNFTTSSVFTPTEVVADANGQYIFSLQRTGNSTLPPLLNAMEIYSVNLLPQQETDRKEVDAMMNIKSAYGVNKIDWEGDPCVPLDYKWSGVNCTYVDNETPKIISLDLSTSGLTGEILEFISDLTSLEVLDLSNNSLTGSVPENLSGNELNGSIPATLLDKERRGSITLSIEGNTGLCSSTSCATTKKKKKNTVIAPVAASLVSVFLIGAGIVTFLILKRKKRTKLGLNPNSGTGTTPLHSRSHHGFEPPVIAKNRKLTYIDVVKITNNFERVLGRGGFGVVYYGVLNNEPVAVKMLTESTALGYKQFKAEVELLLRVHHKDLTCLVGYCEEGDKMSLIYEFMANGDLKEHLSGKRGPSILTWEGRLRIAAESAQGLEYLHNGCKPQIVHRDIKTTNILLNEKFQAKLADFGLSRSFPLGTETHVSTIVAGTPGYLDPEYYRTNWLTEKSDVFSFGVVLLELVTNQPVIDMKREKSHIAEWVGLMLSRGDINSIVDPKLQGDFDPNTIWKVVETAMTCLNPSSSRRPTMTQVVMDLKECLNMEMARNMGSRMTDSTNDSSIELSMNFTTELNPGAR

SEQ ID NO: 85853 - DNA, 2670 bp, Arabidopsis thaliana
  misc_feature (1)..(2670): Ceres Seq. ID no. 12684208
  misc_feature: MA Experiment ID: 20000315 Result: Up-regulated in Transcription
  misc_feature: MA Experiment 20000315 PARAMETER Experiment Name: At_14day_Shoots-Roots_Sub_P Parameter: Age (day) Value: 14
  misc_feature: MA Experiment 20000315 PARAMETER Experiment Name: At_14day_Shoots-Roots_Sub_P Parameter: Organism Value: A. thaliana
  misc_feature: MA Experiment 20000315 PARAMETER Experiment Name: At_14day_Shoots-Roots_Sub_P Parameter: Plant Line Value: WS
  misc_feature: MA Experiment 20000315 PARAMETER Experiment Name: At_14day_Shoots-Roots_Sub_P Parameter: Tissue Value: Shoots vs. Whole Plant
atgaagtctcttcatttttgtttgctctttatgatcgtatcttttacagtttcgagacccgtcgaagctcaagatcaagcaggattcatcagcttggattgtgggttggtgcctaaggaaaccacttatgtggaaacgtcgacgaatataacatacaaatcagacgcaaattacaccgacagcggattggtcgggaagatcaatgatgcacacaagacactggttcaacaaccgctttgggccttgagaagcttccctgagggtgaaagaaactgttacaacttcaaccttaccgtgaacagcacatatttgatcagaggaacttttttgtatgggaattatgacggcttgaatcaatccccaagctttgaccttcacattggtgctagcaaatggacctctgttaacatagtaggagtaacagataccgtaatgcccgagataatccatgtcttaacacaaaaacgtcttcaagtctgtcttgttaagacaggaaagacgacaccgttcatttcgtcattggaattgcgtccgttgataaataacatttacatcgcggaaagtggatcaatggtcttgcaaaatagagtatattttccatctgattcaacatctatcgtcaggtacgatgaggacatacacgaccgagtatggaatccagtttcagatgatgattcctcatcgataagcacggacctccaggtccaaacaaataacttatatgacgtgcctcaattcgtaatgaagactgctgctatccctaaagatgctagtgcgccatggagcttagtgtggactatagataacaccactgctctgtcatatgtatatatgcatttcgcagaaattcaggatttaaaagccaatgaccttagagaattcgacattacttacaatggtggcaagctttggttttcccagtttaggcctaacaaactcagcattctaacgatgttcagtcaagtccccttgacttcatcaaatggcgagtataatttcactttcgaaatgactagtaactcaactcttccaccccttatcaacgccctcgagatatatacaggtctagaaattctacagcttcagacagacaaggatgaagtttctgctatgatgaacatcaaaacgacttatgatttgagcaaaaagataagctggcagggagatccatgtgctcctcagctgtatcggtgggaaggtctagattgtagttatccggacaccgaggcatcacggattatatccttgaacttgaatgcgagcgggttgaacggtaccataacatctgacataaccaagctaacacagttgagcgagctagatttatcaaataatgatttatcaggagagattccggaattttttacggatatgaagttgttgaaactcataaacttaagcggaaatccgaagctcaatctcacagttccagactctcttcagcaaagggtaaacaacaaatctttaacactaattttgggtgaaaaggttaaaatgaatcccacagccaaaaaagagagtaaaaaggttcccatagttcctatcgcagcatcagtggctggcgtgtttgctctgatagttatattggccatctttttcattgttaaaggaaaaaaagggaaaagtgctgaaggaccacccttatcagtcactagtggtacagctaaaagtgagacaagatcatccaatccatcaatcatgagaaaagatcgcaagatcacatatcctcaggtattgaagatgactaataacttcgagagagttcttggtaaaggagggtttggaacagtatatcatggaaacatggaagatgctcaagtagctgtgaaaatgctctcgcactcatcggctcaaggttataaagagttcaaagcagaggttgaacttcttttaagagttcaccacagacatttggtgggacttgtgggttactgtgatgatggagataacttggctctgatttatgaatatatggcaaatggagacctgagggagaatatgttaggaaaacgtggaggcaatgtccttacctgggaaaacaggatgcaaatagctgtagaggctgcacaaggactggagtatctgcacaatggatgtacgcctccaatggtccatagagatgttaaaactactaacatcttattgaatgcacagtgtggagcgaaactagccgactttgggctctctagatcttttccaatcgatggtgaatgtcatgtctcaacagtcgttgcgggtacacctgggtacctagaccctgagtattacagaacaaactggctaagcgagaagagtgacgtgtacagcttcggtgtagtgctattagagatagtcacaaaccagcctgttataaatcaaacaagagagagacctcacatcaatgaatgggttggcttcatgctcagtaaaggagacatcaagagcatcgtcgacccaaaactgatgggggactatgacacaaacggtgcatggaagattgtggagctgggtcttgcctgtgtgaacccgtcttcgaacctaagaccaacaatggcacacgttgtgattgagctaaacgagtgtgtggcctttgaaaatgcaaggcgacaaggtagtgaagagatgtacacaagaagttctactaactttagtcacacgtctgcttccgaattttcccccggggcaagataa

SEQ ID NO: 85854 - protein, 889 aa, Arabidopsis thaliana
  peptide (1)..(889): Ceres Seq. ID no. 12684209
  misc_feature (1)..(889): Homolog of NCBI NO: 25405508 NR Description: probable protein kinase [imported] - Arabidopsis >gi|9802791|gb|AAF99860.1|AC015448_10 Putative protein kinase
  misc_feature (199)..(889): Homolog of NCBI NO: 25387105 NR Description: probable protein kinase [imported] - Arabidopsis >gi|9802789|gb|AAF99858.1|AC015448_8 Putative protein kinase
  misc_feature (451)..(889): Homolog of NCBI NO: 15218075 NR Description: light repressible receptor protein kinase,
  misc_feature (1)..(352): Homolog of NCBI NO: 15218075 NR Description: light repressible receptor protein kinase,
  misc_feature (8)..(561): Homolog of NCBI NO: 15218059 NR Description: light repressible receptor protein kinase,
  misc_feature (669)..(889): Homolog of NCBI NO: 15218059 NR Description: light repressible receptor protein kinase,
  misc_feature (2)..(889): Homolog of NCBI NO: 9294681 NR Description: receptor-like protein kinase [Arabidopsis
  misc_feature (1)..(568): Homolog of NCBI NO: 25387105 NR Description: probable protein kinase [imported] - Arabidopsis >gi|9802789|gb|AAF99858.1|AC015448_8 Putative protein kinase
  misc_feature (398)..(670): Homolog of NCBI NO: 15218059 NR Description: light repressible receptor protein kinase,
  misc_feature (8)..(871): Homolog of NCBI NO: 8778538 NR Description: F22G5.7 [Arabidopsis thaliana]
MKSLHFCLLFMIVSFTVSRPVEAQDQAGFISLDCGLVPKETTYVETSTNITYKSDANYTDSGLVGKINDAHKTLVQQPLWALRSFPEGERNCYNFNLTVNSTYLIRGTFLYGNYDGLNQSPSFDLHIGASKWTSVNIVGVTDTVMPEIIHVLTQKRLQVCLVKTGKTTPFISSLELRPLINNIYIAESGSMVLQNRVYFPSDSTSIVRYDEDIHDRVWNPVSDDDSSSISTDLQVQTNNLYDVPQFVMKTAAIPKDASAPWSLVWTIDNTTALSYVYMHFAEIQDLKANDLREFDITYNGGKLWFSQFRPNKLSILTMFSQVPLTSSNGEYNFTFEMTSNSTLPPLINALEIYTGLEILQLQTDKDEVSAMMNIKTTYDLSKKISWQGDPCAPQLYRWEGLDCSYPDTEASRIISLNLNASGLNGTITSDITKLTQLSELDLSNNDLSGEIPEFFTDMKLLKLINLSGNPKLNLTVPDSLQQRVNNKSLTLILGEKVKMNPTAKKESKKVPIVPIAASVAGVFALIVILAIFFIVKGKKGKSAEGPPLSVTSGTAKSETRSSNPSIMRKDRKITYPQVLKMTNNFERVLGKGGFGTVYHGNMEDAQVAVKMLSHSSAQGYKEFKAEVELLLRVHHRHLVGLVGYCDDGDNLALIYEYMANGDLRENMLGKRGGNVLTWENRMQIAVEAAQGLEYLHNGCTPPMVHRDVKTTNILLNAQCGAKLADFGLSRSFPIDGECHVSTVVAGTPGYLDPEYYRTNWLSEKSDVYSFGVVLLEIVTNQPVINQTRERPHINEWVGFMLSKGDIKSIVDPKLMGDYDTNGAWKIVELGLACVNPSSNLRPTMAHVVIELNECVAFENARRQGSEEMYTRSSTNFSHTSASEFSPGAR

SEQ ID NO: 85855 - protein, 879 aa, Arabidopsis thaliana
  peptide (1)..(879): Ceres Seq. ID no. 12684210
  misc_feature (1)..(879): Homolog of NCBI NO: 25405508 NR Description: probable protein kinase [imported] - Arabidopsis >gi|9802791|gb|AAF99860.1|AC015448_10 Putative protein kinase
  misc_feature (189)..(879): Homolog of NCBI NO: 25387105 NR Description: probable protein kinase [imported] - Arabidopsis >gi|9802789|gb|AAF99858.1|AC015448_8 Putative protein kinase
  misc_feature (441)..(879): Homolog of NCBI NO: 15218075 NR Description: light repressible receptor protein kinase,
  misc_feature (1)..(342): Homolog of NCBI NO: 15218075 NR Description: light repressible receptor protein kinase,
  misc_feature (1)..(551): Homolog of NCBI NO: 15218059 NR Description: light repressible receptor protein kinase,
  misc_feature (659)..(879): Homolog of NCBI NO: 15218059 NR Description: light repressible receptor protein kinase,
  misc_feature (1)..(879): Homolog of NCBI NO: 9294681 NR Description: receptor-like protein kinase [Arabidopsis
  misc_feature (1)..(558): Homolog of NCBI NO: 25387105 NR Description: probable protein kinase [imported] - Arabidopsis >gi|9802789|gb|AAF99858.1|AC015448_8 Putative protein kinase
  misc_feature (388)..(660): Homolog of NCBI NO: 15218059 NR Description: light repressible receptor protein kinase,
  misc_feature (1)..(861): Homolog of NCBI NO: 8778538 NR Description: F22G5.7 [Arabidopsis thaliana]
MIVSFTVSRPVEAQDQAGFISLDCGLVPKETTYVETSTNITYKSDANYTDSGLVGKINDAHKTLVQQPLWALRSFPEGERNCYNFNLTVNSTYLIRGTFLYGNYDGLNQSPSFDLHIGASKWTSVNIVGVTDTVMPEIIHVLTQKRLQVCLVKTGKTTPFISSLELRPLINNIYIAESGSMVLQNRVYFPSDSTSIVRYDEDIHDRVWNPVSDDDSSSISTDLQVQTNNLYDVPQFVMKTAAIPKDASAPWSLVWTIDNTTALSYVYMHFAEIQDLKANDLREFDITYNGGKLWFSQFRPNKLSILTMFSQVPLTSSNGEYNFTFEMTSNSTLPPLINALEIYTGLEILQLQTDKDEVSAMMNIKTTYDLSKKISWQGDPCAPQLYRWEGLDCSYPDTEASRIISLNLNASGLNGTITSDITKLTQLSELDLSNNDLSGEIPEFFTDMKLLKLINLSGNPKLNLTVPDSLQQRVNNKSLTLILGEKVKMNPTAKKESKKVPIVPIAASVAGVFALIVILAIFFIVKGKKGKSAEGPPLSVTSGTAKSETRSSNPSIMRKDRKITYPQVLKMTNNFERVLGKGGFGTVYHGNMEDAQVAVKMLSHSSAQGYKEFKAEVELLLRVHHRHLVGLVGYCDDGDNLALIYEYMANGDLRENMLGKRGGNVLTWENRMQIAVEAAQGLEYLHNGCTPPMVHRDVKTTNILLNAQCGAKLADFGLSRSFPIDGECHVSTVVAGTPGYLDPEYYRTNWLSEKSDVYSFGVVLLEIVTNQPVINQTRERPHINEWVGFMLSKGDIKSIVDPKLMGDYDTNGAWKIVELGLACVNPSSNLRPTMAHVVIELNECVAFENARRQGSEEMYTRSSTNFSHTSASEFSPGAR

SEQ ID NO: 85856 - protein, 745 aa, Arabidopsis thaliana
  peptide (1)..(745): Ceres Seq. ID no. 12684211
  misc_feature (1)..(745): Homolog of NCBI NO: 25405508 NR Description: probable protein kinase [imported] - Arabidopsis >gi|9802791|gb|AAF99860.1|AC015448_10 Putative protein kinase
  misc_feature (55)..(745): Homolog of NCBI NO: 25387105 NR Description: probable protein kinase [imported] - Arabidopsis >gi|9802789|gb|AAF99858.1|AC015448_8 Putative protein kinase
  misc_feature (307)..(745): Homolog of NCBI NO: 15218075 NR Description: light repressible receptor protein kinase,
  misc_feature (1)..(208): Homolog of NCBI NO: 15218075 NR Description: light repressible receptor protein kinase,
  misc_feature (1)..(417): Homolog of NCBI NO: 15218059 NR Description: light repressible receptor protein kinase,
  misc_feature (525)..(745): Homolog of NCBI NO: 15218059 NR Description: light repressible receptor protein kinase,
  misc_feature (1)..(745): Homolog of NCBI NO: 9294681 NR Description: receptor-like protein kinase [Arabidopsis
  misc_feature (1)..(424): Homolog of NCBI NO: 25387105 NR Description: probable protein kinase [imported] - Arabidopsis >gi|9802789|gb|AAF99858.1|AC015448_8 Putative protein kinase
  misc_feature (254)..(526): Homolog of NCBI NO: 15218059 NR Description: light repressible receptor protein kinase,
  misc_feature (1)..(727): Homolog of NCBI NO: 8778538 NR Description: F22G5.7 [Arabidopsis thaliana]
MPEIIHVLTQKRLQVCLVKTGKTTPFISSLELRPLINNIYIAESGSMVLQNRVYFPSDSTSIVRYDEDIHDRVWNPVSDDDSSSISTDLQVQTNNLYDVPQFVMKTAAIPKDASAPWSLVWTIDNTTALSYVYMHFAEIQDLKANDLREFDITYNGGKLWFSQFRPNKLSILTMFSQVPLTSSNGEYNFTFEMTSNSTLPPLINALEIYTGLEILQLQTDKDEVSAMMNIKTTYDLSKKISWQGDPCAPQLYRWEGLDCSYPDTEASRIISLNLNASGLNGTITSDITKLTQLSELDLSNNDLSGEIPEFFTDMKLLKLINLSGNPKLNLTVPDSLQQRVNNKSLTLILGEKVKMNPTAKKESKKVPIVPIAASVAGVFALIVILAIFFIVKGKKGKSAEGPPLSVTSGTAKSETRSSNPSIMRKDRKITYPQVLKMTNNFERVLGKGGFGTVYHGNMEDAQVAVKMLSHSSAQGYKEFKAEVELLLRVHHRHLVGLVGYCDDGDNLALIYEYMANGDLRENMLGKRGGNVLTWENRMQIAVEAAQGLEYLHNGCTPPMVHRDVKTTNILLNAQCGAKLADFGLSRSFPIDGECHVSTVVAGTPGYLDPEYYRTNWLSEKSDVYSFGVVLLEIVTNQPVINQTRERPHINEWVGFMLSKGDIKSIVDPKLMGDYDTNGAWKIVELGLACVNPSSNLRPTMAHVVIELNECVAFENARRQGSEEMYTRSSTNFSHTSASEFSPGAR

SEQ ID NO: 85857 - DNA, 2577 bp, Arabidopsis thaliana
  misc_feature (1)..(2577): Ceres Seq. ID no. 12684212
  misc_feature: MA Experiment ID: 20000314 Result: Up-regulated in Transcription
  misc_feature: MA Experiment 20000314 PARAMETER Experiment Name: At_14day_Shoots-Roots_Sub_P Parameter: Age (day) Value: 14
  misc_feature: MA Experiment 20000314 PARAMETER Experiment Name: At_14day_Shoots-Roots_Sub_P Parameter: Organism Value: A. thaliana
  misc_feature: MA Experiment 20000314 PARAMETER Experiment Name: At_14day_Shoots-Roots_Sub_P Parameter: Plant Line Value: WS
  misc_feature: MA Experiment 20000314 PARAMETER Experiment Name: At_14day_Shoots-Roots_Sub_P Parameter: Tissue Value: Roots vs. Whole Plant
atgaagtctattcatgggtttttgctcttcttgatcacagcttatgtcattttggaatcagttcaagctcaagatcaattaggattcatcagtttggattgtgggttagtccctaagaacgcaacttatacggagaagacgacaaatataacatacaaatcagatgcaaattacatcgatagtggattggtcgggaggatcagtgctgagtacaaagcgcagcttcagcaacaaacttggaccgtaagaagcttccctgagggtgaaagaaactgttacaacttcaaccttaccgctaaaagcagatatctcatcagagcaacctttacgtatgggaattacgatggtttgagacaagtccccaagtttgatattcacattggtcctagcaaatggacttctgttaagttggatggagtaggaaatggtgcagtcctcgagatgattcatgtcttaacacaagaccgtcttcaaatttgtcttgttaagacaggaaaagggataccatttatttcgtcgctggaacttcgtccgttgaacaataatacttacctcacgcaaagtggatcgttgattgggtatgatgaggatatccatgatcgagtctgggttcgacagtttggtaatggattgaaatcgataagcacagaccttttggtcgatacaagtaacccctatgatgtgccacaagctgtggcaaagactgcatgtgtaccttcaaatgctagtcagcctctgatctttgattggactcttgacaacatcacttcacaatcatatgtatacatgcatttcgctgaaatccagactcttaaggataatgacatcagagaattcaacattacttataatggtggtcagaatgtgtactcctatttgaggcctgaaaaattcgagatatcaactctattcgattcaaagcctttgagttctccggatggcagtttcagtttgtctttcacgaagaccggtaactcaactcttcctcctcttatcaacggcctcgagatttataaagtcttagaccttctagaactcgagacagatcaagatgaagtttctgctatgataaacatcaaggcaacgtatgatttgagcaaaaaggttagctggcaaggagatccatgtgctcctaagtcttatcagtgggaaggtttaaactgcagttatccaaactctgatcaacctcggatcatatccttgaacttggcagagaacaagttgaccggtaccataacacctgaaatatccaagctaacacagttgatagagctagatttgtcaaaaaacgatttatcaggagagataccggagttttttgcagatatgaagttattaaaacttataaacttaagtggaaatctaggtctcaacagcacaattccagactctattcaacaaagattagatagcaaatctctaatactaattttgagtaagactgttactaaaactgtcaccctgaaaggcaaaagtaaaaaggttccaatgattcctatcgtagcgtcagtggctggtgtgttcgctctgctagttatcttggccatctttttcgtcgttagaaggaaaaacggggaaagtaataagggtacgaatccatcaatcataacaaaggaacgcaggatcacgtatcccgaggtactaaagatgactaataactttgagagagttcttggtaaaggaggatttggaacagtgtaccatggaaacttggaggatactcaagtagctgtgaaaatgctctctcattcgtcagctcaagggtataaagagttcaaagcagaggttgaacttcttttaagagttcaccatagaaatttggtgggacttgtgggttactgtgatgatggagataacttggctttgatttatgaatacatggctaatggagatctcaaggagaatatgtcaggaaaacgtggaggcaatgtccttacctgggaaaacaggatgcaaatagctgtagaggctgcacaaggattggagtatcttcacaatggatgtacgcctcctatggtccatagagatgttaaaactaccaacatcttattgaatgagcggtatggagcaaaactagccgactttgggctctcaagatctttcccagttgatggcgaaagtcatgtctcgacagtggttgcgggcacacctggttaccttgaccctgagtactacagaacaaactggctaagcgagaagagtgatgtgtacagcttcggtgtagtcctattagagatagtcacaaaccagcctgtgacagataaaacaagagagagaactcacatcaatgaatgggttgggtccatgctcactaaaggggacatcaagagcatccttgacccaaaactgatgggggactatgacacaaacggtgcctggaagattgttgagctggctcttgcatgtgtgaacccgtcttcaaaccggagaccaacaatggcacacgtcgtgactgagctaaacgaatgtgtggccttagaaaatgcaaggcgacaaggtcgtgaagagatgcacacaagtggttatgttgactttagtcgctcttctgcttccgaattttcccctggagccagataa

SEQ ID NO: 85858 - protein, 858 aa, Arabidopsis thaliana
  peptide (1)..(858): Ceres Seq. ID no. 12684213
  misc_feature (7)..(639): Homolog of NCBI NO: 15218059 NR Description: light repressible receptor protein kinase,
  misc_feature (606)..(858): Homolog of NCBI NO: 15218059 NR Description: light repressible receptor protein kinase,
  misc_feature (436)..(858): Homolog of NCBI NO: 15218075 NR Description: light repressible receptor protein kinase,
  misc_feature (1)..(340): Homolog of NCBI NO: 15218075 NR Description: light repressible receptor protein kinase,
  misc_feature (9)..(478): Homolog of NCBI NO: 9294681 NR Description: receptor-like protein kinase [Arabidopsis
  misc_feature (401)..(858): Homolog of NCBI NO: 9294681 NR Description: receptor-like protein kinase [Arabidopsis
  misc_feature (184)..(858): Homolog of NCBI NO: 25387121 NR Description: probable protein kinase [imported] - Arabidopsis >gi|9802790|gb|AAF99859.1|AC015448_9 Putative protein kinase
  misc_feature (9)..(858): Homolog of NCBI NO: 15218050 NR Description: light repressible receptor protein kinase,
  misc_feature (28)..(858): Homolog of NCBI NO: 25387154 NR Description: protein F22G5.6 [imported] - Arabidopsis thaliana
  misc_feature (7)..(537): Homolog of NCBI NO: 25387121 NR Description: probable protein kinase [imported] - Arabidopsis >gi|9802790|gb|AAF99859.1|AC015448_9 Putative protein kinase
MKSIHGFLLFLITAYVILESVQAQDQLGFISLDCGLVPKNATYTEKTTNITYKSDANYIDSGLVGRISAEYKAQLQQQTWTVRSFPEGERNCYNFNLTAKSRYLIRATFTYGNYDGLRQVPKFDIHIGPSKWTSVKLDGVGNGAVLEMIHVLTQDRLQICLVKTGKGIPFISSLELRPLNNNTYLTQSGSLIGYDEDIHDRVWVRQFGNGLKSISTDLLVDTSNPYDVPQAVAKTACVPSNASQPLIFDWTLDNITSQSYVYMHFAEIQTLKDNDIREFNITYNGGQNVYSYLRPEKFEISTLFDSKPLSSPDGSFSLSFTKTGNSTLPPLINGLEIYKVLDLLELETDQDEVSAMINIKATYDLSKKVSWQGDPCAPKSYQWEGLNCSYPNSDQPRIISLNLAENKLTGTITPEISKLTQLIELDLSKNDLSGEIPEFFADMKLLKLINLSGNLGLNSTIPDSIQQRLDSKSLILILSKTVTKTVTLKGKSKKVPMIPIVASVAGVFALLVILAIFFVVRRKNGESNKGTNPSIITKERRITYPEVLKMTNNFERVLGKGGFGTVYHGNLEDTQVAVKMLSHSSAQGYKEFKAEVELLLRVHHRNLVGLVGYCDDGDNLALIYEYMANGDLKENMSGKRGGNVLTWENRMQIAVEAAQGLEYLHNGCTPPMVHRDVKTTNILLNERYGAKLADFGLSRSFPVDGESHVSTVVAGTPGYLDPEYYRTNWLSEKSDVYSFGVVLLEIVTNQPVTDKTRERTHINEWVGSMLTKGDIKSILDPKLMGDYDTNGAWKIVELALACVNPSSNRRPTMAHVVTELNECVALENARRQGREEMHTSGYVDFSRSSASEFSPGAR

SEQ ID NO: 85859 - protein, 711 aa, Arabidopsis thaliana
  peptide (1)..(711): Ceres Seq. ID no. 12684214
  misc_feature (1)..(492): Homolog of NCBI NO: 15218059 NR Description: light repressible receptor protein kinase,
  misc_feature (459)..(711): Homolog of NCBI NO: 15218059 NR Description: light repressible receptor protein kinase,
  misc_feature (289)..(711): Homolog of NCBI NO: 15218075 NR Description: light repressible receptor protein kinase,
  misc_feature (1)..(193): Homolog of NCBI NO: 15218075 NR Description: light repressible receptor protein kinase,
  misc_feature (1)..(331): Homolog of NCBI NO: 9294681 NR Description: receptor-like protein kinase [Arabidopsis
  misc_feature (254)..(711): Homolog of NCBI NO: 9294681 NR Description: receptor-like protein kinase [Arabidopsis
  misc_feature (37)..(711): Homolog of NCBI NO: 25387121 NR Description: probable protein kinase [imported] - Arabidopsis >gi|9802790|gb|AAF99859.1|AC015448_9 Putative protein kinase
  misc_feature (1)..(711): Homolog of NCBI NO: 15218050 NR Description: light repressible receptor protein kinase,
  misc_feature (1)..(711): Homolog of NCBI NO: 25387154 NR Description: protein F22G5.6 [imported] - Arabidopsis thaliana
  misc_feature (1)..(390): Homolog of NCBI NO: 25387121 NR Description: probable protein kinase [imported] - Arabidopsis >gi|9802790|gb|AAF99859.1|AC015448_9 Putative protein kinase
MIHVLTQDRLQICLVKTGKGIPFISSLELRPLNNNTYLTQSGSLIGYDEDIHDRVWVRQFGNGLKSISTDLLVDTSNPYDVPQAVAKTACVPSNASQPLIFDWTLDNITSQSYVYMHFAEIQTLKDNDIREFNITYNGGQNVYSYLRPEKFEISTLFDSKPLSSPDGSFSLSFTKTGNSTLPPLINGLEIYKVLDLLELETDQDEVSAMINIKATYDLSKKVSWQGDPCAPKSYQWEGLNCSYPNSDQPRIISLNLAENKLTGTITPEISKLTQLIELDLSKNDLSGEIPEFFADMKLLKLINLSGNLGLNSTIPDSIQQRLDSKSLILILSKTVTKTVTLKGKSKKVPMIPIVASVAGVFALLVILAIFFVVRRKNGESNKGTNPSIITKERRITYPEVLKMTNNFERVLGKGGFGTVYHGNLEDTQVAVKMLSHSSAQGYKEFKAEVELLLRVHHRNLVGLVGYCDDGDNLALIYEYMANGDLKENMSGKRGGNVLTWENRMQIAVEAAQGLEYLHNGCTPPMVHRDVKTTNILLNERYGAKLADFGLSRSFPVDGESHVSTVVAGTPGYLDPEYYRTNWLSEKSDVYSFGVVLLEIVTNQPVTDKTRERTHINEWVGSMLTKGDIKSILDPKLMGDYDTNGAWKIVELALACVNPSSNRRPTMAHVVTELNECVALENARRQGREEMHTSGYVDFSRSSASEFSPGAR

SEQ ID NO: 85860 - protein, 596 aa, Arabidopsis thaliana
  peptide (1)..(596): Ceres Seq. ID no. 12684215
  misc_feature (1)..(377): Homolog of NCBI NO: 15218059 NR Description: light repressible receptor protein kinase,
  misc_feature (344)..(596): Homolog of NCBI NO: 15218059 NR Description: light repressible receptor protein kinase,
  misc_feature (174)..(596): Homolog of NCBI NO: 15218075 NR Description: light repressible receptor protein kinase,
  misc_feature (1)..(78): Homolog of NCBI NO: 15218075 NR Description: light repressible receptor protein kinase,
  misc_feature (1)..(216): Homolog of NCBI NO: 9294681 NR Description: receptor-like protein kinase [Arabidopsis
  misc_feature (139)..(596): Homolog of NCBI NO: 9294681 NR Description: receptor-like protein kinase [Arabidopsis
  misc_feature (1)..(596): Homolog of NCBI NO: 25387121 NR Description: probable protein kinase [imported] - Arabidopsis >gi|9802790|gb|AAF99859.1|AC015448_9 Putative protein kinase
  misc_feature (1)..(596): Homolog of NCBI NO: 15218050 NR Description: light repressible receptor protein kinase,
  misc_feature (1)..(596): Homolog of NCBI NO: 25387154 NR Description: protein F22G5.6 [imported] - Arabidopsis thaliana
  misc_feature (1)..(275): Homolog of NCBI NO: 25387121 NR Description: probable protein kinase [imported] - Arabidopsis >gi|9802790|gb|AAF99859.1|AC015448_9 Putative protein kinase
MHFAEIQTLKDNDIREFNITYNGGQNVYSYLRPEKFEISTLFDSKPLSSPDGSFSLSFTKTGNSTLPPLINGLEIYKVLDLLELETDQDEVSAMINIKATYDLSKKVSWQGDPCAPKSYQWEGLNCSYPNSDQPRIISLNLAENKLTGTITPEISKLTQLIELDLSKNDLSGEIPEFFADMKLLKLINLSGNLGLNSTIPDSIQQRLDSKSLILILSKTVTKTVTLKGKSKKVPMIPIVASVAGVFALLVILAIFFVVRRKNGESNKGTNPSIITKERRITYPEVLKMTNNFERVLGKGGFGTVYHGNLEDTQVAVKMLSHSSAQGYKEFKAEVELLLRVHHRNLVGLVGYCDDGDNLALIYEYMANGDLKENMSGKRGGNVLTWENRMQIAVEAAQGLEYLHNGCTPPMVHRDVKTTNILLNERYGAKLADFGLSRSFPVDGESHVSTVVAGTPGYLDPEYYRTNWLSEKSDVYSFGVVLLEIVTNQPVTDKTRERTHINEWVGSMLTKGDIKSILDPKLMGDYDTNGAWKIVELALACVNPSSNRRPTMAHVVTELNECVALENARRQGREEMHTSGYVDFSRSSASEFSPGAR

SEQ ID NO: 85861 - DNA, 2631 bp, Arabidopsis thaliana
  misc_feature (1)..(2631): Ceres Seq. ID no. 12684216
  misc_feature: MA Experiment ID: 20000171 Result: Down-regulated in Transcription
  misc_feature: MA Experiment 20000171 PARAMETER Experiment Name: At_42deg_Heat_P Parameter: Age (day) Value: 14
  misc_feature: MA Experiment 20000171 PARAMETER Experiment Name: At_42deg_Heat_P Parameter: Organism Value: A. thaliana
  misc_feature: MA Experiment 20000171 PARAMETER Experiment Name: At_42deg_Heat_P Parameter: Plant Line Value: WS
  misc_feature: MA Experiment 20000171 PARAMETER Experiment Name: At_42deg_Heat_P Parameter: Temperature (deg C) Value: 42 vs. 22
  misc_feature: MA Experiment 20000171 PARAMETER Experiment Name: At_42deg_Heat_P Parameter: Timepoint (hr) Value: 1
  misc_feature: MA Experiment 20000171 PARAMETER Experiment Name: At_42deg_Heat_P Parameter: Tissue Value: Aerial
  misc_feature: MA Experiment ID: 20000173 Result: Down-regulated in Transcription
  misc_feature: MA Experiment 20000173 PARAMETER Experiment Name: At_42deg_Heat_P Parameter: Age (day) Value: 14
  misc_feature: MA Experiment 20000173 PARAMETER Experiment Name: At_42deg_Heat_P Parameter: Organism Value: A. thaliana
  misc_feature: MA Experiment 20000173 PARAMETER Experiment Name: At_42deg_Heat_P Parameter: Plant Line Value: WS
  misc_feature: MA Experiment 20000173 PARAMETER Experiment Name: At_42deg_Heat_P Parameter: Temperature (deg C) Value: 42 vs. 22
  misc_feature: MA Experiment 20000173 PARAMETER Experiment Name: At_42deg_Heat_P Parameter: Timepoint (hr) Value: 6
  misc_feature: MA Experiment 20000173 PARAMETER Experiment Name: At_42deg_Heat_P Parameter: Tissue Value: Aerial
  misc_feature: MA Experiment ID: 20000182 Result: Up-regulated in Transcription
  misc_feature: MA Experiment 20000182 PARAMETER Experiment Name: At_2mM_SA_P Parameter: Age (day) Value: 14
  misc_feature: MA Experiment 20000182 PARAMETER Experiment Name: At_2mM_SA_P Parameter: Organism Value: A. thaliana
  misc_feature: MA Experiment 20000182 PARAMETER Experiment Name: At_2mM_SA_P Parameter: Plant Line Value: WS
  misc_feature: MA Experiment 20000182 PARAMETER Experiment Name: At_2mM_SA_P Parameter: Timepoint (hr) Value: 6
  misc_feature: MA Experiment 20000182 PARAMETER Experiment Name: At_2mM_SA_P Parameter: Tissue Value: Aerial
  misc_feature: MA Experiment 20000182 PARAMETER Experiment Name: At_2mM_SA_P Parameter: Treatment Value: 2mM SA vs. No Treatment
  misc_feature: MA Experiment ID: 20000184 Result: Down-regulated in Transcription
  misc_feature: MA Experiment 20000184 PARAMETER Experiment Name: At_Shoots__P Parameter: Age (day) Value: 7
  misc_feature: MA Experiment 20000184 PARAMETER Experiment Name: At_Shoots__P Parameter: Tissue Value: Shoots vs. Whole Plant
  misc_feature: MA Experiment ID: 20000227 Result: Down-regulated in Transcription
  misc_feature: MA Experiment 20000227 PARAMETER Experiment Name: At_Root-Tips-vs-Tops_P Parameter: Tissue Value: Root Tips vs. Root Tops
  misc_feature: MA Experiment ID: 20000451 Result: Down-regulated in Transcription
  misc_feature: MA Experiment 20000451 PARAMETER Experiment Name: At_CS6879_Shoots-Roots_P Parameter: Age (day) Value: 14
  misc_feature: MA Experiment 20000451 PARAMETER Experiment Name: At_CS6879_Shoots-Roots_P Parameter: Organism Value: A. thaliana
  misc_feature: MA Experiment 20000451 PARAMETER Experiment Name: At_CS6879_Shoots-Roots_P Parameter: Plant Line Value: CS6879 vs. WS
  misc_feature: MA Experiment 20000451 PARAMETER Experiment Name: At_CS6879_Shoots-Roots_P Parameter: Tissue Value: Roots
  misc_feature: MA Experiment ID: 20000456 Result: Up-regulated in Transcription
  misc_feature: MA Experiment 20000456 PARAMETER Experiment Name: At_100uM_BA_P Parameter: Age (day) Value: 14
  misc_feature: MA Experiment 20000456 PARAMETER Experiment Name: At_100uM_BA_P Parameter: Organism Value: A. thaliana
  misc_feature: MA Experiment 20000456 PARAMETER Experiment Name: At_100uM_BA_P Parameter: Plant Line Value: WS
  misc_feature: MA Experiment 20000456 PARAMETER Experiment Name: At_100uM_BA_P Parameter: Timepoint (hr) Value: 6
  misc_feature: MA Experiment 20000456 PARAMETER Experiment Name: At_100uM_BA_P Parameter: Tissue Value: Aerial
  misc_feature: MA Experiment 20000456 PARAMETER Experiment Name: At_100uM_BA_P Parameter: Treatment Value: 100uM BA vs. No Treatment
  misc_feature: MA Experiment ID: 20000460 Result: Down-regulated in Transcription
  misc_feature: MA Experiment 20000460 PARAMETER Experiment Name: At_10percent_PEG_P Parameter: Age (day) Value: 12
  misc_feature: MA Experiment 20000460 PARAMETER Experiment Name: At_10percent_PEG_P Parameter: Organism Value: A. thaliana
  misc_feature: MA Experiment 20000460 PARAMETER Experiment Name: At_10percent_PEG_P Parameter: Plant Line Value: WS
  misc_feature: MA Experiment 20000460 PARAMETER Experiment Name: At_10percent_PEG_P Parameter: Timepoint (day) Value: 12
  misc_feature: MA Experiment 20000460 PARAMETER Experiment Name: At_10percent_PEG_P Parameter: Tissue Value: Whole Plant
  misc_feature: MA Experiment 20000460 PARAMETER Experiment Name: At_10percent_PEG_P Parameter: Treatment Value: 10percent PEG vs. No Treatment
  misc_feature: MA Experiment ID: 20000527 Result: Down-regulated in Transcription
  misc_feature: MA Experiment 20000527 PARAMETER Experiment Name: At_10percent_PEG_P Parameter: Age (day) Value: 20
  misc_feature: MA Experiment 20000527 PARAMETER Experiment Name: At_10percent_PEG_P Parameter: Organism Value: A. thaliana
  misc_feature: MA Experiment 20000527 PARAMETER Experiment Name: At_10percent_PEG_P Parameter: Plant Line Value: WS
  misc_feature: MA Experiment 20000527 PARAMETER Experiment Name: At_10percent_PEG_P Parameter: Timepoint (day) Value: 20
  misc_feature: MA Experiment 20000527 PARAMETER Experiment Name: At_10percent_PEG_P Parameter: Tissue Value: Whole Plant
  misc_feature: MA Experiment 20000527 PARAMETER Experiment Name: At_10percent_PEG_P Parameter: Treatment Value: 10percent PEG vs. No Treatment
  misc_feature: MA Experiment ID: 20000573 Result: Up-regulated in Transcription
  misc_feature: MA Experiment 20000573 PARAMETER Experiment Name: At_100uM_ABA_Mutants__P Parameter: Organism Value: A. thaliana
  misc_feature: MA Experiment 20000573 PARAMETER Experiment Name: At_100uM_ABA_Mutants__P Parameter: Plant Line Value: CS22 vs. Ler wt
  misc_feature: MA Experiment 20000573 PARAMETER Experiment Name: At_100uM_ABA_Mutants__P Parameter: Timepoint (hr) Value: N/A
  misc_feature: MA Experiment 20000573 PARAMETER Experiment Name: At_100uM_ABA_Mutants__P Parameter: Tissue Value: Whole Plant
  misc_feature: MA Experiment 20000573 PARAMETER Experiment Name: At_100uM_ABA_Mutants__P Parameter: Treatment Value: None
  misc_feature: MA Experiment ID: 20000574 Result: Up-regulated in Transcription
  misc_feature: MA Experiment 20000574 PARAMETER Experiment Name: At_100uM_ABA_Mutants__P Parameter: Organism Value: A. thaliana
  misc_feature: MA Experiment 20000574 PARAMETER Experiment Name: At_100uM_ABA_Mutants__P Parameter: Plant Line Value: CS23 vs. Ler wt
  misc_feature: MA Experiment 20000574 PARAMETER Experiment Name: At_100uM_ABA_Mutants__P Parameter: Timepoint (hr) Value: N/A
  misc_feature: MA Experiment 20000574 PARAMETER Experiment Name: At_100uM_ABA_Mutants__P Parameter: Tissue Value: Whole Plant
  misc_feature: MA Experiment 20000574 PARAMETER Experiment Name: At_100uM_ABA_Mutants__P Parameter: Treatment Value: None
  misc_feature: MA Experiment ID: 20000709 Result: Down-regulated in Transcription
  misc_feature: MA Experiment 20000709 PARAMETER Experiment Name: At_15mM_NH4NO3_L-to-H_P Parameter: Age (hr) Value: 14
  misc_feature: MA Experiment 20000709 PARAMETER Experiment Name: At_15mM_NH4NO3_L-to-H_P Parameter: Organism Value: A. thaliana
  misc_feature: MA Experiment 20000709 PARAMETER Experiment Name: At_15mM_NH4NO3_L-to-H_P Parameter: Plant Line Value: WS
  misc_feature: MA Experiment 20000709 PARAMETER Experiment Name: At_15mM_NH4NO3_L-to-H_P Parameter: Timepoint (hr) Value: 4
  misc_feature: MA Experiment 20000709 PARAMETER Experiment Name: At_15mM_NH4NO3_L-to-H_P Parameter: Tissue Value: Aerial
  misc_feature: MA Experiment 20000709 PARAMETER Experiment Name: At_15mM_NH4NO3_L-to-H_P Parameter: Treatment Value: 15mM NH4NO3 vs. 30mM Mannitol
  misc_feature: MA Experiment ID: 20000794 Result: Down-regulated in Transcription
  misc_feature: MA Experiment 20000794 PARAMETER Experiment Name: At_Petals_P Parameter: Age (day) Value: 23-25 days
  misc_feature: MA Experiment 20000794 PARAMETER Experiment Name: At_Petals_P Parameter: Plant Line Value: WS
  misc_feature: MA Experiment 20000794 PARAMETER Experiment Name: At_Petals_P Parameter: Tissue Value: Petals vs. Whole plant
  misc_feature: MA Experiment ID: 20001556 Result: Down-regulated in Transcription
  misc_feature: MA Experiment 20001556 PARAMETER Experiment Name: At_Drought_Soil_Dry_P Parameter: Age (day) Value: 26
  misc_feature: MA Experiment 20001556 PARAMETER Experiment Name: At_Drought_Soil_Dry_P Parameter: Organism Value: A. thaliana
  misc_feature: MA Experiment 20001556 PARAMETER Experiment Name: At_Drought_Soil_Dry_P Parameter: Plant Line Value: WS
  misc_feature: MA Experiment 20001556 PARAMETER Experiment Name: At_Drought_Soil_Dry_P Parameter: Post Timepoint (hr) Value: None
  misc_feature: MA Experiment 20001556 PARAMETER Experiment Name: At_Drought_Soil_Dry_P Parameter: Post-Treatment Value: None
  misc_feature: MA Experiment 20001556 PARAMETER Experiment Name: At_Drought_Soil_Dry_P Parameter: Timepoint (day) Value: 12
  misc_feature: MA Experiment 20001556 PARAMETER Experiment Name: At_Drought_Soil_Dry_P Parameter: Treatment Value: Drought vs. No Drought
  misc_feature: MA Experiment ID: 20001560 Result: Down-regulated in Transcription
  misc_feature: MA Experiment 20001560 PARAMETER Experiment Name: At_Drought_Soil_Dry_P Parameter: Age (day) Value: 28
  misc_feature: MA Experiment 20001560 PARAMETER Experiment Name: At_Drought_Soil_Dry_P Parameter: Organism Value: A. thaliana
  misc_feature: MA Experiment 20001560 PARAMETER Experiment Name: At_Drought_Soil_Dry_P Parameter: Plant Line Value: WS
  misc_feature: MA Experiment 20001560 PARAMETER Experiment Name: At_Drought_Soil_Dry_P Parameter: Post Timepoint (hr) Value: None
  misc_feature: MA Experiment 20001560 PARAMETER Experiment Name: At_Drought_Soil_Dry_P Parameter: Post-Treatment Value: None
  misc_feature: MA Experiment 20001560 PARAMETER Experiment Name: At_Drought_Soil_Dry_P Parameter: Timepoint (day) Value: 14
  misc_feature: MA Experiment 20001560 PARAMETER Experiment Name: At_Drought_Soil_Dry_P Parameter: Treatment Value: Drought vs. No Drought
  misc_feature: MA Experiment ID: 20001904 Result: Down-regulated in Transcription
  misc_feature: MA Experiment 20001904 PARAMETER Experiment Name: At_Drought_Reproduction_P Parameter: Age (day) Value: 37
  misc_feature: MA Experiment 20001904 PARAMETER Experiment Name: At_Drought_Reproduction_P Parameter: Organism Value: A. thaliana
  misc_feature: MA Experiment 20001904 PARAMETER Experiment Name: At_Drought_Reproduction_P Parameter: Plant Line Value: WS
  misc_feature: MA Experiment 20001904 PARAMETER Experiment Name: At_Drought_Reproduction_P Parameter: Timepoint (day) Value: 7
  misc_feature: MA Experiment 20001904 PARAMETER Experiment Name: At_Drought_Reproduction_P Parameter: Tissue Value: Rosettes
  misc_feature: MA Experiment 20001904 PARAMETER Experiment Name: At_Drought_Reproduction_P Parameter: Treatment Value: Drought vs. No Drought
atgaggtttttgtctttcttgatcttcgttttcgcagttcttggattggttcaagctcaagaccaatcaggattcataagcttagattgtggtttggtgcctacggaaattacttatgtggaaaagtcgacgaatataacatacagatcagacgcaacttacatcgacagtggagttcccgggaagatcaatgaagtgtacagaacacagtttcagcaacaaatttgggccttgagaagcttccctgagggtcaaagaaattgttacaacttcagtctcaccgcaaaacgtaagtatctaatcagaggaacctttatctatgggaattatgacggtttgaatcaactcccgagctttgatctttacatcggtccaaacaaatggacctctgtttcgatccccggagtgagaaatggttcagtctccgagatgatccatgtcttaagacaagaccatcttcaaatttgtcttgtgaaaacaggagaaactacaccgtttatttcttcattggaacttcgtcctttgaacaataatacatacgtcacaaaaagtggatcgcttattgtggtcgcaagactttacttttcacccactccaccatttctcaggtatgatgaggacgtccatgaccgaatttggattccattcttagataacaaaaattccttgttaagcacggaactctctgttgatacaagtaacttctacaatgtgcctcaaactgtagcgaaaactgctgctgtccctttaaatgctactcagcctctgaaaataaattggagtctcgacgacatcacttcacagtcatatatatacatgcatttcgctgaaatcgagaatcttgaagctaatgagaccagagaattcaatattacttacaatggtggcgaaaattggttctcctattttagacctccaaagtttcgtataacaactgtatacaatccagcagctgtgagttctctagatgggaatttcaacttcactttctcgatgaccggtaactctactcatcctcctcttatcaacggccttgagatttatcaagttctagagcttccacagcttgatacataccaagatgaagtttccgctatgatgaatatcaagacaatatatggattgagcaaaaggtctagctggcaaggagatccatgtgctcctgagttatatagatgggaaggtttaaactgtagttatccaaactttgcgccaccgcagatcatatccttgaacttgagtggaagcaatttgagtggtaccataacatctgatatatccaagctaacacatttgagagaactagatttatcaaacaatgacttatcaggagatattccatttgttttttctgatatgaagaatttgacactcataaacttgagtggaaacaagaatctaaatcgctcagttccagagactcttcagaagaggatagataacaaatctttaacactaattagagatgaaaccggaaaaaatagtacaaatgtagttgctatcgcagcatcagtggctagcgtgtttgctgtgctagttatcttggctatcgtttttgtcgtcataaggaaaaaacagagaactaatgaagcttcaggaccccgatcattcactactggcacggttaagagtgatgcaagatcatcgagttcatcaatcataacaaaggaacgcaagttcacttattcggaggtactaaagatgactaaaaactttgagagagttcttggtaaaggagggtttggaacagtgtatcatggtaacttggatgatactcaagtagctgtgaaaatgctttctcattcatcagctcaaggttataaagagttcaaagcagaggttgaacttcttttaagagttcatcacagacatttggtgggacttgttggttactgtgatgatggagacaacttagctctgatctatgaatatatggaaaaaggagacctgagggaaaatatgtcaggaaaacacagtgtcaatgtcctaagctgggaaacaagaatgcaaatagctgtagaggcagcacaaggattggagtatttgcataacggatgtaggcctcctatggtacatagagatgtgaaaccaaccaacattttattaaatgagcggtctcaagcaaaactagccgactttgggctatcgagatcttttcctgttgatggtgaatctcatgtcatgacagtcgttgcaggaacacctggttacttagatcctgagtattacagaacaaactggctaagcgagaagagtgatgtgtacagctttggtgtagtgcttttagagatagtcacaaaccagcctgtgatgaataaaaaccgagagagacctcatatcaatgaatgggttatgttcatgcttaccaatggggatatcaagagtattgtcgacccgaaactgaatgaagactatgacacaaacggtgtgtggaaggttgtagagttggctttagcttgtgtaaacccgtcttcaagccgtagaccgacaatgccacacgtggtgatggagctaaacgaatgtcttgctttggaaatagaaaggaaacaaggtagtcaagcgacgtacataaaggaatctgttgagtttagtccatcttctgcttctgatttttcccctttagctaggtaa

SEQ ID NO: 85862 - protein, 876 aa, Arabidopsis thaliana
  peptide (1)..(876): Ceres Seq. ID no. 12684217
  misc_feature (4)..(876): Homolog of NCBI NO: 25405505 NR Description: probable protein kinase [imported] - Arabidopsis >gi|9802788|gb|AAF99857.1|AC015448_7 Putative protein kinase
  misc_feature (3)..(873): Homolog of NCBI NO: 25405508 NR Description: probable protein kinase [imported] - Arabidopsis >gi|9802791|gb|AAF99860.1|AC015448_10 Putative protein kinase
  misc_feature (450)..(876): Homolog of NCBI NO: 15218054 NR Description: receptor-like protein kinase, putative; protein
  misc_feature (4)..(435): Homolog of NCBI NO: 15218054 NR Description: receptor-like protein kinase, putative; protein
  misc_feature (460)..(873): Homolog of NCBI NO: 15218075 NR Description: light repressible receptor protein kinase,
  misc_feature (3)..(372): Homolog of NCBI NO: 15218075 NR Description: light repressible receptor protein kinase,
  misc_feature (4)..(876): Homolog of NCBI NO: 25387154 NR Description: protein F22G5.6 [imported] - Arabidopsis thaliana
  misc_feature (284)..(613): Homolog of NCBI NO: 15238490 NR Description: leucine-rich repeat transmembrane protein kinase,
  misc_feature (639)..(859): Homolog of NCBI NO: 15238490 NR Description: leucine-rich repeat transmembrane protein kinase,
  misc_feature (175)..(260): Homolog of NCBI NO: 15238490 NR Description: leucine-rich repeat transmembrane protein kinase,
MRFLSFLIFVFAVLGLVQAQDQSGFISLDCGLVPTEITYVEKSTNITYRSDATYIDSGVPGKINEVYRTQFQQQIWALRSFPEGQRNCYNFSLTAKRKYLIRGTFIYGNYDGLNQLPSFDLYIGPNKWTSVSIPGVRNGSVSEMIHVLRQDHLQICLVKTGETTPFISSLELRPLNNNTYVTKSGSLIVVARLYFSPTPPFLRYDEDVHDRIWIPFLDNKNSLLSTELSVDTSNFYNVPQTVAKTAAVPLNATQPLKINWSLDDITSQSYIYMHFAEIENLEANETREFNITYNGGENWFSYFRPPKFRITTVYNPAAVSSLDGNFNFTFSMTGNSTHPPLINGLEIYQVLELPQLDTYQDEVSAMMNIKTIYGLSKRSSWQGDPCAPELYRWEGLNCSYPNFAPPQIISLNLSGSNLSGTITSDISKLTHLRELDLSNNDLSGDIPFVFSDMKNLTLINLSGNKNLNRSVPETLQKRIDNKSLTLIRDETGKNSTNVVAIAASVASVFAVLVILAIVFVVIRKKQRTNEASGPRSFTTGTVKSDARSSSSSIITKERKFTYSEVLKMTKNFERVLGKGGFGTVYHGNLDDTQVAVKMLSHSSAQGYKEFKAEVELLLRVHHRHLVGLVGYCDDGDNLALIYEYMEKGDLRENMSGKHSVNVLSWETRMQIAVEAAQGLEYLHNGCRPPMVHRDVKPTNILLNERSQAKLADFGLSRSFPVDGESHVMTVVAGTPGYLDPEYYRTNWLSEKSDVYSFGVVLLEIVTNQPVMNKNRERPHINEWVMFMLTNGDIKSIVDPKLNEDYDTNGVWKVVELALACVNPSSSRRPTMPHVVMELNECLALEIERKQGSQATYIKESVEFSPSSASDFSPLAR

SEQ ID NO: 85863 - protein, 733 aa, Arabidopsis thaliana
  peptide (1)..(733): Ceres Seq. ID no. 12684218
  misc_feature (1)..(733): Homolog of NCBI NO: 25405505 NR Description: probable protein kinase [imported] - Arabidopsis >gi|9802788|gb|AAF99857.1|AC015448_7 Putative protein kinase
  misc_feature (1)..(730): Homolog of NCBI NO: 25405508 NR Description: probable protein kinase [imported] - Arabidopsis >gi|9802791|gb|AAF99860.1|AC015448_10 Putative protein kinase
  misc_feature (307)..(733): Homolog of NCBI NO: 15218054 NR Description: receptor-like protein kinase, putative; protein
  misc_feature (1)..(292): Homolog of NCBI NO: 15218054 NR Description: receptor-like protein kinase, putative; protein
  misc_feature (317)..(730): Homolog of NCBI NO: 15218075 NR Description: light repressible receptor protein kinase,
  misc_feature (1)..(229): Homolog of NCBI NO: 15218075 NR Description: light repressible receptor protein kinase,
  misc_feature (1)..(733): Homolog of NCBI NO: 25387154 NR Description: protein F22G5.6 [imported] - Arabidopsis thaliana
  misc_feature (141)..(470): Homolog of NCBI NO: 15238490 NR Description: leucine-rich repeat transmembrane protein kinase,
  misc_feature (496)..(716): Homolog of NCBI NO: 15238490 NR Description: leucine-rich repeat transmembrane protein kinase,
  misc_feature (32)..(117): Homolog of NCBI NO: 15238490 NR Description: leucine-rich repeat transmembrane protein kinase,
MIHVLRQDHLQICLVKTGETTPFISSLELRPLNNNTYVTKSGSLIVVARLYFSPTPPFLRYDEDVHDRIWIPFLDNKNSLLSTELSVDTSNFYNVPQTVAKTAAVPLNATQPLKINWSLDDITSQSYIYMHFAEIENLEANETREFNITYNGGENWFSYFRPPKFRITTVYNPAAVSSLDGNFNFTFSMTGNSTHPPLINGLEIYQVLELPQLDTYQDEVSAMMNIKTIYGLSKRSSWQGDPCAPELYRWEGLNCSYPNFAPPQIISLNLSGSNLSGTITSDISKLTHLRELDLSNNDLSGDIPFVFSDMKNLTLINLSGNKNLNRSVPETLQKRIDNKSLTLIRDETGKNSTNVVAIAASVASVFAVLVILAIVFVVIRKKQRTNEASGPRSFTTGTVKSDARSSSSSIITKERKFTYSEVLKMTKNFERVLGKGGFGTVYHGNLDDTQVAVKMLSHSSAQGYKEFKAEVELLLRVHHRHLVGLVGYCDDGDNLALIYEYMEKGDLRENMSGKHSVNVLSWETRMQIAVEAAQGLEYLHNGCRPPMVHRDVKPTNILLNERSQAKLADFGLSRSFPVDGESHVMTVVAGTPGYLDPEYYRTNWLSEKSDVYSFGVVLLEIVTNQPVMNKNRERPHINEWVMFMLTNGDIKSIVDPKLNEDYDTNGVWKVVELALACVNPSSSRRPTMPHVVMELNECLALEIERKQGSQATYIKESVEFSPSSASDFSPLAR

SEQ ID NO: 85864 - protein, 604 aa, Arabidopsis thaliana
  peptide (1)..(604): Ceres Seq. ID no. 12684219
  misc_feature (1)..(604): Homolog of NCBI NO: 25405505 NR Description: probable protein kinase [imported] - Arabidopsis >gi|9802788|gb|AAF99857.1|AC015448_7 Putative protein kinase
  misc_feature (1)..(601): Homolog of NCBI NO: 25405508 NR Description: probable protein kinase [imported] - Arabidopsis >gi|9802791|gb|AAF99860.1|AC015448_10 Putative protein kinase
  misc_feature (178)..(604): Homolog of NCBI NO: 15218054 NR Description: receptor-like protein kinase, putative; protein
  misc_feature (1)..(163): Homolog of NCBI NO: 15218054 NR Description: receptor-like protein kinase, putative; protein
  misc_feature (188)..(601): Homolog of NCBI NO: 15218075 NR Description: light repressible receptor protein kinase,
  misc_feature (1)..(100): Homolog of NCBI NO: 15218075 NR Description: light repressible receptor protein kinase,
  misc_feature (1)..(604): Homolog of NCBI NO: 25387154 NR Description: protein F22G5.6 [imported] - Arabidopsis thaliana
  misc_feature (12)..(341): Homolog of NCBI NO: 15238490 NR Description: leucine-rich repeat transmembrane protein kinase,
  misc_feature (367)..(587): Homolog of NCBI NO: 15238490 NR Description: leucine-rich repeat transmembrane protein kinase,
  misc_feature (1)..(603): Homolog of NCBI NO: 15220696 NR Description: hypothetical protein; protein id: At1g62090.1
MHFAEIENLEANETREFNITYNGGENWFSYFRPPKFRITTVYNPAAVSSLDGNFNFTFSMTGNSTHPPLINGLEIYQVLELPQLDTYQDEVSAMMNIKTIYGLSKRSSWQGDPCAPELYRWEGLNCSYPNFAPPQIISLNLSGSNLSGTITSDISKLTHLRELDLSNNDLSGDIPFVFSDMKNLTLINLSGNKNLNRSVPETLQKRIDNKSLTLIRDETGKNSTNVVAIAASVASVFAVLVILAIVFVVIRKKQRTNEASGPRSFTTGTVKSDARSSSSSIITKERKFTYSEVLKMTKNFERVLGKGGFGTVYHGNLDDTQVAVKMLSHSSAQGYKEFKAEVELLLRVHHRHLVGLVGYCDDGDNLALIYEYMEKGDLRENMSGKHSVNVLSWETRMQIAVEAAQGLEYLHNGCRPPMVHRDVKPTNILLNERSQAKLADFGLSRSFPVDGESHVMTVVAGTPGYLDPEYYRTNWLSEKSDVYSFGVVLLEIVTNQPVMNKNRERPHINEWVMFMLTNGDIKSIVDPKLNEDYDTNGVWKVVELALACVNPSSSRRPTMPHVVMELNECLALEIERKQGSQATYIKESVEFSPSSASDFSPLAR

SEQ ID NO: 85865 - DNA, 2619 bp, Arabidopsis thaliana
  misc_feature (1)..(2619): Ceres Seq. ID no. 12684220
  misc_feature: MA Experiment ID: 20000314 Result: Up-regulated in Transcription
  misc_feature: MA Experiment 20000314 PARAMETER Experiment Name: At_14day_Shoots-Roots_Sub_P Parameter: Age (day) Value: 14
  misc_feature: MA Experiment 20000314 PARAMETER Experiment Name: At_14day_Shoots-Roots_Sub_P Parameter: Organism Value: A. thaliana
  misc_feature: MA Experiment 20000314 PARAMETER Experiment Name: At_14day_Shoots-Roots_Sub_P Parameter: Plant Line Value: WS
  misc_feature: MA Experiment 20000314 PARAMETER Experiment Name: At_14day_Shoots-Roots_Sub_P Parameter: Tissue Value: Roots vs. Whole Plant
atgaagtctattcatgggtttttgctcttcttgatcacagcttatgtcattttggaatcagttcaagctcaagatcaattaggattcatcagtttggattgtgggttagtccctaagaacgcaacttatacggagaagacgacaaatataacatacaaatcagatgcaaattacatcgatagtggattggtcgggaggatcagtgctgagtacaaagcgcagcttcagcaacaaacttggaccgtaagaagcttccctgagggtgaaagaaactgttacaacttcaaccttaccgctaaaagcagatatctcatcagagcaacctttacgtatgggaattacgatggtttgagacaagtccccaagtttgatattcacattggtcctagcaaatggacttctgttaagttggatggagtaggaaatggtgcagtcctcgagatgattcatgtcttaacacaagaccgtcttcaaatttgtcttgttaagacaggaaaagggataccatttatttcgtcgctggaacttcgtccgttgaacaataatacttacctcacgcaaagtggatcgttgattgggttcgcaagagttttcttttcagccactccaacattcataaggtatgatgaggatatccatgatcgagtctgggttcgacagtttggtaatggattgaaatcgataagcacagaccttttggtcgatacaagtaacccctatgatgtgccacaagctgtggcaaagactgcatgtgtaccttcaaatgctagtcagcctctgatctttgattggactcttgacaacatcacttcacaatcatatgtatacatgcatttcgctgaaatccagactcttaaggataatgacatcagagaattcaacattacttataatggtggtcagaatgtgtactcctatttgaggcctgaaaaattcgagatatcaactctattcgattcaaagcctttgagttctccggatggcagtttcagtttgtctttcacgaagaccggtaactcaactcttcctcctcttatcaacggcctcgagatttataaagtcttagaccttctagaactcgagacagatcaagatgaagtttctgctatgataaacatcaaggcaacgtatgatttgagcaaaaaggttagctggcaaggagatccatgtgctcctaagtcttatcagtgggaaggtttaaactgcagttatccaaactctgatcaacctcggatcatatccttgaacttggcagagaacaagttgaccggtaccataacacctgaaatatccaagctaacacagttgatagagctagatttgtcaaaaaacgatttatcaggagagataccggagttttttgcagatatgaagttattaaaacttataaacttaagtggaaatctaggtctcaacagcacaattccagactctattcaacaaagattagatagcaaatctctaatactaattttgagtaagactgttactaaaactgtcaccctgaaaggcaaaagtaaaaaggttccaatgattcctatcgtagcgtcagtggctggtgtgttcgctctgctagttatcttggccatctttttcgtcgttagaaggaaaaacggggaaagtaataagggtacgaatccatcaatcataacaaaggaacgcaggatcacgtatcccgaggtactaaagatgactaataactttgagagagttcttggtaaaggaggatttggaacagtgtaccatggaaacttggaggatactcaagtagctgtgaaaatgctctctcattcgtcagctcaagggtataaagagttcaaagcagaggttgaacttcttttaagagttcaccatagaaatttggtgggacttgtgggttactgtgatgatggagataacttggctttgatttatgaatacatggctaatggagatctcaaggagaatatgtcaggaaaacgtggaggcaatgtccttacctgggaaaacaggatgcaaatagctgtagaggctgcacaaggattggagtatcttcacaatggatgtacgcctcctatggtccatagagatgttaaaactaccaacatcttattgaatgagcggtatggagcaaaactagccgactttgggctctcaagatctttcccagttgatggcgaaagtcatgtctcgacagtggttgcgggcacacctggttaccttgaccctgagtactacagaacaaactggctaagcgagaagagtgatgtgtacagcttcggtgtagtcctattagagatagtcacaaaccagcctgtgacagataaaacaagagagagaactcacatcaatgaatgggttgggtccatgctcactaaaggggacatcaagagcatccttgacccaaaactgatgggggactatgacacaaacggtgcctggaagattgttgagctggctcttgcatgtgtgaacccgtcttcaaaccggagaccaacaatggcacacgtcgtgactgagctaaacgaatgtgtggccttagaaaatgcaaggcgacaaggtcgtgaagagatgcacacaagtggttatgttgactttagtcgctcttctgcttccgaattttcccctggagccagataa

SEQ ID NO: 85866 - protein, 872 aa, Arabidopsis thaliana
  peptide (1)..(872): Ceres Seq. ID no. 12684221
  misc_feature (7)..(653): Homolog of NCBI NO: 15218059 NR Description: light repressible receptor protein kinase,
  misc_feature (620)..(872): Homolog of NCBI NO: 15218059 NR Description: light repressible receptor protein kinase,
  misc_feature (1)..(872): Homolog of NCBI NO: 25405508 NR Description: probable protein kinase [imported] - Arabidopsis >gi|9802791|gb|AAF99860.1|AC015448_10 Putative protein kinase
  misc_feature (450)..(872): Homolog of NCBI NO: 15218075 NR Description: light repressible receptor protein kinase,
  misc_feature (1)..(354): Homolog of NCBI NO: 15218075 NR Description: light repressible receptor protein kinase,
  misc_feature (9)..(872): Homolog of NCBI NO: 15232537 NR Description: serine/threonine-specific protein kinase,
  misc_feature (28)..(872): Homolog of NCBI NO: 25387154 NR Description: protein F22G5.6 [imported] - Arabidopsis thaliana
  misc_feature (8)..(849): Homolog of NCBI NO: 8778538 NR Description: F22G5.7 [Arabidopsis thaliana]
  misc_feature (206)..(871): Homolog of NCBI NO: 15220696 NR Description: hypothetical protein; protein id: At1g62090.1
  misc_feature (295)..(609): Homolog of NCBI NO: 15238490 NR Description: leucine-rich repeat transmembrane protein kinase,
MKSIHGFLLFLITAYVILESVQAQDQLGFISLDCGLVPKNATYTEKTTNITYKSDANYIDSGLVGRISAEYKAQLQQQTWTVRSFPEGERNCYNFNLTAKSRYLIRATFTYGNYDGLRQVPKFDIHIGPSKWTSVKLDGVGNGAVLEMIHVLTQDRLQICLVKTGKGIPFISSLELRPLNNNTYLTQSGSLIGFARVFFSATPTFIRYDEDIHDRVWVRQFGNGLKSISTDLLVDTSNPYDVPQAVAKTACVPSNASQPLIFDWTLDNITSQSYVYMHFAEIQTLKDNDIREFNITYNGGQNVYSYLRPEKFEISTLFDSKPLSSPDGSFSLSFTKTGNSTLPPLINGLEIYKVLDLLELETDQDEVSAMINIKATYDLSKKVSWQGDPCAPKSYQWEGLNCSYPNSDQPRIISLNLAENKLTGTITPEISKLTQLIELDLSKNDLSGEIPEFFADMKLLKLINLSGNLGLNSTIPDSIQQRLDSKSLILILSKTVTKTVTLKGKSKKVPMIPIVASVAGVFALLVILAIFFVVRRKNGESNKGTNPSIITKERRITYPEVLKMTNNFERVLGKGGFGTVYHGNLEDTQVAVKMLSHSSAQGYKEFKAEVELLLRVHHRNLVGLVGYCDDGDNLALIYEYMANGDLKENMSGKRGGNVLTWENRMQIAVEAAQGLEYLHNGCTPPMVHRDVKTTNILLNERYGAKLADFGLSRSFPVDGESHVSTVVAGTPGYLDPEYYRTNWLSEKSDVYSFGVVLLEIVTNQPVTDKTRERTHINEWVGSMLTKGDIKSILDPKLMGDYDTNGAWKIVELALACVNPSSNRRPTMAHVVTELNECVALENARRQGREEMHTSGYVDFSRSSASEFSPGAR

SEQ ID NO: 85867 - protein, 725 aa, Arabidopsis thaliana
  peptide (1)..(725): Ceres Seq. ID no. 12684222
  misc_feature (1)..(506): Homolog of NCBI NO: 15218059 NR Description: light repressible receptor protein kinase,
  misc_feature (473)..(725): Homolog of NCBI NO: 15218059 NR Description: light repressible receptor protein kinase,
  misc_feature (1)..(725): Homolog of NCBI NO: 25405508 NR Description: probable protein kinase [imported] - Arabidopsis >gi|9802791|gb|AAF99860.1|AC015448_10 Putative protein kinase
  misc_feature (303)..(725): Homolog of NCBI NO: 15218075 NR Description: light repressible receptor protein kinase,
  misc_feature (1)..(207): Homolog of NCBI NO: 15218075 NR Description: light repressible receptor protein kinase,
  misc_feature (1)..(725): Homolog of NCBI NO: 15232537 NR Description: serine/threonine-specific protein kinase,
  misc_feature (1)..(725): Homolog of NCBI NO: 25387154 NR Description: protein F22G5.6 [imported] - Arabidopsis thaliana
  misc_feature (1)..(702): Homolog of NCBI NO: 8778538 NR Description: F22G5.7 [Arabidopsis thaliana]
  misc_feature (59)..(724): Homolog of NCBI NO: 15220696 NR Description: hypothetical protein; protein id: At1g62090.1
  misc_feature (148)..(462): Homolog of NCBI NO: 15238490 NR Description: leucine-rich repeat transmembrane protein kinase,
MIHVLTQDRLQICLVKTGKGIPFISSLELRPLNNNTYLTQSGSLIGFARVFFSATPTFIRYDEDIHDRVWVRQFGNGLKSISTDLLVDTSNPYDVPQAVAKTACVPSNASQPLIFDWTLDNITSQSYVYMHFAEIQTLKDNDIREFNITYNGGQNVYSYLRPEKFEISTLFDSKPLSSPDGSFSLSFTKTGNSTLPPLINGLEIYKVLDLLELETDQDEVSAMINIKATYDLSKKVSWQGDPCAPKSYQWEGLNCSYPNSDQPRIISLNLAENKLTGTITPEISKLTQLIELDLSKNDLSGEIPEFFADMKLLKLINLSGNLGLNSTIPDSIQQRLDSKSLILILSKTVTKTVTLKGKSKKVPMIPIVASVAGVFALLVILAIFFVVRRKNGESNKGTNPSIITKERRITYPEVLKMTNNFERVLGKGGFGTVYHGNLEDTQVAVKMLSHSSAQGYKEFKAEVELLLRVHHRNLVGLVGYCDDGDNLALIYEYMANGDLKENMSGKRGGNVLTWENRMQIAVEAAQGLEYLHNGCTPPMVHRDVKTTNILLNERYGAKLADFGLSRSFPVDGESHVSTVVAGTPGYLDPEYYRTNWLSEKSDVYSFGVVLLEIVTNQPVTDKTRERTHINEWVGSMLTKGDIKSILDPKLMGDYDTNGAWKIVELALACVNPSSNRRPTMAHVVTELNECVALENARRQGREEMHTSGYVDFSRSSASEFSPGAR

SEQ ID NO: 85868 - protein, 596 aa, Arabidopsis thaliana; identical to SEQ ID NO: 85860
  peptide (1)..(596): Ceres Seq. ID no. 12684223
  misc_feature (1)..(377): Homolog of NCBI NO: 15218059 NR Description: light repressible receptor protein kinase,
  misc_feature (344)..(596): Homolog of NCBI NO: 15218059 NR Description: light repressible receptor protein kinase,
  misc_feature (1)..(596): Homolog of NCBI NO: 25405508 NR Description: probable protein kinase [imported] - Arabidopsis >gi|9802791|gb|AAF99860.1|AC015448_10 Putative protein kinase
  misc_feature (174)..(596): Homolog of NCBI NO: 15218075 NR Description: light repressible receptor protein kinase,
  misc_feature (1)..(78): Homolog of NCBI NO: 15218075 NR Description: light repressible receptor protein kinase,
  misc_feature (1)..(596): Homolog of NCBI NO: 15232537 NR Description: serine/threonine-specific protein kinase,
  misc_feature (1)..(596): Homolog of NCBI NO: 25387154 NR Description: protein F22G5.6 [imported] - Arabidopsis thaliana
  misc_feature (1)..(573): Homolog of NCBI NO: 8778538 NR Description: F22G5.7 [Arabidopsis thaliana]
  misc_feature (1)..(595): Homolog of NCBI NO: 15220696 NR Description: hypothetical protein; protein id: At1g62090.1
  misc_feature (19)..(333): Homolog of NCBI NO: 15238490 NR Description: leucine-rich repeat transmembrane protein kinase,

SEQ ID NO: 85869 - DNA, 2607 bp, Arabidopsis thaliana
  misc_feature (1)..(2607): Ceres Seq. ID no. 12684224
  misc_feature: MA Experiment ID: 20000171 Result: Down-regulated in Transcription
  misc_feature: MA Experiment 20000171 PARAMETER Experiment Name: At_42deg_Heat_P Parameter: Age (day) Value: 14
  misc_feature: MA Experiment 20000171 PARAMETER Experiment Name: At_42deg_Heat_P Parameter: Organism Value: A. thaliana
  misc_feature: MA Experiment 20000171 PARAMETER Experiment Name: At_42deg_Heat_P Parameter: Plant Line Value: WS
  misc_feature: MA Experiment 20000171 PARAMETER Experiment Name: At_42deg_Heat_P Parameter: Temperature (deg C) Value: 42 vs. 22
  misc_feature: MA Experiment 20000171 PARAMETER Experiment Name: At_42deg_Heat_P Parameter: Timepoint (hr) Value: 1
  misc_feature: MA Experiment 20000171 PARAMETER Experiment Name: At_42deg_Heat_P Parameter: Tissue Value: Aerial
  misc_feature: MA Experiment ID: 20000173 Result: Down-regulated in Transcription
  misc_feature: MA Experiment 20000173 PARAMETER Experiment Name: At_42deg_Heat_P Parameter: Age (day) Value: 14
  misc_feature: MA Experiment 20000173 PARAMETER Experiment Name: At_42deg_Heat_P Parameter: Organism Value: A. thaliana
  misc_feature: MA Experiment 20000173 PARAMETER Experiment Name: At_42deg_Heat_P Parameter: Plant Line Value: WS
  misc_feature: MA Experiment 20000173 PARAMETER Experiment Name: At_42deg_Heat_P Parameter: Temperature (deg C) Value: 42 vs. 22
  misc_feature: MA Experiment 20000173 PARAMETER Experiment Name: At_42deg_Heat_P Parameter: Timepoint (hr) Value: 6
  misc_feature: MA Experiment 20000173 PARAMETER Experiment Name: At_42deg_Heat_P Parameter: Tissue Value: Aerial
  misc_feature: MA Experiment ID: 20000182 Result: Up-regulated in Transcription
  misc_feature: MA Experiment 20000182 PARAMETER Experiment Name: At_2mM_SA_P Parameter: Age (day) Value: 14
  misc_feature: MA Experiment 20000182 PARAMETER Experiment Name: At_2mM_SA_P Parameter: Organism Value: A. thaliana
  misc_feature: MA Experiment 20000182 PARAMETER Experiment Name: At_2mM_SA_P Parameter: Plant Line Value: WS
  misc_feature: MA Experiment 20000182 PARAMETER Experiment Name: At_2mM_SA_P Parameter: Timepoint (hr) Value: 6
  misc_feature: MA Experiment 20000182 PARAMETER Experiment Name: At_2mM_SA_P Parameter: Tissue Value: Aerial
  misc_feature: MA Experiment 20000182 PARAMETER Experiment Name: At_2mM_SA_P Parameter: Treatment Value: 2mM SA vs. No Treatment
  misc_feature: MA Experiment ID: 20000184 Result: Down-regulated in Transcription
  misc_feature: MA Experiment 20000184 PARAMETER Experiment Name: At_Shoots__P Parameter: Age (day) Value: 7
  misc_feature: MA Experiment 20000184 PARAMETER Experiment Name: At_Shoots__P Parameter: Tissue Value: Shoots vs. Whole Plant
  misc_feature: MA Experiment ID: 20000227 Result: Down-regulated in Transcription
  misc_feature: MA Experiment 20000227 PARAMETER Experiment Name: At_Root-Tips-vs-Tops_P Parameter: Tissue Value: Root Tips vs. Root Tops
  misc_feature: MA Experiment ID: 20000451 Result: Down-regulated in Transcription
  misc_feature: MA Experiment 20000451 PARAMETER Experiment Name: At_CS6879_Shoots-Roots_P Parameter: Age (day) Value: 14
  misc_feature: MA Experiment 20000451 PARAMETER Experiment Name: At_CS6879_Shoots-Roots_P Parameter: Organism Value: A. thaliana
  misc_feature: MA Experiment 20000451 PARAMETER Experiment Name: At_CS6879_Shoots-Roots_P Parameter: Plant Line Value: CS6879 vs. WS
  misc_feature: MA Experiment 20000451 PARAMETER Experiment Name: At_CS6879_Shoots-Roots_P Parameter: Tissue Value: Roots
  misc_feature: MA Experiment ID: 20000456 Result: Up-regulated in Transcription
  misc_feature: MA Experiment 20000456 PARAMETER Experiment Name: At_100uM_BA_P Parameter: Age (day) Value: 14
  misc_feature: MA Experiment 20000456 PARAMETER Experiment Name: At_100uM_BA_P Parameter: Organism Value: A. thaliana
  misc_feature: MA Experiment 20000456 PARAMETER Experiment Name: At_100uM_BA_P Parameter: Plant Line Value: WS
  misc_feature: MA Experiment 20000456 PARAMETER Experiment Name: At_100uM_BA_P Parameter: Timepoint (hr) Value: 6
  misc_feature: MA Experiment 20000456 PARAMETER Experiment Name: At_100uM_BA_P Parameter: Tissue Value: Aerial
  misc_feature: MA Experiment 20000456 PARAMETER Experiment Name: At_100uM_BA_P Parameter: Treatment Value: 100uM BA vs. No Treatment
  misc_feature: MA Experiment ID: 20000460 Result: Down-regulated in Transcription
  misc_feature: MA Experiment 20000460 PARAMETER Experiment Name: At_10percent_PEG_P Parameter: Age (day) Value: 12
  misc_feature: MA Experiment 20000460 PARAMETER Experiment Name: At_10percent_PEG_P Parameter: Organism Value: A. thaliana
  misc_feature: MA Experiment 20000460 PARAMETER Experiment Name: At_10percent_PEG_P Parameter: Plant Line Value: WS
  misc_feature: MA Experiment 20000460 PARAMETER Experiment Name: At_10percent_PEG_P Parameter: Timepoint (day) Value: 12
  misc_feature: MA Experiment 20000460 PARAMETER Experiment Name: At_10percent_PEG_P Parameter: Tissue Value: Whole Plant
  misc_feature: MA Experiment 20000460 PARAMETER Experiment Name: At_10percent_PEG_P Parameter: Treatment Value: 10percent PEG vs. No Treatment
  misc_feature: MA Experiment ID: 20000527 Result: Down-regulated in Transcription
  misc_feature: MA Experiment 20000527 PARAMETER Experiment Name: At_10percent_PEG_P Parameter: Age (day) Value: 20
  misc_feature: MA Experiment 20000527 PARAMETER Experiment Name: At_10percent_PEG_P Parameter: Organism Value: A. thaliana
  misc_feature: MA Experiment 20000527 PARAMETER Experiment Name: At_10percent_PEG_P Parameter: Plant Line Value: WS
  misc_feature: MA Experiment 20000527 PARAMETER Experiment Name: At_10percent_PEG_P Parameter: Timepoint (day) Value: 20
  misc_feature: MA Experiment 20000527 PARAMETER Experiment Name: At_10percent_PEG_P Parameter: Tissue Value: Whole Plant
  misc_feature: MA Experiment 20000527 PARAMETER Experiment Name: At_10percent_PEG_P Parameter: Treatment Value: 10percent PEG vs. No Treatment
  misc_feature: MA Experiment ID: 20000573 Result: Up-regulated in Transcription
  misc_feature: MA Experiment 20000573 PARAMETER Experiment Name: At_100uM_ABA_Mutants__P Parameter: Organism Value: A. thaliana
  misc_feature: MA Experiment 20000573 PARAMETER Experiment Name: At_100uM_ABA_Mutants__P Parameter: Plant Line Value: CS22 vs. Ler wt
  misc_feature: MA Experiment 20000573 PARAMETER Experiment Name: At_100uM_ABA_Mutants__P Parameter: Timepoint (hr) Value: N/A
  misc_feature: MA Experiment 20000573 PARAMETER Experiment Name: At_100uM_ABA_Mutants__P Parameter: Tissue Value: Whole Plant
  misc_feature: MA Experiment 20000573 PARAMETER Experiment Name: At_100uM_ABA_Mutants__P Parameter: Treatment Value: None
  misc_feature: MA Experiment ID: 20000574 Result: Up-regulated in Transcription
  misc_feature: MA Experiment 20000574 PARAMETER Experiment Name: At_100uM_ABA_Mutants__P Parameter: Organism Value: A. thaliana
  misc_feature: MA Experiment 20000574 PARAMETER Experiment Name: At_100uM_ABA_Mutants__P Parameter: Plant Line Value: CS23 vs. Ler wt
  misc_feature: MA Experiment 20000574 PARAMETER Experiment Name: At_100uM_ABA_Mutants__P Parameter: Timepoint (hr) Value: N/A
  misc_feature: MA Experiment 20000574 PARAMETER Experiment Name: At_100uM_ABA_Mutants__P Parameter: Tissue Value: Whole Plant
  misc_feature: MA Experiment 20000574 PARAMETER Experiment Name: At_100uM_ABA_Mutants__P Parameter: Treatment Value: None
  misc_feature: MA Experiment ID: 20000709 Result: Down-regulated in Transcription
  misc_feature: MA Experiment 20000709 PARAMETER Experiment Name: At_15mM_NH4NO3_L-to-H_P Parameter: Age (hr) Value: 14
  misc_feature: MA Experiment 20000709 PARAMETER Experiment Name: At_15mM_NH4NO3_L-to-H_P Parameter: Organism Value: A. thaliana
  misc_feature: MA Experiment 20000709 PARAMETER Experiment Name: At_15mM_NH4NO3_L-to-H_P Parameter: Plant Line Value: WS
  misc_feature: MA Experiment 20000709 PARAMETER Experiment Name: At_15mM_NH4NO3_L-to-H_P Parameter: Timepoint (hr) Value: 4
  misc_feature: MA Experiment 20000709 PARAMETER Experiment Name: At_15mM_NH4NO3_L-to-H_P Parameter: Tissue Value: Aerial
  misc_feature: MA Experiment 20000709 PARAMETER Experiment Name: At_15mM_NH4NO3_L-to-H_P Parameter: Treatment Value: 15mM NH4NO3 vs. 30mM Mannitol
  misc_feature: MA Experiment ID: 20000794 Result: Down-regulated in Transcription
  misc_feature: MA Experiment 20000794 PARAMETER Experiment Name: At_Petals_P Parameter: Age (day) Value: 23-25 days
  misc_feature: MA Experiment 20000794 PARAMETER Experiment Name: At_Petals_P Parameter: Plant Line Value: WS
  misc_feature: MA Experiment 20000794 PARAMETER Experiment Name: At_Petals_P Parameter: Tissue Value: Petals vs. Whole plant
  misc_feature: MA Experiment ID: 20001556 Result: Down-regulated in Transcription
  misc_feature: MA Experiment 20001556 PARAMETER Experiment Name: At_Drought_Soil_Dry_P Parameter: Age (day) Value: 26
  misc_feature: MA Experiment 20001556 PARAMETER Experiment Name: At_Drought_Soil_Dry_P Parameter: Organism Value: A. thaliana
  misc_feature: MA Experiment 20001556 PARAMETER Experiment Name: At_Drought_Soil_Dry_P Parameter: Plant Line Value: WS
  misc_feature: MA Experiment 20001556 PARAMETER Experiment Name: At_Drought_Soil_Dry_P Parameter: Post Timepoint (hr) Value: None
  misc_feature: MA Experiment 20001556 PARAMETER Experiment Name: At_Drought_Soil_Dry_P Parameter: Post-Treatment Value: None
  misc_feature: MA Experiment 20001556 PARAMETER Experiment Name: At_Drought_Soil_Dry_P Parameter: Timepoint (day) Value: 12
  misc_feature: MA Experiment 20001556 PARAMETER Experiment Name: At_Drought_Soil_Dry_P Parameter: Treatment Value: Drought vs. No Drought
  misc_feature: MA Experiment ID: 20001560 Result: Down-regulated in Transcription
  misc_feature: MA Experiment 20001560 PARAMETER Experiment Name: At_Drought_Soil_Dry_P Parameter: Age (day) Value: 28
  misc_feature: MA Experiment 20001560 PARAMETER Experiment Name: At_Drought_Soil_Dry_P Parameter: Organism Value: A. thaliana
  misc_feature: MA Experiment 20001560 PARAMETER Experiment Name: At_Drought_Soil_Dry_P Parameter: Plant Line Value: WS
  misc_feature: MA Experiment 20001560 PARAMETER Experiment Name: At_Drought_Soil_Dry_P Parameter: Post Timepoint (hr) Value: None
  misc_feature: MA Experiment 20001560 PARAMETER Experiment Name: At_Drought_Soil_Dry_P Parameter: Post-Treatment Value: None
  misc_feature: MA Experiment 20001560 PARAMETER Experiment Name: At_Drought_Soil_Dry_P Parameter: Timepoint (day) Value: 14
  misc_feature: MA Experiment 20001560 PARAMETER Experiment Name: At_Drought_Soil_Dry_P Parameter: Treatment Value: Drought vs. No Drought
  misc_feature: MA Experiment ID: 20001904 Result: Down-regulated in Transcription
  misc_feature: MA Experiment 20001904 PARAMETER Experiment Name: At_Drought_Reproduction_P Parameter: Age (day) Value: 37
  misc_feature: MA Experiment 20001904 PARAMETER Experiment Name: At_Drought_Reproduction_P Parameter: Organism Value: A. thaliana
  misc_feature: MA Experiment 20001904 PARAMETER Experiment Name: At_Drought_Reproduction_P Parameter: Plant Line Value: WS
  misc_feature: MA Experiment 20001904 PARAMETER Experiment Name: At_Drought_Reproduction_P Parameter: Timepoint (day) Value: 7
  misc_feature: MA Experiment 20001904 PARAMETER Experiment Name: At_Drought_Reproduction_P Parameter: Tissue Value: Rosettes
  misc_feature: MA Experiment 20001904 PARAMETER Experiment Name: At_Drought_Reproduction_P Parameter: Treatment Value: Drought vs. No Drought
atgaggtttttgtctttcttgatcttcgttttcgcagttcttggattggttcaagctcaagaccaatcaggattcataagcttagattgtggtttggtgcctacggaaattacttatgtggaaaagtcgacgaatataacatacagatcagacgcaacttacatcgacagtggagttcccgggaagatcaatgaagtgtacagaacacagtttcagcaacaaatttgggccttgagaagcttccctgagggtcaaagaaattgttacaacttcagtctcaccgcaaaacgtaagtatctaatcagaggaacctttatctatgggaattatgacggtttgaatcaactcccgagctttgatctttacatcggtccaaacaaatggacctctgtttcgatccccggagtgagaaatggttcagtctccgagatgatccatgtcttaagacaagaccatcttcaaatttgtcttgtgaaaacaggagaaactacaccgtttatttcttcattggaacttcgtcctttgaacaataatacatacgtcacaaaaagtggatcgcttattgtggtcgcaagactttacttttcacccactccaccatttctcaggtatgatgaggacgtccatgaccgaatttggattccattcttagataacaaaaattccttgttaagcacggaactctctgttgatacaagtaacttctacaatgtgcctcaaactgtagcgaaaactgctgctgtccctttaaatgctactcagcctctgaaaataaattggagtctcgacgacatcacttcacagtcatatatatacatgcatttcgctgaaatcgagaatcttgaagctaatgagaccagagaattcaatattacttacaatggtggcgaaaattggttctcctattttagacctccaaagtttcgtataacaactgtatacaatccagcagctgtgagttctctagatgggaatttcaacttcactttctcgatgaccggtaactctactcatcctcctcttatcaacggccttgagatttatcaagttctagagcttccacagcttgatacataccaagatgaagtttccgctatgatgaatatcaagacaatatatggattgagcaaaaggtctagctggcaaggagatccatgtgctcctgagttatatagatgggaagttctaacttttggactctctattaggaacttgagtggaagcaatttgagtggtaccataacatctgatatatccaagctaacacatttgagagaactagatttatcaaacaatgacttatcaggagatattccatttgttttttctgatatgaagaatttgacactcataaacttgagtggaaacaagaatctaaatcgctcagttccagagactcttcagaagaggatagataacaaatctttaacactaattagagatgaaaccggaaaaaatagtacaaatgtagttgctatcgcagcatcagtggctagcgtgtttgctgtgctagttatcttggctatcgtttttgtcgtcataaggaaaaaacagagaactaatgaagcttcaggaccccgatcattcactactggcacggttaagagtgatgcaagatcatcgagttcatcaatcataacaaaggaacgcaagttcacttattcggaggtactaaagatgactaaaaactttgagagagttcttggtaaaggagggtttggaacagtgtatcatggtaacttggatgatactcaagtagctgtgaaaatgctttctcattcatcagctcaaggttataaagagttcaaagcagaggttgaacttcttttaagagttcatcacagacatttggtgggacttgttggttactgtgatgatggagacaacttagctctgatctatgaatatatggaaaaaggagacctgagggaaaatatgtcaggaaaacacagtgtcaatgtcctaagctgggaaacaagaatgcaaatagctgtagaggcagcacaaggattggagtatttgcataacggatgtaggcctcctatggtacatagagatgtgaaaccaaccaacattttattaaatgagcggtctcaagcaaaactagccgactttgggctatcgagatcttttcctgttgatggtgaatctcatgtcatgacagtcgttgcaggaacacctggttacttagatcctgagtattacagaacaaactggctaagcgagaagagtgatgtgtacagctttggtgtagtgcttttagagatagtcacaaaccagcctgtgatgaataaaaaccgagagagacctcatatcaatgaatgggttatgttcatgcttaccaatggggatatcaagagtattgtcgacccgaaactgaatgaagactatgacacaaacggtgtgtggaaggttgtagagttggctttagcttgtgtaaacccgtcttcaagccgtagaccgacaatgccacacgtggtgatggagctaaacgaatgtcttgctttggaaatagaaaggaaacaaggtagtcaagcgacgtacataaaggaatctgttgagtttagtccatcttctgcttctgatttttcccctttagctaggtaa

SEQ ID NO: 85870 - protein, 868 aa, Arabidopsis thaliana
  peptide (1)..(868): Ceres Seq. ID no. 12684225
  misc_feature (3)..(868): Homolog of NCBI NO: 25387105 NR Description: probable protein kinase [imported] - Arabidopsis >gi|9802789|gb|AAF99858.1|AC015448_8 Putative protein kinase
  misc_feature (3)..(868): Homolog of NCBI NO: 15218056 NR Description: light repressible receptor protein kinase,
  misc_feature (4)..(868): Homolog of NCBI NO: 25405505 NR Description: probable protein kinase [imported] - Arabidopsis >gi|9802788|gb|AAF99857.1|AC015448_7 Putative protein kinase
  misc_feature (3)..(865): Homolog of NCBI NO: 25405508 NR Description: probable protein kinase [imported] - Arabidopsis >gi|9802791|gb|AAF99860.1|AC015448_10 Putative protein kinase
  misc_feature (442)..(868): Homolog of NCBI NO: 15218054 NR Description: receptor-like protein kinase, putative; protein
  misc_feature (4)..(427): Homolog of NCBI NO: 15218054 NR Description: receptor-like protein kinase, putative; protein
  misc_feature (452)..(865): Homolog of NCBI NO: 15218075 NR Description: light repressible receptor protein kinase,
  misc_feature (3)..(372): Homolog of NCBI NO: 15218075 NR Description: light repressible receptor protein kinase,
  misc_feature (404)..(868): Homolog of NCBI NO: 15218050 NR Description: light repressible receptor protein kinase,
  misc_feature (155)..(470): Homolog of NCBI NO: 15218050 NR Description: light repressible receptor protein kinase,
MRFLSFLIFVFAVLGLVQAQDQSGFISLDCGLVPTEITYVEKSTNITYRSDATYIDSGVPGKINEVYRTQFQQQIWALRSFPEGQRNCYNFSLTAKRKYLIRGTFIYGNYDGLNQLPSFDLYIGPNKWTSVSIPGVRNGSVSEMIHVLRQDHLQICLVKTGETTPFISSLELRPLNNNTYVTKSGSLIVVARLYFSPTPPFLRYDEDVHDRIWIPFLDNKNSLLSTELSVDTSNFYNVPQTVAKTAAVPLNATQPLKINWSLDDITSQSYIYMHFAEIENLEANETREFNITYNGGENWFSYFRPPKFRITTVYNPAAVSSLDGNFNFTFSMTGNSTHPPLINGLEIYQVLELPQLDTYQDEVSAMMNIKTIYGLSKRSSWQGDPCAPELYRWEVLTFGLSIRNLSGSNLSGTITSDISKLTHLRELDLSNNDLSGDIPFVFSDMKNLTLINLSGNKNLNRSVPETLQKRIDNKSLTLIRDETGKNSTNVVAIAASVASVFAVLVILAIVFVVIRKKQRTNEASGPRSFTTGTVKSDARSSSSSIITKERKFTYSEVLKMTKNFERVLGKGGFGTVYHGNLDDTQVAVKMLSHSSAQGYKEFKAEVELLLRVHHRHLVGLVGYCDDGDNLALIYEYMEKGDLRENMSGKHSVNVLSWETRMQIAVEAAQGLEYLHNGCRPPMVHRDVKPTNILLNERSQAKLADFGLSRSFPVDGESHVMTVVAGTPGYLDPEYYRTNWLSEKSDVYSFGVVLLEIVTNQPVMNKNRERPHINEWVMFMLTNGDIKSIVDPKLNEDYDTNGVWKVVELALACVNPSSSRRPTMPHVVMELNECLALEIERKQGSQATYIKESVEFSPSSASDFSPLAR

SEQ ID NO: 85871 - protein, 725 aa, Arabidopsis thaliana
  peptide (1)..(725): Ceres Seq. ID no. 12684226
  misc_feature (1)..(725): Homolog of NCBI NO: 25387105 NR Description: probable protein kinase [imported] - Arabidopsis >gi|9802789|gb|AAF99858.1|AC015448_8 Putative protein kinase
  misc_feature (1)..(725): Homolog of NCBI NO: 15218056 NR Description: light repressible receptor protein kinase,
  misc_feature (1)..(725): Homolog of NCBI NO: 25405505 NR Description: probable protein kinase [imported] - Arabidopsis >gi|9802788|gb|AAF99857.1|AC015448_7 Putative protein kinase
  misc_feature (1)..(722): Homolog of NCBI NO: 25405508 NR Description: probable protein kinase [imported] - Arabidopsis >gi|9802791|gb|AAF99860.1|AC015448_10 Putative protein kinase
  misc_feature (299)..(725): Homolog of NCBI NO: 15218054 NR Description: receptor-like protein kinase, putative; protein
  misc_feature (1)..(284): Homolog of NCBI NO: 15218054 NR Description: receptor-like protein kinase, putative; protein
  misc_feature (309)..(722): Homolog of NCBI NO: 15218075 NR Description: light repressible receptor protein kinase,
  misc_feature (1)..(229): Homolog of NCBI NO: 15218075 NR Description: light repressible receptor protein kinase,
  misc_feature (261)..(725): Homolog of NCBI NO: 15218050 NR Description: light repressible receptor protein kinase,
  misc_feature (12)..(327): Homolog of NCBI NO: 15218050 NR Description: light repressible receptor protein kinase,
MIHVLRQDHLQICLVKTGETTPFISSLELRPLNNNTYVTKSGSLIVVARLYFSPTPPFLRYDEDVHDRIWIPFLDNKNSLLSTELSVDTSNFYNVPQTVAKTAAVPLNATQPLKINWSLDDITSQSYIYMHFAEIENLEANETREFNITYNGGENWFSYFRPPKFRITTVYNPAAVSSLDGNFNFTFSMTGNSTHPPLINGLEIYQVLELPQLDTYQDEVSAMMNIKTIYGLSKRSSWQGDPCAPELYRWEVLTFGLSIRNLSGSNLSGTITSDISKLTHLRELDLSNNDLSGDIPFVFSDMKNLTLINLSGNKNLNRSVPETLQKRIDNKSLTLIRDETGKNSTNVVAIAASVASVFAVLVILAIVFVVIRKKQRTNEASGPRSFTTGTVKSDARSSSSSIITKERKFTYSEVLKMTKNFERVLGKGGFGTVYHGNLDDTQVAVKMLSHSSAQGYKEFKAEVELLLRVHHRHLVGLVGYCDDGDNLALIYEYMEKGDLRENMSGKHSVNVLSWETRMQIAVEAAQGLEYLHNGCRPPMVHRDVKPTNILLNERSQAKLADFGLSRSFPVDGESHVMTVVAGTPGYLDPEYYRTNWLSEKSDVYSFGVVLLEIVTNQPVMNKNRERPHINEWVMFMLTNGDIKSIVDPKLNEDYDTNGVWKVVELALACVNPSSSRRPTMPHVVMELNECLALEIERKQGSQATYIKESVEFSPSSASDFSPLAR

SEQ ID NO: 85872 - protein, 596 aa, Arabidopsis thaliana
  peptide (1)..(596): Ceres Seq. ID no. 12684227
  misc_feature (1)..(596): Homolog of NCBI NO: 25387105 NR Description: probable protein kinase [imported] - Arabidopsis >gi|9802789|gb|AAF99858.1|AC015448_8 Putative protein kinase
  misc_feature (1)..(596): Homolog of NCBI NO: 15218056 NR Description: light repressible receptor protein kinase,
  misc_feature (1)..(596): Homolog of NCBI NO: 25405505 NR Description: probable protein kinase [imported] - Arabidopsis >gi|9802788|gb|AAF99857.1|AC015448_7 Putative protein kinase
  misc_feature (1)..(593): Homolog of NCBI NO: 25405508 NR Description: probable protein kinase [imported] - Arabidopsis >gi|9802791|gb|AAF99860.1|AC015448_10 Putative protein kinase
  misc_feature (170)..(596): Homolog of NCBI NO: 15218054 NR Description: receptor-like protein kinase, putative; protein
  misc_feature (1)..(155): Homolog of NCBI NO: 15218054 NR Description: receptor-like protein kinase, putative; protein
  misc_feature (180)..(593): Homolog of NCBI NO: 15218075 NR Description: light repressible receptor protein kinase,
  misc_feature (1)..(100): Homolog of NCBI NO: 15218075 NR Description: light repressible receptor protein kinase,
  misc_feature (132)..(596): Homolog of NCBI NO: 15218050 NR Description: light repressible receptor protein kinase,
  misc_feature (1)..(198): Homolog of NCBI NO: 15218050 NR Description: light repressible receptor protein kinase,
MHFAEIENLEANETREFNITYNGGENWFSYFRPPKFRITTVYNPAAVSSLDGNFNFTFSMTGNSTHPPLINGLEIYQVLELPQLDTYQDEVSAMMNIKTIYGLSKRSSWQGDPCAPELYRWEVLTFGLSIRNLSGSNLSGTITSDISKLTHLRELDLSNNDLSGDIPFVFSDMKNLTLINLSGNKNLNRSVPETLQKRIDNKSLTLIRDETGKNSTNVVAIAASVASVFAVLVILAIVFVVIRKKQRTNEASGPRSFTTGTVKSDARSSSSSIITKERKFTYSEVLKMTKNFERVLGKGGFGTVYHGNLDDTQVAVKMLSHSSAQGYKEFKAEVELLLRVHHRHLVGLVGYCDDGDNLALIYEYMEKGDLRENMSGKHSVNVLSWETRMQIAVEAAQGLEYLHNGCRPPMVHRDVKPTNILLNERSQAKLADFGLSRSFPVDGESHVMTVVAGTPGYLDPEYYRTNWLSEKSDVYSFGVVLLEIVTNQPVMNKNRERPHINEWVMFMLTNGDIKSIVDPKLNEDYDTNGVWKVVELALACVNPSSSRRPTMPHVVMELNECLALEIERKQGSQATYIKESVEFSPSSASDFSPLAR

SEQ ID NO: 85873 - DNA, 2487 bp, Arabidopsis thaliana
  misc_feature (1)..(2487): Ceres Seq. ID no. 12684285
  misc_feature: MA Experiment ID: 20000182 Result: Up-regulated in Transcription
  misc_feature: MA Experiment 20000182 PARAMETER Experiment Name: At_2mM_SA_P Parameter: Age (day) Value: 14
  misc_feature: MA Experiment 20000182 PARAMETER Experiment Name: At_2mM_SA_P Parameter: Organism Value: A. thaliana
  misc_feature: MA Experiment 20000182 PARAMETER Experiment Name: At_2mM_SA_P Parameter: Plant Line Value: WS
  misc_feature: MA Experiment 20000182 PARAMETER Experiment Name: At_2mM_SA_P Parameter: Timepoint (hr) Value: 6
  misc_feature: MA Experiment 20000182 PARAMETER Experiment Name: At_2mM_SA_P Parameter: Tissue Value: Aerial
  misc_feature: MA Experiment 20000182 PARAMETER Experiment Name: At_2mM_SA_P Parameter: Treatment Value: 2mM SA vs. No Treatment
  misc_feature: MA Experiment ID: 20000185 Result: Up-regulated in Transcription
  misc_feature: MA Experiment 20000185 PARAMETER Experiment Name: At_Roots__P Parameter: Age (day) Value: 7 vs. 21
  misc_feature: MA Experiment 20000185 PARAMETER Experiment Name: At_Roots__P Parameter: Organism Value: A. thaliana
  misc_feature: MA Experiment 20000185 PARAMETER Experiment Name: At_Roots__P Parameter: Tissue Value: Roots vs. Whole Plant
  misc_feature: MA Experiment ID: 20000234 Result: Up-regulated in Transcription
  misc_feature: MA Experiment 20000234 PARAMETER Experiment Name: At_Siliques_P Parameter: Age (day) Value: 21
  misc_feature: MA Experiment 20000234 PARAMETER Experiment Name: At_Siliques_P Parameter: Organism Value: A. thaliana
  misc_feature: MA Experiment 20000234 PARAMETER Experiment Name: At_Siliques_P Parameter: Plant Line Value: WS
  misc_feature: MA Experiment 20000234 PARAMETER Experiment Name: At_Siliques_P Parameter: Tissue Value: Less Than 5mm Siliques vs. Whole Plant
  misc_feature: MA Experiment ID: 20000235 Result: Up-regulated in Transcription
  misc_feature: MA Experiment 20000235 PARAMETER Experiment Name: At_Siliques_P Parameter: Age (day) Value: 21
  misc_feature: MA Experiment 20000235 PARAMETER Experiment Name: At_Siliques_P Parameter: Organism Value: A. thaliana
  misc_feature: MA Experiment 20000235 PARAMETER Experiment Name: At_Siliques_P Parameter: Plant Line Value: WS
  misc_feature: MA Experiment 20000235 PARAMETER Experiment Name: At_Siliques_P Parameter: Tissue Value: 5-10mm Siliques vs. Whole Plant
  misc_feature: MA Experiment ID: 20000265 Result: Up-regulated in Transcription
  misc_feature: MA Experiment 20000265 PARAMETER Experiment Name: At_Open_Flower_P Parameter: Age (day) Value: 21
  misc_feature: MA Experiment 20000265 PARAMETER Experiment Name: At_Open_Flower_P Parameter: Plant Line Value: WS
  misc_feature: MA Experiment 20000265 PARAMETER Experiment Name: At_Open_Flower_P Parameter: Tissue Value: Closed Flower vs. Whole Plant
  misc_feature: MA Experiment ID: 20000439 Result: Up-regulated in Transcription
  misc_feature: MA Experiment 20000439 PARAMETER Experiment Name: At_Roots__P Parameter: Age (day) Value: 14 vs. 21
  misc_feature: MA Experiment 20000439 PARAMETER Experiment Name: At_Roots__P Parameter: Organism Value: A. thaliana
  misc_feature: MA Experiment 20000439 PARAMETER Experiment Name: At_Roots__P Parameter: Tissue Value: Roots vs. Whole Plant
  misc_feature: MA Experiment ID: 20000451 Result: Down-regulated in Transcription
  misc_feature: MA Experiment 20000451 PARAMETER Experiment Name: At_CS6879_Shoots-Roots_P Parameter: Age (day) Value: 14
  misc_feature: MA Experiment 20000451 PARAMETER Experiment Name: At_CS6879_Shoots-Roots_P Parameter: Organism Value: A. thaliana
  misc_feature: MA Experiment 20000451 PARAMETER Experiment Name: At_CS6879_Shoots-Roots_P Parameter: Plant Line Value: CS6879 vs. WS
  misc_feature: MA Experiment 20000451 PARAMETER Experiment Name: At_CS6879_Shoots-Roots_P Parameter: Tissue Value: Roots
  misc_feature: MA Experiment ID: 20000794 Result: Up-regulated in Transcription
  misc_feature: MA Experiment 20000794 PARAMETER Experiment Name: At_Petals_P Parameter: Age (day) Value: 23-25 days
  misc_feature: MA Experiment 20000794 PARAMETER Experiment Name: At_Petals_P Parameter: Plant Line Value: WS
  misc_feature: MA Experiment 20000794 PARAMETER Experiment Name: At_Petals_P Parameter: Tissue Value: Petals vs. Whole plant
atgggaaagattggtattgttttctttgcttcgttgctcttcttgctaattatattcccaagttgtgcctttgcagctataaccagagcaagtcctttgtcaataggacaaactctgagctcccctaatggaacttatgagttagggttcttcagtccaaacaactctcggaatcagtatgttgggatctggttcaagaacatcacccctcgggttgttgtctgggtggctaacagagataagccagttacaaacaacgcagcgaatctcactatcaacagcaatgggagccttatcttggttgagagagaacaaaatgttgtttggtcaataggagaaactttctcttctaacgagcttcgtgctgagctattagaaaacggaaatcttgtactcattgatggagtttcagaaagaaacttatgggaaagtttcgagcatcttggtgatactatgttacttgaatcatctgtgatgtatgatgttccgaataacaagaaacgtgttttatcttcttggaaaaatcccaccgatccttcacctggagaattcgtagctgagcttacgacacaagtacctccgcaaggctttataatgagaggatccaggccttactggagaggtggtccatgggcaagggtaaggttcaccggcataccagaaatggatggatcacatgtaagcaaattcgacatttcccaagatgttgcagccggcacaggatctttgacttattcattagaacgaagaaattcgaacctgtcgtacactacgctcacatcagcgggatcgttaaagatcatttggaataatggctctggttgggttactgacttggaggcccctgtaagctcatgtgatgtttataatacatgtggaccttttggcttgtgtataagatctaatcccccaaagtgtgaatgcttgaaaggctttgtaccaaaatcagatgaggagtggaataaaaggaattggactggtggttgtatgagaagaacaaatttatcttgtgatgtgaactcttctgcaacagcacaagccaataatggagacatcttcgacatagttgcaaatgtgaagcctccagacttttatgaatatctaagtttgatcaatgaagaggattgccaacaacgttgtcttggaaactgttcttgcacggcattttcctatattgaacaaattggatgtttggtatggaatcgagagcttgtggatgtaatgcagtttgttgctggaggagaaactctttccattcgtcttgcaagttctgagttagctggaagcaatcgagtgaagattattgttgctagcattgtcagcatttctgttttcatgatcttggtttttgcctcttattggtactggagatacaaagccaaacaaaatgattcaaatcctataccattggagacatcacaagatgcatggagggaacaactgaaaccacaagatgtaaatttctttgatatgcaaaccatattaactatcaccaataactttagcatggaaaataagcttggtcaaggtggattcggtccagtgtataagggaaatctacaagatgggaaagaaatagccataaaacgcctttcgagcacctctggacagggtctagaggagttcatgaatgaaataatactcatctcgaaactccaacacagaaacttggtccgccttttgggatgttgcattgaaggagaagaaaagctattgatttatgagtttatggcgaacaaaagcctcaatacctttatctttggtcagtcccttattctgaccaatctgtttttaatttggctagattcgacgaaaaagcttgagcttgattggcccaagcggtttgaaatcattcaaggtattgcttgcggacttctttatcttcaccgcgactcatgtcttagggttgtacaccgagatatgaaggtcagcaacatccttttagacgaggaaatgaacccaaaaatatcagattttggattggctcggatgtttcaaggaacccaacatcaagccaacactcgcagggttgttggaacgctcggatacatgtctccagagtatgcttggacaggcatgttctctgagaaatccgacatctacgcatttggagttctgctattggaaatcataaccggcaagaggatttcaagtttcaccattggagaggaaggcaaaactcttcttgaatttgcatgggattcttggtgcgaaagcggtggatcggatctactggaccaagatatctctagctcgggttctgaatccgaagtagcgagatgtgttcagattggtttgctctgtattcaacaacaagccggggatagacccaacattgcacaagtaatgtcaatgcttacaaccacaatggatcttccgaaaccaaaacaacccgtattcgcaatgcaagtccaagagagtgattcagagtctaagactatgtactctgtcaataatataacacaaactgctatagttggtcgataa

SEQ ID NO: 85874 - protein, 828 aa, Arabidopsis thaliana
  peptide (1)..(828): Ceres Seq. ID no. 12684286
  misc_feature (70)..(180): Pfam Name: D-mannose binding lectin Pfam Description: D-mannose binding lectin
  misc_feature (1)..(828): Homolog of NCBI NO: 15219917 NR Description: receptor kinase, putative; protein id: At1g61390.1
  misc_feature (1)..(828): Homolog of NCBI NO: 15219933 NR Description: receptor protein kinase (IRK1), putative; protein
  misc_feature (1)..(828): Homolog of NCBI NO: 18391259 NR Description: serine/threonine kinase, putative; protein id:
  misc_feature (1)..(828): Homolog of NCBI NO: 30682149 NR Description: S-locus protein kinase, putative [Arabidopsis
  misc_feature (1)..(828): Homolog of NCBI NO: 15810423 NR Description: putative serine/threonine kinase [Arabidopsis
  misc_feature (10)..(821): Homolog of NCBI NO: 15219912 NR Description: receptor protein kinase (IRK1), putative; protein At1g61360.1 [Arabidopsis thaliana]
  misc_feature (1)..(828): Homolog of NCBI NO: 3056588 NR Description: T1F9.9 [Arabidopsis thaliana]
  misc_feature (13)..(828): Homolog of NCBI NO: 25287700 NR Description: hypothetical protein T25B24.15 [imported] - thaliana >gi|4585885|gb|AAD25558.1|AC005850_15 Putative
  misc_feature (250)..(704): Homolog of NCBI NO: 30696575 NR Description: S-locus protein kinase, putative [Arabidopsis
  misc_feature (707)..(828): Homolog of NCBI NO: 30696575 NR Description: S-locus protein kinase, putative [Arabidopsis
MGKIGIVFFASLLFLLIIFPSCAFAAITRASPLSIGQTLSSPNGTYELGFFSPNNSRNQYVGIWFKNITPRVVVWVANRDKPVTNNAANLTINSNGSLILVEREQNVVWSIGETFSSNELRAELLENGNLVLIDGVSERNLWESFEHLGDTMLLESSVMYDVPNNKKRVLSSWKNPTDPSPGEFVAELTTQVPPQGFIMRGSRPYWRGGPWARVRFTGIPEMDGSHVSKFDISQDVAAGTGSLTYSLERRNSNLSYTTLTSAGSLKIIWNNGSGWVTDLEAPVSSCDVYNTCGPFGLCIRSNPPKCECLKGFVPKSDEEWNKRNWTGGCMRRTNLSCDVNSSATAQANNGDIFDIVANVKPPDFYEYLSLINEEDCQQRCLGNCSCTAFSYIEQIGCLVWNRELVDVMQFVAGGETLSIRLASSELAGSNRVKIIVASIVSISVFMILVFASYWYWRYKAKQNDSNPIPLETSQDAWREQLKPQDVNFFDMQTILTITNNFSMENKLGQGGFGPVYKGNLQDGKEIAIKRLSSTSGQGLEEFMNEIILISKLQHRNLVRLLGCCIEGEEKLLIYEFMANKSLNTFIFGQSLILTNLFLIWLDSTKKLELDWPKRFEIIQGIACGLLYLHRDSCLRVVHRDMKVSNILLDEEMNPKISDFGLARMFQGTQHQANTRRVVGTLGYMSPEYAWTGMFSEKSDIYAFGVLLLEIITGKRISSFTIGEEGKTLLEFAWDSWCESGGSDLLDQDISSSGSESEVARCVQIGLLCIQQQAGDRPNIAQVMSMLTTTMDLPKPKQPVFAMQVQESDSESKTMYSVNNITQTAIVGR

SEQ ID NO: 85875 - protein, 677 aa, Arabidopsis thaliana
  peptide (1)..(677): Ceres Seq. ID no. 12684287
  misc_feature (1)..(677): Homolog of NCBI NO: 15219917 NR Description: receptor kinase, putative; protein id: At1g61390.1
  misc_feature (1)..(677): Homolog of NCBI NO: 15219933 NR Description: receptor protein kinase (IRK1), putative; protein
  misc_feature (1)..(677): Homolog of NCBI NO: 18391259 NR Description: serine/threonine kinase, putative; protein id:
  misc_feature (1)..(677): Homolog of NCBI NO: 30682149 NR Description: S-locus protein kinase, putative [Arabidopsis
  misc_feature (1)..(677): Homolog of NCBI NO: 15810423 NR Description: putative serine/threonine kinase [Arabidopsis
  misc_feature (1)..(670): Homolog of NCBI NO: 15219912 NR Description: receptor protein kinase (IRK1), putative; protein At1g61360.1 [Arabidopsis thaliana]
  misc_feature (1)..(677): Homolog of NCBI NO: 3056588 NR Description: T1F9.9 [Arabidopsis thaliana]
  misc_feature (1)..(677): Homolog of NCBI NO: 25287700 NR Description: hypothetical protein T25B24.15 [imported] - thaliana >gi|4585885|gb|AAD25558.1|AC005850_15 Putative
  misc_feature (99)..(553): Homolog of NCBI NO: 30696575 NR Description: S-locus protein kinase, putative [Arabidopsis
  misc_feature (556)..(677): Homolog of NCBI NO: 30696575 NR Description: S-locus protein kinase, putative [Arabidopsis
MLLESSVMYDVPNNKKRVLSSWKNPTDPSPGEFVAELTTQVPPQGFIMRGSRPYWRGGPWARVRFTGIPEMDGSHVSKFDISQDVAAGTGSLTYSLERRNSNLSYTTLTSAGSLKIIWNNGSGWVTDLEAPVSSCDVYNTCGPFGLCIRSNPPKCECLKGFVPKSDEEWNKRNWTGGCMRRTNLSCDVNSSATAQANNGDIFDIVANVKPPDFYEYLSLINEEDCQQRCLGNCSCTAFSYIEQIGCLVWNRELVDVMQFVAGGETLSIRLASSELAGSNRVKIIVASIVSISVFMILVFASYWYWRYKAKQNDSNPIPLETSQDAWREQLKPQDVNFFDMQTILTITNNFSMENKLGQGGFGPVYKGNLQDGKEIAIKRLSSTSGQGLEEFMNEIILISKLQHRNLVRLLGCCIEGEEKLLIYEFMANKSLNTFIFGQSLILTNLFLIWLDSTKKLELDWPKRFEIIQGIACGLLYLHRDSCLRVVHRDMKVSNILLDEEMNPKISDFGLARMFQGTQHQANTRRVVGTLGYMSPEYAWTGMFSEKSDIYAFGVLLLEIITGKRISSFTIGEEGKTLLEFAWDSWCESGGSDLLDQDISSSGSESEVARCVQIGLLCIQQQAGDRPNIAQVMSMLTTTMDLPKPKQPVFAMQVQESDSESKTMYSVNNITQTAIVGR

SEQ ID NO: 85876 - protein, 670 aa, Arabidopsis thaliana
  peptide (1)..(670): Ceres Seq. ID no. 12684288
  misc_feature (1)..(670): Homolog of NCBI NO: 15219917 NR Description: receptor kinase, putative; protein id: At1g61390.1
  misc_feature (1)..(670): Homolog of NCBI NO: 15219933 NR Description: receptor protein kinase (IRK1), putative; protein
  misc_feature (1)..(670): Homolog of NCBI NO: 18391259 NR Description: serine/threonine kinase, putative; protein id:
  misc_feature (1)..(670): Homolog of NCBI NO: 30682149 NR Description: S-locus protein kinase, putative [Arabidopsis
  misc_feature (1)..(670): Homolog of NCBI NO: 15810423 NR Description: putative serine/threonine kinase [Arabidopsis
  misc_feature (1)..(663): Homolog of NCBI NO: 15219912 NR Description: receptor protein kinase (IRK1), putative; protein At1g61360.1 [Arabidopsis thaliana]
  misc_feature (1)..(670): Homolog of NCBI NO: 3056588 NR Description: T1F9.9 [Arabidopsis thaliana]
  misc_feature (1)..(670): Homolog of NCBI NO: 25287700 NR Description: hypothetical protein T25B24.15 [imported] - thaliana >gi|4585885|gb|AAD25558.1|AC005850_15 Putative
  misc_feature (92)..(546): Homolog of NCBI NO: 30696575 NR Description: S-locus protein kinase, putative [Arabidopsis
  misc_feature (549)..(670): Homolog of NCBI NO: 30696575 NR Description: S-locus protein kinase, putative [Arabidopsis
MYDVPNNKKRVLSSWKNPTDPSPGEFVAELTTQVPPQGFIMRGSRPYWRGGPWARVRFTGIPEMDGSHVSKFDISQDVAAGTGSLTYSLERRNSNLSYTTLTSAGSLKIIWNNGSGWVTDLEAPVSSCDVYNTCGPFGLCIRSNPPKCECLKGFVPKSDEEWNKRNWTGGCMRRTNLSCDVNSSATAQANNGDIFDIVANVKPPDFYEYLSLINEEDCQQRCLGNCSCTAFSYIEQIGCLVWNRELVDVMQFVAGGETLSIRLASSELAGSNRVKIIVASIVSISVFMILVFASYWYWRYKAKQNDSNPIPLETSQDAWREQLKPQDVNFFDMQTILTITNNFSMENKLGQGGFGPVYKGNLQDGKEIAIKRLSSTSGQGLEEFMNEIILISKLQHRNLVRLLGCCIEGEEKLLIYEFMANKSLNTFIFGQSLILTNLFLIWLDSTKKLELDWPKRFEIIQGIACGLLYLHRDSCLRVVHRDMKVSNILLDEEMNPKISDFGLARMFQGTQHQANTRRVVGTLGYMSPEYAWTGMFSEKSDIYAFGVLLLEIITGKRISSFTIGEEGKTLLEFAWDSWCESGGSDLLDQDISSSGSESEVARCVQIGLLCIQQQAGDRPNIAQVMSMLTTTMDLPKPKQPVFAMQVQESDSESKTMYSVNNITQTAIVGR

SEQ ID NO: 85877 - DNA, 2316 bp, Arabidopsis thaliana
  misc_feature (1)..(2316): Ceres Seq. ID no. 12684293
  misc_feature: MA Experiment ID: 20000307 Result: Down-regulated in Transcription
  misc_feature: MA Experiment 20000307 PARAMETER Experiment Name: At_Germinating_Seeds_Sub_P Parameter: Age (hr) Value: 24 vs. 0
  misc_feature: MA Experiment 20000307 PARAMETER Experiment Name: At_Germinating_Seeds_Sub_P Parameter: Organism Value: A. thaliana
  misc_feature: MA Experiment 20000307 PARAMETER Experiment Name: At_Germinating_Seeds_Sub_P Parameter: Plant Line Value: WS
  misc_feature: MA Experiment 20000307 PARAMETER Experiment Name: At_Germinating_Seeds_Sub_P Parameter: Tissue Value: Germinating Seeds
  misc_feature: MA Experiment ID: 20000315 Result: Down-regulated in Transcription
  misc_feature: MA Experiment 20000315 PARAMETER Experiment Name: At_14day_Shoots-Roots_Sub_P Parameter: Age (day) Value: 14
  misc_feature: MA Experiment 20000315 PARAMETER Experiment Name: At_14day_Shoots-Roots_Sub_P Parameter: Organism Value: A. thaliana
  misc_feature: MA Experiment 20000315 PARAMETER Experiment Name: At_14day_Shoots-Roots_Sub_P Parameter: Plant Line Value: WS
  misc_feature: MA Experiment 20000315 PARAMETER Experiment Name: At_14day_Shoots-Roots_Sub_P Parameter: Tissue Value: Shoots vs. Whole Plant
  misc_feature: MA Experiment ID: 20000328 Result: Down-regulated in Transcription
  misc_feature: MA Experiment 20000328 PARAMETER Experiment Name: At_42deg_Heat_Sub_P Parameter: Age (day) Value: 14
  misc_feature: MA Experiment 20000328 PARAMETER Experiment Name: At_42deg_Heat_Sub_P Parameter: Organism Value: A. thaliana
  misc_feature: MA Experiment 20000328 PARAMETER Experiment Name: At_42deg_Heat_Sub_P Parameter: Plant Line Value: WS
  misc_feature: MA Experiment 20000328 PARAMETER Experiment Name: At_42deg_Heat_Sub_P Parameter: Temperature (deg C) Value: 42 vs. 22
  misc_feature: MA Experiment 20000328 PARAMETER Experiment Name: At_42deg_Heat_Sub_P Parameter: Timepoint (hr) Value: 6
  misc_feature: MA Experiment 20000328 PARAMETER Experiment Name: At_42deg_Heat_Sub_P Parameter: Tissue Value: Aerial
atggggaagaagagggtcgtgttgctttggcttagcatctttataagttttagctctgcagagataacggaagagagccctttgtcaataggacaaactctcagctcctccaatggagtttatgaactgggcttcttcagttttaataactcccaaaatcagtatgtcggaatctccttcaagggtatcattccccgggtggttgtgtgggtggcaaatagagaaaagcctgttacagactctgcggcaaatctggttatcagcagcaacggaagtcttcagttatttaatggcaaacatggtgttgtgtggtccagtggaaaagctcttgcatctaacgggtctcgtgtagagcttttagacagtggaaatctagttgtcatagaaaaagtttcgggaagaactctatgggaaagttttgagcatcttggtgatactctgctccctcactcaactatcatgtataatgtccacaccggtgagaagcgagggttgacttcttggaaaagttacactgatccatcgcctggtgactttgtcgttctgattacaccgcaagtgccatcacaggggtttcttatgagaggctcgaccccttattttagatctggtccatgggctaaaacaaagttcaccgggttacctcaaatggatgaatcatacacaagtccattcagcttaacacaggatgtaaatgggtcaggatactattcgtattttgatagagacaacaaacgttcacgtattaggttaacaccagatggatcaatgaaggcgttacggtataatggaatggactgggacacaacctacgagggtcctgccaattcatgtgatatttatggcgtatgtggaccttttggtttttgtgttatctcagttcctccaaagtgtaaatgcttcaaaggttttattcctaaatccattgaggagtggaaaacaggaaactggactagtggttgtgtgaggcgtagcgaactacattgtcaaggaaactctactggcaaagatgcaaatgtcttccatactgttcccaacataaagcctccagacttttacgaatacgcagattctgtggatgcggaagaatgccaacaaaattgcctcaacaattgttcttgcttggccttcgcttatattcctggaatagggtgcttaatgtggagcaaggacctaatggacacagttcaatttgctgcaggaggagaacttctttccattcgtcttgcacgttctgagctagacgtaaataagcgcaagaagaccatcattgctattacagtgagccttaccctttttgtgatcttgggctttactgcgtttggtttctggagacgcagagtggaacaaaatgctcttatatcagaagatgcatggaggaatgatctgcaaacacaagacgtcccaggtctagaatattttgagatgaataccatacaaactgccaccaataatttcagtctatcaaacaaactcggtcatggtggatttggttcagtttacaaggcgagaaacggaaaactgcaagatggaagggaaattgcggtaaaacgcctttctagcagctctgagcagggcaaacaggagttcatgaatgaaatagtactgatatcaaaactccaacacagaaacttagtccgggttttgggatgctgcgtcgaaggaacagagaagctattgatttatgagtttatgaaaaacaaaagccttgatacttttgtctttgattcaaaaaaaaggcttgagatagattggccaaagagatttgatatcattcaaggtattgcacgtggacttctctatctccatcgtgactcacgcctcagaataattcaccgagacctgaaggtcagcaacattcttctggacgagaaaatgaacccgaaaatatcagattttgggttggctcggatgtttcatggaaccgaatatcaggataaaactcgcagggttgtcggaactctaggttatatgtctcctgagtatgcatgggctggagtattctctgagaaatcagacatctacagcttcggagttctactgctagaaatcatcagcggagagaagatctcgaggttcagctatggcgaagaaggaaaaacacttcttgcatatattggtttgctttgtgttcaataccagcctgcagacagaccaaacacacttgagttgctttctatgcttaccacaacatcagatcttcctctgccaaaacaacctacatttgtagtgcacacgagagatggcaaatctccgtcaaatgattcgatgatcactgtcaatgagatgacagagtctgtgatccatggacgttga

SEQ ID NO: 85878 - protein, 771 aa, Arabidopsis thaliana
  peptide (1)..(771): Ceres Seq. ID no. 12684294
  misc_feature (65)..(175): Pfam Name: D-mannose binding lectin Pfam Description: D-mannose binding lectin
  misc_feature (9)..(705): Homolog of NCBI NO: 30682152 NR Description: S-locus protein kinase, putative [Arabidopsis
  misc_feature (706)..(771): Homolog of NCBI NO: 30682152 NR Description: S-locus protein kinase, putative [Arabidopsis
  misc_feature (9)..(705): Homolog of NCBI NO: 30682149 NR Description: S-locus protein kinase, putative [Arabidopsis
  misc_feature (706)..(771): Homolog of NCBI NO: 30682149 NR Description: S-locus protein kinase, putative [Arabidopsis
  misc_feature (242)..(771): Homolog of NCBI NO: 30696575 NR Description: S-locus protein kinase, putative [Arabidopsis
  misc_feature (147)..(217): Homolog of NCBI NO: 30696575 NR Description: S-locus protein kinase, putative [Arabidopsis
  misc_feature (29)..(445): Homolog of NCBI NO: 7434416 NR Description: serine/threonine kinase (EC 2.7.1.-) BRLK - wild >gi|2181190|emb|CAA73134.1| serine/threonine kinase [Brassica
  misc_feature (471)..(709): Homolog of NCBI NO: 7434416 NR Description: serine/threonine kinase (EC 2.7.1.-) BRLK - wild >gi|2181190|emb|CAA73134.1| serine/threonine kinase [Brassica
  misc_feature (34)..(445): Homolog of NCBI NO: 15234429 NR Description: serine/threonine kinase - like protein; protein
  misc_feature (471)..(705): Homolog of NCBI NO: 15234429 NR Description: serine/threonine kinase - like protein; protein
MGKKRVVLLWLSIFISFSSAEITEESPLSIGQTLSSSNGVYELGFFSFNNSQNQYVGISFKGIIPRVVVWVANREKPVTDSAANLVISSNGSLQLFNGKHGVVWSSGKALASNGSRVELLDSGNLVVIEKVSGRTLWESFEHLGDTLLPHSTIMYNVHTGEKRGLTSWKSYTDPSPGDFVVLITPQVPSQGFLMRGSTPYFRSGPWAKTKFTGLPQMDESYTSPFSLTQDVNGSGYYSYFDRDNKRSRIRLTPDGSMKALRYNGMDWDTTYEGPANSCDIYGVCGPFGFCVISVPPKCKCFKGFIPKSIEEWKTGNWTSGCVRRSELHCQGNSTGKDANVFHTVPNIKPPDFYEYADSVDAEECQQNCLNNCSCLAFAYIPGIGCLMWSKDLMDTVQFAAGGELLSIRLARSELDVNKRKKTIIAITVSLTLFVILGFTAFGFWRRRVEQNALISEDAWRNDLQTQDVPGLEYFEMNTIQTATNNFSLSNKLGHGGFGSVYKARNGKLQDGREIAVKRLSSSSEQGKQEFMNEIVLISKLQHRNLVRVLGCCVEGTEKLLIYEFMKNKSLDTFVFDSKKRLEIDWPKRFDIIQGIARGLLYLHRDSRLRIIHRDLKVSNILLDEKMNPKISDFGLARMFHGTEYQDKTRRVVGTLGYMSPEYAWAGVFSEKSDIYSFGVLLLEIISGEKISRFSYGEEGKTLLAYIGLLCVQYQPADRPNTLELLSMLTTTSDLPLPKQPTFVVHTRDGKSPSNDSMITVNEMTESVIHGR

SEQ ID NO: 85879 - protein, 618 aa, Arabidopsis thaliana
  peptide (1)..(618): Ceres Seq. ID no. 12684295
  misc_feature (1)..(552): Homolog of NCBI NO: 30682152 NR Description: S-locus protein kinase, putative [Arabidopsis
  misc_feature (553)..(618): Homolog of NCBI NO: 30682152 NR Description: S-locus protein kinase, putative [Arabidopsis
  misc_feature (1)..(552): Homolog of NCBI NO: 30682149 NR Description: S-locus protein kinase, putative [Arabidopsis
  misc_feature (553)..(618): Homolog of NCBI NO: 30682149 NR Description: S-locus protein kinase, putative [Arabidopsis
  misc_feature (89)..(618): Homolog of NCBI NO: 30696575 NR Description: S-locus protein kinase, putative [Arabidopsis
  misc_feature (1)..(64): Homolog of NCBI NO: 30696575 NR Description: S-locus protein kinase, putative [Arabidopsis
  misc_feature (1)..(292): Homolog of NCBI NO: 7434416 NR Description: serine/threonine kinase (EC 2.7.1.-) BRLK - wild >gi|2181190|emb|CAA73134.1| serine/threonine kinase [Brassica
  misc_feature (318)..(556): Homolog of NCBI NO: 7434416 NR Description: serine/threonine kinase (EC 2.7.1.-) BRLK - wild >gi|2181190|emb|CAA73134.1| serine/threonine kinase [Brassica
  misc_feature (1)..(292): Homolog of NCBI NO: 15234429 NR Description: serine/threonine kinase - like protein; protein
  misc_feature (318)..(552): Homolog of NCBI NO: 15234429 NR Description: serine/threonine kinase - like protein; protein
MYNVHTGEKRGLTSWKSYTDPSPGDFVVLITPQVPSQGFLMRGSTPYFRSGPWAKTKFTGLPQMDESYTSPFSLTQDVNGSGYYSYFDRDNKRSRIRLTPDGSMKALRYNGMDWDTTYEGPANSCDIYGVCGPFGFCVISVPPKCKCFKGFIPKSIEEWKTGNWTSGCVRRSELHCQGNSTGKDANVFHTVPNIKPPDFYEYADSVDAEECQQNCLNNCSCLAFAYIPGIGCLMWSKDLMDTVQFAAGGELLSIRLARSELDVNKRKKTIIAITVSLTLFVILGFTAFGFWRRRVEQNALISEDAWRNDLQTQDVPGLEYFEMNTIQTATNNFSLSNKLGHGGFGSVYKARNGKLQDGREIAVKRLSSSSEQGKQEFMNEIVLISKLQHRNLVRVLGCCVEGTEKLLIYEFMKNKSLDTFVFDSKKRLEIDWPKRFDIIQGIARGLLYLHRDSRLRIIHRDLKVSNILLDEKMNPKISDFGLARMFHGTEYQDKTRRVVGTLGYMSPEYAWAGVFSEKSDIYSFGVLLLEIISGEKISRFSYGEEGKTLLAYIGLLCVQYQPADRPNTLELLSMLTTTSDLPLPKQPTFVVHTRDGKSPSNDSMITVNEMTESVIHGR

SEQ ID NO: 85880 - protein, 578 aa, Arabidopsis thaliana
  peptide (1)..(578): Ceres Seq. ID no. 12684296
  misc_feature (1)..(512): Homolog of NCBI NO: 30682152 NR Description: S-locus protein kinase, putative [Arabidopsis
  misc_feature (513)..(578): Homolog of NCBI NO: 30682152 NR Description: S-locus protein kinase, putative [Arabidopsis
  misc_feature (1)..(512): Homolog of NCBI NO: 30682149 NR Description: S-locus protein kinase, putative [Arabidopsis
  misc_feature (513)..(578): Homolog of NCBI NO: 30682149 NR Description: S-locus protein kinase, putative [Arabidopsis
  misc_feature (49)..(578): Homolog of NCBI NO: 30696575 NR Description: S-locus protein kinase, putative [Arabidopsis
  misc_feature (1)..(24): Homolog of NCBI NO: 30696575 NR Description: S-locus protein kinase, putative [Arabidopsis
  misc_feature (1)..(252): Homolog of NCBI NO: 7434416 NR Description: serine/threonine kinase (EC 2.7.1.-) BRLK - wild >gi|2181190|emb|CAA73134.1| serine/threonine kinase [Brassica
  misc_feature (278)..(516): Homolog of NCBI NO: 7434416 NR Description: serine/threonine kinase (EC 2.7.1.-) BRLK - wild >gi|2181190|emb|CAA73134.1| serine/threonine kinase [Brassica
  misc_feature (1)..(252): Homolog of NCBI NO: 15234429 NR Description: serine/threonine kinase - like protein; protein
  misc_feature (278)..(512): Homolog of NCBI NO: 15234429 NR Description: serine/threonine kinase - like protein; protein
MRGSTPYFRSGPWAKTKFTGLPQMDESYTSPFSLTQDVNGSGYYSYFDRDNKRSRIRLTPDGSMKALRYNGMDWDTTYEGPANSCDIYGVCGPFGFCVISVPPKCKCFKGFIPKSIEEWKTGNWTSGCVRRSELHCQGNSTGKDANVFHTVPNIKPPDFYEYADSVDAEECQQNCLNNCSCLAFAYIPGIGCLMWSKDLMDTVQFAAGGELLSIRLARSELDVNKRKKTIIAITVSLTLFVILGFTAFGFWRRRVEQNALISEDAWRNDLQTQDVPGLEYFEMNTIQTATNNFSLSNKLGHGGFGSVYKARNGKLQDGREIAVKRLSSSSEQGKQEFMNEIVLISKLQHRNLVRVLGCCVEGTEKLLIYEFMKNKSLDTFVFDSKKRLEIDWPKRFDIIQGIARGLLYLHRDSRLRIIHRDLKVSNILLDEKMNPKISDFGLARMFHGTEYQDKTRRVVGTLGYMSPEYAWAGVFSEKSDIYSFGVLLLEIISGEKISRFSYGEEGKTLLAYIGLLCVQYQPADRPNTLELLSMLTTTSDLPLPKQPTFVVHTRDGKSPSNDSMITVNEMTESVIHGR

SEQ ID NO: 85881 - DNA, 2325 bp, Arabidopsis thaliana
  misc_feature (1)..(2325): Ceres Seq. ID no. 12684301
  misc_feature: MA Experiment ID: 20000307 Result: Down-regulated in Transcription
  misc_feature: MA Experiment 20000307 PARAMETER Experiment Name: At_Germinating_Seeds_Sub_P Parameter: Age (hr) Value: 24 vs. 0
  misc_feature: MA Experiment 20000307 PARAMETER Experiment Name: At_Germinating_Seeds_Sub_P Parameter: Organism Value: A. thaliana
  misc_feature: MA Experiment 20000307 PARAMETER Experiment Name: At_Germinating_Seeds_Sub_P Parameter: Plant Line Value: WS
  misc_feature: MA Experiment 20000307 PARAMETER Experiment Name: At_Germinating_Seeds_Sub_P Parameter: Tissue Value: Germinating Seeds
  misc_feature: MA Experiment ID: 20000315 Result: Down-regulated in Transcription
  misc_feature: MA Experiment 20000315 PARAMETER Experiment Name: At_14day_Shoots-Roots_Sub_P Parameter: Age (day) Value: 14
  misc_feature: MA Experiment 20000315 PARAMETER Experiment Name: At_14day_Shoots-Roots_Sub_P Parameter: Organism Value: A. thaliana
  misc_feature: MA Experiment 20000315 PARAMETER Experiment Name: At_14day_Shoots-Roots_Sub_P Parameter: Plant Line Value: WS
  misc_feature: MA Experiment 20000315 PARAMETER Experiment Name: At_14day_Shoots-Roots_Sub_P Parameter: Tissue Value: Shoots vs. Whole Plant
  misc_feature: MA Experiment ID: 20000328 Result: Down-regulated in Transcription
  misc_feature: MA Experiment 20000328 PARAMETER Experiment Name: At_42deg_Heat_Sub_P Parameter: Age (day) Value: 14
  misc_feature: MA Experiment 20000328 PARAMETER Experiment Name: At_42deg_Heat_Sub_P Parameter: Organism Value: A. thaliana
  misc_feature: MA Experiment 20000328 PARAMETER Experiment Name: At_42deg_Heat_Sub_P Parameter: Plant Line Value: WS
  misc_feature: MA Experiment 20000328 PARAMETER Experiment Name: At_42deg_Heat_Sub_P Parameter: Temperature (deg C) Value: 42 vs. 22
  misc_feature: MA Experiment 20000328 PARAMETER Experiment Name: At_42deg_Heat_Sub_P Parameter: Timepoint (hr) Value: 6
  misc_feature: MA Experiment 20000328 PARAMETER Experiment Name: At_42deg_Heat_Sub_P Parameter: Tissue Value: Aerial
atggggaagaagaggatagtgttctttgcttatttgcccttttttaccatctttatgagttttagctttgcagggataaccaaagagagtcccttttcaattggacaaactctcagctcctctaatggtgtttatgaattgggattcttcagtcttaataactcccaaaatcagtatctcggaatttggttcaagagtatcattccccaggtggttgtgtgggtggctaatagagaaaagcctgttacagactctgcggcaaatctcggtatcagcagcaatggtagtcttctgttatctaatggcaaacatggcgttgtgtggtctaccggagatatttttgcatctaatgggtctcgtgcagagcttacagaccatggaaatcttgttttcatagacaaagtttcgggaaggactctatggcaaagctttgagcatcttggtaatactctgctccctacgtcaattatgatgtataatctcgtcgctggtgagaagcgaggattgactgcttggaaaagttacaccgatccatcgcctggcgaatttgtggctctgattacaccgcaagtgccatcacaggggattattatgagaggctcgacacgttattatagaaccggtccatgggctaaaacaaggttcactggatcaccacaaatggatgaatcatacacaagtccattcatcttaacacaggatgtaaatgggtcaggatacttttcatttgttgaaagaggcaaaccttcacgcatgattttaacatcagagggaacaatgaaggtcttagtgcataatggaatggactgggaatcaacctacgagggtccagccaattcatgtgatatatatggcgtatgtggaccttttgggctttgtgttgtatcaattcctccaaaatgtaaatgcttcaaaggttttgttcctaaattcgctaaggagtggaagaaaggaaactggactagtggttgtgtgaggcgtaccgaactacattgtcaaggaaactccagtggcaaagatgcaaatgtcttctatactgttcccaacataaagcctccagacttttacgagtatgcaaattctcagaatgctgaagaatgccaccaaaattgcctccacaattgttcttgcttggcgttttcttatattcctggaatagggtgcttaatgtggagcaaggatctaatggacacaaggcaattttctgcagcaggagaacttctttccattcgtcttgcacgttctgagctagatgtaaataagcgcaagatgaccattgttgctagtacagtgagcctgaccctattcgtgatctttggatttgctgcatttggtttctggagatgcagagtggaacataatgctcatatatcaaacgatgcatggaggaattttctgcaatcacaagacgtcccaggtttagaattttttgagatgaatgccatacaaactgccaccaataatttcagtctatcaaacaaactcggtcctggtggatttggttctgtttacaaggcgagaaacggaaaactgcaagatggaagagaaattgcggtaaaacgtctttctagcagctctgggcagggcaaacaggagttcatgaatgaaatagtactgatatcaaaactccaacacagaaacttagtccgggttttgggatgctgcgtcgaaggaacagagaagctattgatttatgggttcttgaaaaacaaaagcctggatacttttgtctttgatgcaagaaaaaagctcgaacttgattggccaaagagatttgagatcattgaaggtattgcacgtggacttctctatctccaccgtgactcacgcctcagagtaattcaccgagacctgaaggtcagcaacattcttctggatgagaaaatgaacccgaaaatatcagattttggtttggctcggatgtttcagggaacccaatatcaggaaaaaactcgcagggttgtcggaactctaggatatatgtctcctgagtatgcatggactggcgtattctctgagaaatccgatatctacagtttcggagttctgttgttagaaatcatcagcggaaagaagatctcaagtttcagctatggcgaggagggaaaagcacttcttgcatatattggtttgctctgtgttcaacacgagcctgcagacagaccaaacacacttgagttgctgtctatgcttaccacaacatcagatcttcctctgcccaaaaaacccacatttgtagtgcacactagaaaagacgaatcaccgtcaaatgattcgatgatcactgtcaatgagatgacagagtctgtgatccaaggacgttga

SEQ ID NO: 85882 - protein, 774 aa, Arabidopsis thaliana
  peptide (1)..(774): Ceres Seq. ID no. 12684302
  misc_feature (69)..(179): Pfam Name: D-mannose binding lectin Pfam Description: D-mannose binding lectin
  misc_feature (9)..(708): Homolog of NCBI NO: 18407211 NR Description: receptor kinase, putative; protein id:
  misc_feature (700)..(774): Homolog of NCBI NO: 18407211 NR Description: receptor kinase, putative; protein id:
  misc_feature (9)..(457): Homolog of NCBI NO: 25287700 NR Description: hypothetical protein T25B24.15 [imported] - thaliana >gi|4585885|gb|AAD25558.1|AC005850_15 Putative
  misc_feature (444)..(708): Homolog of NCBI NO: 25287700 NR Description: hypothetical protein T25B24.15 [imported] - thaliana >gi|4585885|gb|AAD25558.1|AC005850_15 Putative
  misc_feature (700)..(774): Homolog of NCBI NO: 25287700 NR Description: hypothetical protein T25B24.15 [imported] - thaliana >gi|4585885|gb|AAD25558.1|AC005850_15 Putative
  misc_feature (1)..(708): Homolog of NCBI NO: 30682152 NR Description: S-locus protein kinase, putative [Arabidopsis
  misc_feature (694)..(774): Homolog of NCBI NO: 30682152 NR Description: S-locus protein kinase, putative [Arabidopsis
  misc_feature (1)..(708): Homolog of NCBI NO: 30682149 NR Description: S-locus protein kinase, putative [Arabidopsis
  misc_feature (694)..(774): Homolog of NCBI NO: 30682149 NR Description: S-locus protein kinase, putative [Arabidopsis
  misc_feature (238)..(774): Homolog of NCBI NO: 30696575 NR Description: S-locus protein kinase, putative [Arabidopsis
MGKKRIVFFAYLPFFTIFMSFSFAGITKESPFSIGQTLSSSNGVYELGFFSLNNSQNQYLGIWFKSIIPQVVVWVANREKPVTDSAANLGISSNGSLLLSNGKHGVVWSTGDIFASNGSRAELTDHGNLVFIDKVSGRTLWQSFEHLGNTLLPTSIMMYNLVAGEKRGLTAWKSYTDPSPGEFVALITPQVPSQGIIMRGSTRYYRTGPWAKTRFTGSPQMDESYTSPFILTQDVNGSGYFSFVERGKPSRMILTSEGTMKVLVHNGMDWESTYEGPANSCDIYGVCGPFGLCVVSIPPKCKCFKGFVPKFAKEWKKGNWTSGCVRRTELHCQGNSSGKDANVFYTVPNIKPPDFYEYANSQNAEECHQNCLHNCSCLAFSYIPGIGCLMWSKDLMDTRQFSAAGELLSIRLARSELDVNKRKMTIVASTVSLTLFVIFGFAAFGFWRCRVEHNAHISNDAWRNFLQSQDVPGLEFFEMNAIQTATNNFSLSNKLGPGGFGSVYKARNGKLQDGREIAVKRLSSSSGQGKQEFMNEIVLISKLQHRNLVRVLGCCVEGTEKLLIYGFLKNKSLDTFVFDARKKLELDWPKRFEIIEGIARGLLYLHRDSRLRVIHRDLKVSNILLDEKMNPKISDFGLARMFQGTQYQEKTRRVVGTLGYMSPEYAWTGVFSEKSDIYSFGVLLLEIISGKKISSFSYGEEGKALLAYIGLLCVQHEPADRPNTLELLSMLTTTSDLPLPKKPTFVVHTRKDESPSNDSMITVNEMTESVIQGR

SEQ ID NO: 85883 - protein, 756 aa, Arabidopsis thaliana
  peptide (1)..(756): Ceres Seq. ID no. 12684303
  misc_feature (51)..(161): Pfam Name: D-mannose binding lectin Pfam Description: D-mannose binding lectin
  misc_feature (1)..(690): Homolog of NCBI NO: 18407211 NR Description: receptor kinase, putative; protein id:
  misc_feature (682)..(756): Homolog of NCBI NO: 18407211 NR Description: receptor kinase, putative; protein id:
  misc_feature (1)..(439): Homolog of NCBI NO: 25287700 NR Description: hypothetical protein T25B24.15 [imported] - thaliana >gi|4585885|gb|AAD25558.1|AC005850_15 Putative
  misc_feature (426)..(690): Homolog of NCBI NO: 25287700 NR Description: hypothetical protein T25B24.15 [imported] - thaliana >gi|4585885|gb|AAD25558.1|AC005850_15 Putative
  misc_feature (682)..(756): Homolog of NCBI NO: 25287700 NR Description: hypothetical protein T25B24.15 [imported] - thaliana >gi|4585885|gb|AAD25558.1|AC005850_15 Putative
  misc_feature (1)..(690): Homolog of NCBI NO: 30682152 NR Description: S-locus protein kinase, putative [Arabidopsis
  misc_feature (676)..(756): Homolog of NCBI NO: 30682152 NR Description: S-locus protein kinase, putative [Arabidopsis
  misc_feature (1)..(690): Homolog of NCBI NO: 30682149 NR Description: S-locus protein kinase, putative [Arabidopsis
  misc_feature (676)..(756): Homolog of NCBI NO: 30682149 NR Description: S-locus protein kinase, putative [Arabidopsis
  misc_feature (220)..(756): Homolog of NCBI NO: 30696575 NR Description: S-locus protein kinase, putative [Arabidopsis
MSFSFAGITKESPFSIGQTLSSSNGVYELGFFSLNNSQNQYLGIWFKSIIPQVVVWVANREKPVTDSAANLGISSNGSLLLSNGKHGVVWSTGDIFASNGSRAELTDHGNLVFIDKVSGRTLWQSFEHLGNTLLPTSIMMYNLVAGEKRGLTAWKSYTDPSPGEFVALITPQVPSQGIIMRGSTRYYRTGPWAKTRFTGSPQMDESYTSPFILTQDVNGSGYFSFVERGKPSRMILTSEGTMKVLVHNGMDWESTYEGPANSCDIYGVCGPFGLCVVSIPPKCKCFKGFVPKFAKEWKKGNWTSGCVRRTELHCQGNSSGKDANVFYTVPNIKPPDFYEYANSQNAEECHQNCLHNCSCLAFSYIPGIGCLMWSKDLMDTRQFSAAGELLSIRLARSELDVNKRKMTIVASTVSLTLFVIFGFAAFGFWRCRVEHNAHISNDAWRNFLQSQDVPGLEFFEMNAIQTATNNFSLSNKLGPGGFGSVYKARNGKLQDGREIAVKRLSSSSGQGKQEFMNEIVLISKLQHRNLVRVLGCCVEGTEKLLIYGFLKNKSLDTFVFDARKKLELDWPKRFEIIEGIARGLLYLHRDSRLRVIHRDLKVSNILLDEKMNPKISDFGLARMFQGTQYQEKTRRVVGTLGYMSPEYAWTGVFSEKSDIYSFGVLLLEIISGKKISSFSYGEEGKALLAYIGLLCVQHEPADRPNTLELLSMLTTTSDLPLPKKPTFVVHTRKDESPSNDSMITVNEMTESVIQGR

SEQ ID NO: 85884 - protein, 618 aa, Arabidopsis thaliana
  peptide (1)..(618): Ceres Seq. ID no. 12684304
  misc_feature (1)..(552): Homolog of NCBI NO: 18407211 NR Description: receptor kinase, putative; protein id:
  misc_feature (544)..(618): Homolog of NCBI NO: 18407211 NR Description: receptor kinase, putative; protein id:
  misc_feature (1)..(301): Homolog of NCBI NO: 25287700 NR Description: hypothetical protein T25B24.15 [imported] - thaliana >gi|4585885|gb|AAD25558.1|AC005850_15 Putative
  misc_feature (288)..(552): Homolog of NCBI NO: 25287700 NR Description: hypothetical protein T25B24.15 [imported] - thaliana >gi|4585885|gb|AAD25558.1|AC005850_15 Putative
  misc_feature (544)..(618): Homolog of NCBI NO: 25287700 NR Description: hypothetical protein T25B24.15 [imported] - thaliana >gi|4585885|gb|AAD25558.1|AC005850_15 Putative
  misc_feature (1)..(552): Homolog of NCBI NO: 30682152 NR Description: S-locus protein kinase, putative [Arabidopsis
  misc_feature (538)..(618): Homolog of NCBI NO: 30682152 NR Description: S-locus protein kinase, putative [Arabidopsis
  misc_feature (1)..(552): Homolog of NCBI NO: 30682149 NR Description: S-locus protein kinase, putative [Arabidopsis
  misc_feature (538)..(618): Homolog of NCBI NO: 30682149 NR Description: S-locus protein kinase, putative [Arabidopsis
  misc_feature (82)..(618): Homolog of NCBI NO: 30696575 NR Description: S-locus protein kinase, putative [Arabidopsis
MMYNLVAGEKRGLTAWKSYTDPSPGEFVALITPQVPSQGIIMRGSTRYYRTGPWAKTRFTGSPQMDESYTSPFILTQDVNGSGYFSFVERGKPSRMILTSEGTMKVLVHNGMDWESTYEGPANSCDIYGVCGPFGLCVVSIPPKCKCFKGFVPKFAKEWKKGNWTSGCVRRTELHCQGNSSGKDANVFYTVPNIKPPDFYEYANSQNAEECHQNCLHNCSCLAFSYIPGIGCLMWSKDLMDTRQFSAAGELLSIRLARSELDVNKRKMTIVASTVSLTLFVIFGFAAFGFWRCRVEHNAHISNDAWRNFLQSQDVPGLEFFEMNAIQTATNNFSLSNKLGPGGFGSVYKARNGKLQDGREIAVKRLSSSSGQGKQEFMNEIVLISKLQHRNLVRVLGCCVEGTEKLLIYGFLKNKSLDTFVFDARKKLELDWPKRFEIIEGIARGLLYLHRDSRLRVIHRDLKVSNILLDEKMNPKISDFGLARMFQGTQYQEKTRRVVGTLGYMSPEYAWTGVFSEKSDIYSFGVLLLEIISGKKISSFSYGEEGKALLAYIGLLCVQHEPADRPNTLELLSMLTTTSDLPLPKKPTFVVHTRKDESPSNDSMITVNEMTESVIQGR

SEQ ID NO: 85885 - DNA, 2262 bp, Arabidopsis thaliana
  misc_feature (1)..(2262): Ceres Seq. ID no. 12684309
  misc_feature: MA Experiment ID: 20000171 Result: Down-regulated in Transcription
  misc_feature: MA Experiment 20000171 PARAMETER Experiment Name: At_42deg_Heat_P Parameter: Age (day) Value: 14
  misc_feature: MA Experiment 20000171 PARAMETER Experiment Name: At_42deg_Heat_P Parameter: Organism Value: A. thaliana
  misc_feature: MA Experiment 20000171 PARAMETER Experiment Name: At_42deg_Heat_P Parameter: Plant Line Value: WS
  misc_feature: MA Experiment 20000171 PARAMETER Experiment Name: At_42deg_Heat_P Parameter: Temperature (deg C) Value: 42 vs. 22
  misc_feature: MA Experiment 20000171 PARAMETER Experiment Name: At_42deg_Heat_P Parameter: Timepoint (hr) Value: 1
  misc_feature: MA Experiment 20000171 PARAMETER Experiment Name: At_42deg_Heat_P Parameter: Tissue Value: Aerial
  misc_feature: MA Experiment ID: 20000227 Result: Down-regulated in Transcription
  misc_feature: MA Experiment 20000227 PARAMETER Experiment Name: At_Root-Tips-vs-Tops_P Parameter: Tissue Value: Root Tips vs. Root Tops
  misc_feature: MA Experiment ID: 20000438 Result: Down-regulated in Transcription
  misc_feature: MA Experiment 20000438 PARAMETER Experiment Name: At_Shoots__P Parameter: Age (day) Value: 14
  misc_feature: MA Experiment 20000438 PARAMETER Experiment Name: At_Shoots__P Parameter: Tissue Value: Shoots vs. Whole Plant
  misc_feature: MA Experiment ID: 20000439 Result: Down-regulated in Transcription
  misc_feature: MA Experiment 20000439 PARAMETER Experiment Name: At_Roots__P Parameter: Age (day) Value: 14 vs. 21
  misc_feature: MA Experiment 20000439 PARAMETER Experiment Name: At_Roots__P Parameter: Organism Value: A. thaliana
  misc_feature: MA Experiment 20000439 PARAMETER Experiment Name: At_Roots__P Parameter: Tissue Value: Roots vs. Whole Plant
  misc_feature: MA Experiment ID: 20000496 Result: Down-regulated in Transcription
  misc_feature: MA Experiment 20000496 PARAMETER Experiment Name: At_Guard_Cells_P Parameter: Harvest Date Value: 7/19/2002
  misc_feature: MA Experiment 20000496 PARAMETER Experiment Name: At_Guard_Cells_P Parameter: Organism Value: Canola
  misc_feature: MA Experiment 20000496 PARAMETER Experiment Name: At_Guard_Cells_P Parameter: Tissue Value: Guard Cells vs. Leaves
atgaggatcacgttctttgcttctttgctcttatttaccaataccatctttataagttttagctttgcaattgcagggataaacaaagagagtcctttgtcaataggacaaactctcagctcctctaatggagtttatgaattgggtttcttcagttttaataactcggaaaatcattatcttggaatctggttcaagggaatcattccccgggtggttgtgtgggtggccaatagagaaaatcctgttacagattccacagcaaatctcgctatcagcagcaacgcaagtcttctgttatataatggaaaacatggcgttgcatggtccagtggtgaaactcttgcttctaacgggtctcgtgcagagctttcagacaccggaaatcttattgtcatagacaatttttcgggaagaactctttggcaaagctttgaccatcttggtgatactatgcttcctttctcagctctgatgtataacctcgccactggcgagaagcaggtcttgacttcttggaaaagttacactaatccagcggttggtgactttgtgcttcagattacaacgcaagtgccaacacaagctttaactatgagaggctcgaagccttattggagaagcggtccatgggctaaaacaagaaacttcaaacttccacgtatagtgataacatcgaagggttcactggagatttctaggcatagtgggactgattgggtattgaactttgtggctccagcgcactcatgtgattattacggtgtatgtggaccttttgggatttgtgtcaagtcagtgtgtaaatgcttcaaagggtttataccaaaatatattgaggagtggaaaagaggaaattggactgatggttgtgtgaggcgtaccaaactacattgtcaggaaaactcaactaaaaaagatgcaaacttcttccatccagttgccaacataaagcctccagacttttacgaatttgcaagtgctgtggatgcagaaggatgctacaaaatttgcctccacaactgttcttgcttggccttttcttatattcatggaattgggtgcttaatatggaaccaagacttcatggacacagtgcaattttctgcaggaggagagattctttccattcgtcttgcacgttctgaattaggtgggaataagcgcaagaagaccattactgctagtattgtcagcctttctctttttctgatattgggttctactgcgtttggtttctggagatacagagttaaacataatgcttcacaagatgcaccgaaatatgatttggaaccacaagatgtctcaggttcatatttgtttgagatgaacaccattcaaactgccaccaataatttcagtctctcaaataaactgggacaaggtggatttggttcagtttacaagggaaagctgcaagatgggaaagaaattgctgtaaaacggctttctagcagctcagggcagggcaaagaggagttcatgaatgaaatagtactcatctcaaaactacaacacaaaaacttagttcggattttaggatgttgcattgaaggagaagagaggctgttgatttatgagtttatgttgaacaaaagccttgatacttttctcttcgattcaagaaaaaggcttgagattgactggccaaagagatttgatatcattcaaggtattgcgcgtggaattcactatctccatcgtgactcatgcctcaaggtaattcaccgtgatctgaaggtcagcaatattcttcttgacgagaagatgaatccaaagatatcagattttggattggctcggatgtatcagggaaccgaatatcaggacaatactcgcagggtcgtaggaactctaggatatatgtctccagaggatatattagaaatcataagcggagagaagatctcaagattcagctatggcaaagaagaaaaaacccttattgcatatatcaaacaacaggcatgggaatcttggtgtgaaactggaggagttgatcttttggataaagatgttgctgattcatgtcgcccattagaagttgagagatgtattcagattggtcttctctgtgttcaacaccaacctgcagacagaccaaacacacttgagttgatgtctatgctcacgacaacatcagatcttccatcaccaaaacaacccacatttgtagtgcactggagagatgacgaatcatcgtctaaggatttgatcactgtgaatgagatgacaaagtctgtgatcttagggcgttga

SEQ ID NO: 85886 - protein, 753 aa, Arabidopsis thaliana
  peptide (1)..(753): Ceres Seq. ID no. 12684310
  misc_feature (454)..(626): Pfam Name: Protein kinase domain Pfam Description: Protein kinase domain
  misc_feature (215)..(753): Homolog of NCBI NO: 15219935 NR Description: receptor kinase, putative; protein id: [Arabidopsis thaliana] >gi|3056580|gb|AAC13891.1|AAC13891 T1F9.1
  misc_feature (2)..(220): Homolog of NCBI NO: 15219935 NR Description: receptor kinase, putative; protein id: [Arabidopsis thaliana] >gi|3056580|gb|AAC13891.1|AAC13891 T1F9.1
  misc_feature (215)..(753): Homolog of NCBI NO: 15220528 NR Description: receptor kinase, putative; protein id: [Arabidopsis thaliana] >gi|25287701|pir||G96640 hypothetical
  misc_feature (3)..(220): Homolog of NCBI NO: 15220528 NR Description: receptor kinase, putative; protein id: [Arabidopsis thaliana] >gi|25287701|pir||G96640 hypothetical
  misc_feature (215)..(643): Homolog of NCBI NO: 3056590 NR Description: T1F9.11 [Arabidopsis thaliana]
  misc_feature (9)..(222): Homolog of NCBI NO: 3056590 NR Description: T1F9.11 [Arabidopsis thaliana]
  misc_feature (628)..(753): Homolog of NCBI NO: 3056590 NR Description: T1F9.11 [Arabidopsis thaliana]
  misc_feature (393)..(753): Homolog of NCBI NO: 25287700 NR Description: hypothetical protein T25B24.15 [imported] - thaliana >gi|4585885|gb|AAD25558.1|AC005850_15 Putative
  misc_feature (3)..(220): Homolog of NCBI NO: 25287700 NR Description: hypothetical protein T25B24.15 [imported] - thaliana >gi|4585885|gb|AAD25558.1|AC005850_15 Putative
  misc_feature (215)..(420): Homolog of NCBI NO: 25287700 NR Description: hypothetical protein T25B24.15 [imported] - thaliana >gi|4585885|gb|AAD25558.1|AC005850_15 Putative
MRITFFASLLLFTNTIFISFSFAIAGINKESPLSIGQTLSSSNGVYELGFFSFNNSENHYLGIWFKGIIPRVVVWVANRENPVTDSTANLAISSNASLLLYNGKHGVAWSSGETLASNGSRAELSDTGNLIVIDNFSGRTLWQSFDHLGDTMLPFSALMYNLATGEKQVLTSWKSYTNPAVGDFVLQITTQVPTQALTMRGSKPYWRSGPWAKTRNFKLPRIVITSKGSLEISRHSGTDWVLNFVAPAHSCDYYGVCGPFGICVKSVCKCFKGFIPKYIEEWKRGNWTDGCVRRTKLHCQENSTKKDANFFHPVANIKPPDFYEFASAVDAEGCYKICLHNCSCLAFSYIHGIGCLIWNQDFMDTVQFSAGGEILSIRLARSELGGNKRKKTITASIVSLSLFLILGSTAFGFWRYRVKHNASQDAPKYDLEPQDVSGSYLFEMNTIQTATNNFSLSNKLGQGGFGSVYKGKLQDGKEIAVKRLSSSSGQGKEEFMNEIVLISKLQHKNLVRILGCCIEGEERLLIYEFMLNKSLDTFLFDSRKRLEIDWPKRFDIIQGIARGIHYLHRDSCLKVIHRDLKVSNILLDEKMNPKISDFGLARMYQGTEYQDNTRRVVGTLGYMSPEDILEIISGEKISRFSYGKEEKTLIAYIKQQAWESWCETGGVDLLDKDVADSCRPLEVERCIQIGLLCVQHQPADRPNTLELMSMLTTTSDLPSPKQPTFVVHWRDDESSSKDLITVNEMTKSVILGR

SEQ ID NO: 85887 - protein, 602 aa, Arabidopsis thaliana
  peptide (1)..(602): Ceres Seq. ID no. 12684311
  misc_feature (303)..(475): Pfam Name: Protein kinase domain Pfam Description: Protein kinase domain
  misc_feature (64)..(602): Homolog of NCBI NO: 15219935 NR Description: receptor kinase, putative; protein id: [Arabidopsis thaliana] >gi|3056580|gb|AAC13891.1|AAC13891 T1F9.1
  misc_feature (1)..(69): Homolog of NCBI NO: 15219935 NR Description: receptor kinase, putative; protein id: [Arabidopsis thaliana] >gi|3056580|gb|AAC13891.1|AAC13891 T1F9.1
  misc_feature (64)..(602): Homolog of NCBI NO: 15220528 NR Description: receptor kinase, putative; protein id: [Arabidopsis thaliana] >gi|25287701|pir||G96640 hypothetical
  misc_feature (1)..(69): Homolog of NCBI NO: 15220528 NR Description: receptor kinase, putative; protein id: [Arabidopsis thaliana] >gi|25287701|pir||G96640 hypothetical
  misc_feature (64)..(492): Homolog of NCBI NO: 3056590 NR Description: T1F9.11 [Arabidopsis thaliana]
  misc_feature (1)..(71): Homolog of NCBI NO: 3056590 NR Description: T1F9.11 [Arabidopsis thaliana]
  misc_feature (477)..(602): Homolog of NCBI NO: 3056590 NR Description: T1F9.11 [Arabidopsis thaliana]
  misc_feature (242)..(602): Homolog of NCBI NO: 25287700 NR Description: hypothetical protein T25B24.15 [imported] - thaliana >gi|4585885|gb|AAD25558.1|AC005850_15 Putative
  misc_feature (1)..(69): Homolog of NCBI NO: 25287700 NR Description: hypothetical protein T25B24.15 [imported] - thaliana >gi|4585885|gb|AAD25558.1|AC005850_15 Putative
  misc_feature (64)..(269): Homolog of NCBI NO: 25287700 NR Description: hypothetical protein T25B24.15 [imported] - thaliana >gi|4585885|gb|AAD25558.1|AC005850_15 Putative
MLPFSALMYNLATGEKQVLTSWKSYTNPAVGDFVLQITTQVPTQALTMRGSKPYWRSGPWAKTRNFKLPRIVITSKGSLEISRHSGTDWVLNFVAPAHSCDYYGVCGPFGICVKSVCKCFKGFIPKYIEEWKRGNWTDGCVRRTKLHCQENSTKKDANFFHPVANIKPPDFYEFASAVDAEGCYKICLHNCSCLAFSYIHGIGCLIWNQDFMDTVQFSAGGEILSIRLARSELGGNKRKKTITASIVSLSLFLILGSTAFGFWRYRVKHNASQDAPKYDLEPQDVSGSYLFEMNTIQTATNNFSLSNKLGQGGFGSVYKGKLQDGKEIAVKRLSSSSGQGKEEFMNEIVLISKLQHKNLVRILGCCIEGEERLLIYEFMLNKSLDTFLFDSRKRLEIDWPKRFDIIQGIARGIHYLHRDSCLKVIHRDLKVSNILLDEKMNPKISDFGLARMYQGTEYQDNTRRVVGTLGYMSPEDILEIISGEKISRFSYGKEEKTLIAYIKQQAWESWCETGGVDLLDKDVADSCRPLEVERCIQIGLLCVQHQPADRPNTLELMSMLTTTSDLPSPKQPTFVVHWRDDESSSKDLITVNEMTKSVILGR

SEQ ID NO: 85888 - protein, 595 aa, Arabidopsis thaliana
  peptide (1)..(595): Ceres Seq. ID no. 12684312
  misc_feature (296)..(468): Pfam Name: Protein kinase domain Pfam Description: Protein kinase domain
  misc_feature (57)..(595): Homolog of NCBI NO: 15219935 NR Description: receptor kinase, putative; protein id: [Arabidopsis thaliana] >gi|3056580|gb|AAC13891.1|AAC13891 T1F9.1
  misc_feature (1)..(62): Homolog of NCBI NO: 15219935 NR Description: receptor kinase, putative; protein id: [Arabidopsis thaliana] >gi|3056580|gb|AAC13891.1|AAC13891 T1F9.1
  misc_feature (57)..(595): Homolog of NCBI NO: 15220528 NR Description: receptor kinase, putative; protein id: [Arabidopsis thaliana] >gi|25287701|pir||G96640 hypothetical
  misc_feature (1)..(62): Homolog of NCBI NO: 15220528 NR Description: receptor kinase, putative; protein id: [Arabidopsis thaliana] >gi|25287701|pir||G96640 hypothetical
  misc_feature (57)..(485): Homolog of NCBI NO: 3056590 NR Description: T1F9.11 [Arabidopsis thaliana]
  misc_feature (1)..(64): Homolog of NCBI NO: 3056590 NR Description: T1F9.11 [Arabidopsis thaliana]
  misc_feature (470)..(595): Homolog of NCBI NO: 3056590 NR Description: T1F9.11 [Arabidopsis thaliana]
  misc_feature (235)..(595): Homolog of NCBI NO: 25287700 NR Description: hypothetical protein T25B24.15 [imported] - thaliana >gi|4585885|gb|AAD25558.1|AC005850_15 Putative
  misc_feature (1)..(62): Homolog of NCBI NO: 25287700 NR Description: hypothetical protein T25B24.15 [imported] - thaliana >gi|4585885|gb|AAD25558.1|AC005850_15 Putative
  misc_feature (57)..(262): Homolog of NCBI NO: 25287700 NR Description: hypothetical protein T25B24.15 [imported] - thaliana >gi|4585885|gb|AAD25558.1|AC005850_15 Putative
MYNLATGEKQVLTSWKSYTNPAVGDFVLQITTQVPTQALTMRGSKPYWRSGPWAKTRNFKLPRIVITSKGSLEISRHSGTDWVLNFVAPAHSCDYYGVCGPFGICVKSVCKCFKGFIPKYIEEWKRGNWTDGCVRRTKLHCQENSTKKDANFFHPVANIKPPDFYEFASAVDAEGCYKICLHNCSCLAFSYIHGIGCLIWNQDFMDTVQFSAGGEILSIRLARSELGGNKRKKTITASIVSLSLFLILGSTAFGFWRYRVKHNASQDAPKYDLEPQDVSGSYLFEMNTIQTATNNFSLSNKLGQGGFGSVYKGKLQDGKEIAVKRLSSSSGQGKEEFMNEIVLISKLQHKNLVRILGCCIEGEERLLIYEFMLNKSLDTFLFDSRKRLEIDWPKRFDIIQGIARGIHYLHRDSCLKVIHRDLKVSNILLDEKMNPKISDFGLARMYQGTEYQDNTRRVVGTLGYMSPEDILEIISGEKISRFSYGKEEKTLIAYIKQQAWESWCETGGVDLLDKDVADSCRPLEVERCIQIGLLCVQHQPADRPNTLELMSMLTTTSDLPSPKQPTFVVHWRDDESSSKDLITVNEMTKSVILGR

SEQ ID NO: 85889 - DNA, 2454 bp, Arabidopsis thaliana
  misc_feature (1)..(2454): Ceres Seq. ID no. 12684317
  misc_feature: MA Experiment ID: 20000314 Result: Up-regulated in Transcription
  misc_feature: MA Experiment 20000314 PARAMETER Experiment Name: At_14day_Shoots-Roots_Sub_P Parameter: Age (day) Value: 14
  misc_feature: MA Experiment 20000314 PARAMETER Experiment Name: At_14day_Shoots-Roots_Sub_P Parameter: Organism Value: A. thaliana
  misc_feature: MA Experiment 20000314 PARAMETER Experiment Name: At_14day_Shoots-Roots_Sub_P Parameter: Plant Line Value: WS
  misc_feature: MA Experiment 20000314 PARAMETER Experiment Name: At_14day_Shoots-Roots_Sub_P Parameter: Tissue Value: Roots vs. Whole Plant
atggggaagaagaggatcatgttctttgcttccttgctcttaattaccatctttttaagtttcagctatgcagggataacgagagaaagtcctctgtcaataggaaaaactctcagctcctctaatggagtttatgaattgggattcttcagttttaataactcccaaaatcagtatgttggaatctggttcaagggtatcattccccgggtggttgtgtgggtggccaatagagaaaagcctgttacagactctgcagcaaatttaactatcagcagcaatggaagtcttctgttgtttaatgaaaatcatagcgttgtgtggtccattggagaaacttttgcatctaacgggtctcgtgcggagcttacagacaacggaaatttagttgtcatagacaataattcgggaagaactctatgggaaagctttgagcattttggtgacactatgctacctttctcaaacctgatgtataatcttgccacaggtgagaagcgggtgttgacttcttggaaaagtcacactgatccatcgcctggcgattttacggttcagattacaccgcaagttccatcccaggcgtgtactatgagaggctcaaagacttattggagaagcggtccatgggctaaaacaaggttcaccgggatacctgtaatggatgacacatatacaagtccattcagccttcagcaagatacaaacgggtcaggatccttcacttattttgaaagaaacttcaaactttcatatataatgataacatcagaaggctcactgaagatttttcagcataatggaatggactgggaattaaacttcgaggctccagaaaattcatgcgatatttacggcttttgtggaccttttggaatttgtgttatgtcagtacctccaaagtgtaaatgcttcaaagggtttgtaccaaaatccattgaggagtggaaaagaggaaactggactgatggttgtgtgaggcatactgaactacattgccaaggaaacactaatggtaaaactgtaaacggcttctatcacgttgccaacataaagcctccagacttttacgaatttgcaagttttgtggatgctgaaggatgctaccaaatttgcctccacaattgttcttgcttggcctttgcttatatcaatggaataggttgcttaatgtggaaccaagacctaatggacgcagtgcaattttctgcagggggagaaattctttccattcgccttgcaagttctgaactaggtggaaataagcgcaacaaaatcattgttgctagtattctaatgcatggtaacacactgactattattgaaagtctagtttcagcgaagatatcaaagattgcttcaaaagaggcatggaataatgatctagagccacaagatgtctcaggtttaaagttctttgagatgaataccattcaaactgccactgataatttcagtctctcaaataaactaggacaaggtggatttggctcagtttacaagggaaagctgcaagatgggaaagaaattgctgtaaaacggctttctagcagctccggacagggaaaagaggagttcatgaatgaaatagtactcatctcgaaactacaacataaaaacttggttaggattctgggatgttgcattgaaggagaagagaggctgttggtatatgagtttttgctgaacaaaagccttgatacttttctcttcgttctgatcgtttctatacggtattattgcttagattcaagaaaaaggcttgagattgactggcctaagagatttaatatcattgaaggcattgcgcgtgggcttcactatctccaccgtgactcatgcctcagggtcattcaccgtgatcttaaggttagcaatattcttctggatgagaagatgaacccaaaaatatcagactttggattggctcggatgtatcagggaaccgaatatcaggacaacactcgtagggttgcaggaactctaggatatatggctcccgagtatgcatggactgggatgttctctgagaaatcagatatctacagttttggagttatactgttggaaatcatcaccggggagaagatctcaagattcagctatggtagacaaggaaaaacccttcttgcatatgtaaacctgaaacctaaacaacaggcatgggaatcttggtgtgaaagtggaggaatcgatcttttggataaagatgttgctgattcatgtcacccattagaagttgagagatgtgtgcagattggtttgctatgtgttcaacaccaacctgctgatagaccaaacacaatggagttgttgtctatgctcaccacaacatcagatcttacatcaccaaaacagcccacatttgtagtgcacacgagagatgaagaatctctgtctcagggtttgatcaccgtcaatgagatgacccaatctgtgatccttgggcgttaa

SEQ ID NO: 85890 - protein, 817 aa, Arabidopsis thaliana
  peptide (1)..(817): Ceres Seq. ID no. 12684318
  misc_feature (69)..(179): Pfam Name: D-mannose binding lectin Pfam Description: D-mannose binding lectin
  misc_feature (1)..(817): Homolog of NCBI NO: 30682152 NR Description: S-locus protein kinase, putative [Arabidopsis
  misc_feature (1)..(817): Homolog of NCBI NO: 30682149 NR Description: S-locus protein kinase, putative [Arabidopsis
  misc_feature (246)..(685): Homolog of NCBI NO: 30696575 NR Description: S-locus protein kinase, putative [Arabidopsis
  misc_feature (688)..(817): Homolog of NCBI NO: 30696575 NR Description: S-locus protein kinase, putative [Arabidopsis
  misc_feature (151)..(232): Homolog of NCBI NO: 30696575 NR Description: S-locus protein kinase, putative [Arabidopsis
  misc_feature (231)..(712): Homolog of NCBI NO: 15219912 NR Description: receptor protein kinase (IRK1), putative; protein At1g61360.1 [Arabidopsis thaliana]
  misc_feature (58)..(817): Homolog of NCBI NO: 15220348 NR Description: receptor-like protein kinase, putative; protein
  misc_feature (6)..(413): Homolog of NCBI NO: 15220351 NR Description: receptor kinase, putative; protein id:
  misc_feature (470)..(817): Homolog of NCBI NO: 15220351 NR Description: receptor kinase, putative; protein id:
  misc_feature (32)..(453): Homolog of NCBI NO: 25956275 NR Description: unnamed protein product [Lotus japonicus]
MGKKRIMFFASLLLITIFLSFSYAGITRESPLSIGKTLSSSNGVYELGFFSFNNSQNQYVGIWFKGIIPRVVVWVANREKPVTDSAANLTISSNGSLLLFNENHSVVWSIGETFASNGSRAELTDNGNLVVIDNNSGRTLWESFEHFGDTMLPFSNLMYNLATGEKRVLTSWKSHTDPSPGDFTVQITPQVPSQACTMRGSKTYWRSGPWAKTRFTGIPVMDDTYTSPFSLQQDTNGSGSFTYFERNFKLSYIMITSEGSLKIFQHNGMDWELNFEAPENSCDIYGFCGPFGICVMSVPPKCKCFKGFVPKSIEEWKRGNWTDGCVRHTELHCQGNTNGKTVNGFYHVANIKPPDFYEFASFVDAEGCYQICLHNCSCLAFAYINGIGCLMWNQDLMDAVQFSAGGEILSIRLASSELGGNKRNKIIVASILMHGNTLTIIESLVSAKISKIASKEAWNNDLEPQDVSGLKFFEMNTIQTATDNFSLSNKLGQGGFGSVYKGKLQDGKEIAVKRLSSSSGQGKEEFMNEIVLISKLQHKNLVRILGCCIEGEERLLVYEFLLNKSLDTFLFVLIVSIRYYCLDSRKRLEIDWPKRFNIIEGIARGLHYLHRDSCLRVIHRDLKVSNILLDEKMNPKISDFGLARMYQGTEYQDNTRRVAGTLGYMAPEYAWTGMFSEKSDIYSFGVILLEIITGEKISRFSYGRQGKTLLAYVNLKPKQQAWESWCESGGIDLLDKDVADSCHPLEVERCVQIGLLCVQHQPADRPNTMELLSMLTTTSDLTSPKQPTFVVHTRDEESLSQGLITVNEMTQSVILGR

SEQ ID NO: 85891 - protein, 811 aa, Arabidopsis thaliana
  peptide (1)..(811): Ceres Seq. ID no. 12684319
  misc_feature (63)..(173): Pfam Name: D-mannose binding lectin Pfam Description: D-mannose binding lectin
  misc_feature (1)..(811): Homolog of NCBI NO: 30682152 NR Description: S-locus protein kinase, putative [Arabidopsis
  misc_feature (1)..(811): Homolog of NCBI NO: 30682149 NR Description: S-locus protein kinase, putative [Arabidopsis
  misc_feature (240)..(679): Homolog of NCBI NO: 30696575 NR Description: S-locus protein kinase, putative [Arabidopsis
  misc_feature (682)..(811): Homolog of NCBI NO: 30696575 NR Description: S-locus protein kinase, putative [Arabidopsis
  misc_feature (145)..(226): Homolog of NCBI NO: 30696575 NR Description: S-locus protein kinase, putative [Arabidopsis
  misc_feature (225)..(706): Homolog of NCBI NO: 15219912 NR Description: receptor protein kinase (IRK1), putative; protein At1g61360.1 [Arabidopsis thaliana]
  misc_feature (52)..(811): Homolog of NCBI NO: 15220348 NR Description: receptor-like protein kinase, putative; protein
  misc_feature (1)..(407): Homolog of NCBI NO: 15220351 NR Description: receptor kinase, putative; protein id:
  misc_feature (464)..(811): Homolog of NCBI NO: 15220351 NR Description: receptor kinase, putative; protein id:
  misc_feature (26)..(447): Homolog of NCBI NO: 25956275 NR Description: unnamed protein product [Lotus japonicus]
MFFASLLLITIFLSFSYAGITRESPLSIGKTLSSSNGVYELGFFSFNNSQNQYVGIWFKGIIPRVVVWVANREKPVTDSAANLTISSNGSLLLFNENHSVVWSIGETFASNGSRAELTDNGNLVVIDNNSGRTLWESFEHFGDTMLPFSNLMYNLATGEKRVLTSWKSHTDPSPGDFTVQITPQVPSQACTMRGSKTYWRSGPWAKTRFTGIPVMDDTYTSPFSLQQDTNGSGSFTYFERNFKLSYIMITSEGSLKIFQHNGMDWELNFEAPENSCDIYGFCGPFGICVMSVPPKCKCFKGFVPKSIEEWKRGNWTDGCVRHTELHCQGNTNGKTVNGFYHVANIKPPDFYEFASFVDAEGCYQICLHNCSCLAFAYINGIGCLMWNQDLMDAVQFSAGGEILSIRLASSELGGNKRNKIIVASILMHGNTLTIIESLVSAKISKIASKEAWNNDLEPQDVSGLKFFEMNTIQTATDNFSLSNKLGQGGFGSVYKGKLQDGKEIAVKRLSSSSGQGKEEFMNEIVLISKLQHKNLVRILGCCIEGEERLLVYEFLLNKSLDTFLFVLIVSIRYYCLDSRKRLEIDWPKRFNIIEGIARGLHYLHRDSCLRVIHRDLKVSNILLDEKMNPKISDFGLARMYQGTEYQDNTRRVAGTLGYMAPEYAWTGMFSEKSDIYSFGVILLEIITGEKISRFSYGRQGKTLLAYVNLKPKQQAWESWCESGGIDLLDKDVADSCHPLEVERCVQIGLLCVQHQPADRPNTMELLSMLTTTSDLTSPKQPTFVVHTRDEESLSQGLITVNEMTQSVILGR

SEQ ID NO: 85892 - protein, 667 aa, Arabidopsis thaliana
  peptide (1)..(667): Ceres Seq. ID no. 12684320
  misc_feature (1)..(667): Homolog of NCBI NO: 30682152 NR Description: S-locus protein kinase, putative [Arabidopsis
  misc_feature (1)..(667): Homolog of NCBI NO: 30682149 NR Description: S-locus protein kinase, putative [Arabidopsis
  misc_feature (96)..(535): Homolog of NCBI NO: 30696575 NR Description: S-locus protein kinase, putative [Arabidopsis
  misc_feature (538)..(667): Homolog of NCBI NO: 30696575 NR Description: S-locus protein kinase, putative [Arabidopsis
  misc_feature (1)..(82): Homolog of NCBI NO: 30696575 NR Description: S-locus protein kinase, putative [Arabidopsis
  misc_feature (81)..(562): Homolog of NCBI NO: 15219912 NR Description: receptor protein kinase (IRK1), putative; protein At1g61360.1 [Arabidopsis thaliana]
  misc_feature (1)..(667): Homolog of NCBI NO: 15220348 NR Description: receptor-like protein kinase, putative; protein
  misc_feature (1)..(263): Homolog of NCBI NO: 15220351 NR Description: receptor kinase, putative; protein id:
  misc_feature (320)..(667): Homolog of NCBI NO: 15220351 NR Description: receptor kinase, putative; protein id:
  misc_feature (1)..(303): Homolog of NCBI NO: 25956275 NR Description: unnamed protein product [Lotus japonicus]
MLPFSNLMYNLATGEKRVLTSWKSHTDPSPGDFTVQITPQVPSQACTMRGSKTYWRSGPWAKTRFTGIPVMDDTYTSPFSLQQDTNGSGSFTYFERNFKLSYIMITSEGSLKIFQHNGMDWELNFEAPENSCDIYGFCGPFGICVMSVPPKCKCFKGFVPKSIEEWKRGNWTDGCVRHTELHCQGNTNGKTVNGFYHVANIKPPDFYEFASFVDAEGCYQICLHNCSCLAFAYINGIGCLMWNQDLMDAVQFSAGGEILSIRLASSELGGNKRNKIIVASILMHGNTLTIIESLVSAKISKIASKEAWNNDLEPQDVSGLKFFEMNTIQTATDNFSLSNKLGQGGFGSVYKGKLQDGKEIAVKRLSSSSGQGKEEFMNEIVLISKLQHKNLVRILGCCIEGEERLLVYEFLLNKSLDTFLFVLIVSIRYYCLDSRKRLEIDWPKRFNIIEGIARGLHYLHRDSCLRVIHRDLKVSNILLDEKMNPKISDFGLARMYQGTEYQDNTRRVAGTLGYMAPEYAWTGMFSEKSDIYSFGVILLEIITGEKISRFSYGRQGKTLLAYVNLKPKQQAWESWCESGGIDLLDKDVADSCHPLEVERCVQIGLLCVQHQPADRPNTMELLSMLTTTSDLTSPKQPTFVVHTRDEESLSQGLITVNEMTQSVILGR

SEQ ID NO: 85893 - DNA, 2319 bp, Arabidopsis thaliana
  misc_feature (1)..(2319): Ceres Seq. ID no. 12684321
  misc_feature: MA Experiment ID: 20000328 Result: Down-regulated in Transcription
  misc_feature: MA Experiment 20000328 PARAMETER Experiment Name: At_42deg_Heat_Sub_P Parameter: Age (day) Value: 14
  misc_feature: MA Experiment 20000328 PARAMETER Experiment Name: At_42deg_Heat_Sub_P Parameter: Organism Value: A. thaliana
  misc_feature: MA Experiment 20000328 PARAMETER Experiment Name: At_42deg_Heat_Sub_P Parameter: Plant Line Value: WS
  misc_feature: MA Experiment 20000328 PARAMETER Experiment Name: At_42deg_Heat_Sub_P Parameter: Temperature (deg C) Value: 42 vs. 22
  misc_feature: MA Experiment 20000328 PARAMETER Experiment Name: At_42deg_Heat_Sub_P Parameter: Timepoint (hr) Value: 6
  misc_feature: MA Experiment 20000328 PARAMETER Experiment Name: At_42deg_Heat_Sub_P Parameter: Tissue Value: Aerial
  misc_feature: MA Experiment ID: 20000355 Result: Up-regulated in Transcription
  misc_feature: MA Experiment 20000355 PARAMETER Experiment Name: At_Siliques_Sub_P Parameter: Age (day) Value: 21
  misc_feature: MA Experiment 20000355 PARAMETER Experiment Name: At_Siliques_Sub_P Parameter: Organism Value: A. thaliana
  misc_feature: MA Experiment 20000355 PARAMETER Experiment Name: At_Siliques_Sub_P Parameter: Plant Line Value: WS
  misc_feature: MA Experiment 20000355 PARAMETER Experiment Name: At_Siliques_Sub_P Parameter: Tissue Value: Less Than 5mm Siliques vs. Whole Plant
  misc_feature: MA Experiment ID: 20000440 Result: Up-regulated in Transcription
  misc_feature: MA Experiment 20000440 PARAMETER Experiment Name: At_Closed-Flower__Sub_P Parameter: Tissue Value: Closed Flower vs. Whole Plant
atggggaagaagaggattgtgttctttgcttgtttgctcttgtttaccgtcctattacgttttagctatgcagggataacgacagaaagtcctttgtcagtcgaacaaacactcagctcctctaatggaatttatgaattggggtttttcagtcctaataactcccaaaatctgtatgtgggaatctggttcaagggtatcattccccgggtggttgtgtgggtggcaaatagagaaacacctactacagacacatcggcaaatcttgctatcagcagcaatggtagtcttctattgtttaatggcaaacatggtgttgtgtggtccatcggagaaaattttgcatctaatgggtctcgtgcagagcttacagacaacggaaatctagttgtcatagacaatgcttcgggaagaactttatgggaaagctttgagcactttggtgacactatgctacctttctcaagcctgatgtataatctcgccacaggtgagaagcgggtgttgacttcttggaaaactgacactgatccatcgcctggcgtatttgtgggtcagattacaccacaagtgccatcacaggtgcttattatgagaggctcgacgcgttattatagaaccggtccatgggctaaaacaaggttcacagggataccactaatggatgacacatatgcaagtccattcagccttcagcaggatgctaacgggtcaggattctttacttattttgatagaagtttcaaactttcacgtataattatatcatcagaaggatcaatgaaaaggtttcggcataatggaacggactgggaattaagctacatggctccagccaattcatgcgatatttacggtgtatgtggaccatttgggttgtgtattgtgtcagtacctttaaagtgcaaatgcttgaaaggatttgttcctcattccactgaggaatggaaaagaggaaactggactggtggttgtgcgaggcttacggaactacattgtcaaggaaactctactggcaaagatgtaaatatcttccatcctgttaccaacgtaaagcttccagacttttacgaatatgaaagttctgtggatgctgaagaatgccaccaaagttgcctccacaattgttcttgcttggcctttgcttatatccatggaatagggtgcttaatctggaaccagaacctaatggacgctgtgcaattttctgctggaggagaaattctgtccattcgtcttgcacactctgaactaggtggaaataagcgcaacaaaatcattgttgctagtactgtgagcctttctctgtttgtgatattgacttctgctgcatttggtttctggagatacagagtgaaacataaagcctatacgttaaaggatgcctggaggaatgatctgaaatcaaaggaggtcccaggtttagaattttttgagatgaataccatacaaactgccaccaataatttcagtctatcaaacaaactcggacaaggtggatttggttctgtttacaagggaaagttacaagatgggaaagaaattgctgtaaaacagctttctagcagctccggacagggaaaagaggagttcatgaatgaaatagtactgatatcaaaactccaacacagaaacttagtccgggttttgggatgttgcatcgaaggagaagagaaactactgatctatgagtttatgttgaacaaaagccttgatacttttgtctttgatgcaagaaaaaagctcgaggttgattggccaaagagatttgatatcgttcaaggtattgcacgtggacttctttatcttcaccgtgactcacgcctcaaggtaattcaccgagacctgaaggtcagcaacattcttctggatgagaaaatgaacccgaaaatatcagattttggattggctcggatgtatgagggaacccaatgtcaggacaaaactcgcagggttgtaggaactctaggatatatgtctcctgagtatgcatggaccggagtattctctgagaaatcagacatttacagcttcggagttctactgctagaaattatcatcggagagaagatctcaaggttcagctatggcgaagaaggaaaaacacttctcgcatatattggtctgctctgtgtacaacaccaacctgcagacagaccaaacacacttgagttgctggctatgctcacgacaacatcagatcttccatcaccaaaacaacccacatttgtagtgcactctagggatgatgaatcatctctgtctaaggatttgtttaccgtcaatgagatgacacaatctatgatccttgggcgttaa

SEQ ID NO: 85894 - protein, 772 aa, Arabidopsis thaliana
  peptide (1)..(772): Ceres Seq. ID no. 12684322
  misc_feature (69)..(179): Pfam Name: D-mannose binding lectin Pfam Description: D-mannose binding lectin
  misc_feature (1)..(706): Homolog of NCBI NO: 30682152 NR Description: S-locus protein kinase, putative [Arabidopsis
  misc_feature (707)..(772): Homolog of NCBI NO: 30682152 NR Description: S-locus protein kinase, putative [Arabidopsis
  misc_feature (1)..(706): Homolog of NCBI NO: 30682149 NR Description: S-locus protein kinase, putative [Arabidopsis
  misc_feature (707)..(772): Homolog of NCBI NO: 30682149 NR Description: S-locus protein kinase, putative [Arabidopsis
  misc_feature (246)..(772): Homolog of NCBI NO: 30696575 NR Description: S-locus protein kinase, putative [Arabidopsis
  misc_feature (151)..(219): Homolog of NCBI NO: 30696575 NR Description: S-locus protein kinase, putative [Arabidopsis
  misc_feature (33)..(453): Homolog of NCBI NO: 7434416 NR Description: serine/threonine kinase (EC 2.7.1.-) BRLK - wild >gi|2181190|emb|CAA73134.1| serine/threonine kinase [Brassica
  misc_feature (468)..(710): Homolog of NCBI NO: 7434416 NR Description: serine/threonine kinase (EC 2.7.1.-) BRLK - wild >gi|2181190|emb|CAA73134.1| serine/threonine kinase [Brassica
  misc_feature (4)..(453): Homolog of NCBI NO: 15234429 NR Description: serine/threonine kinase - like protein; protein
  misc_feature (468)..(706): Homolog of NCBI NO: 15234429 NR Description: serine/threonine kinase - like protein; protein
MGKKRIVFFACLLLFTVLLRFSYAGITTESPLSVEQTLSSSNGIYELGFFSPNNSQNLYVGIWFKGIIPRVVVWVANRETPTTDTSANLAISSNGSLLLFNGKHGVVWSIGENFASNGSRAELTDNGNLVVIDNASGRTLWESFEHFGDTMLPFSSLMYNLATGEKRVLTSWKTDTDPSPGVFVGQITPQVPSQVLIMRGSTRYYRTGPWAKTRFTGIPLMDDTYASPFSLQQDANGSGFFTYFDRSFKLSRIIISSEGSMKRFRHNGTDWELSYMAPANSCDIYGVCGPFGLCIVSVPLKCKCLKGFVPHSTEEWKRGNWTGGCARLTELHCQGNSTGKDVNIFHPVTNVKLPDFYEYESSVDAEECHQSCLHNCSCLAFAYIHGIGCLIWNQNLMDAVQFSAGGEILSIRLAHSELGGNKRNKIIVASTVSLSLFVILTSAAFGFWRYRVKHKAYTLKDAWRNDLKSKEVPGLEFFEMNTIQTATNNFSLSNKLGQGGFGSVYKGKLQDGKEIAVKQLSSSSGQGKEEFMNEIVLISKLQHRNLVRVLGCCIEGEEKLLIYEFMLNKSLDTFVFDARKKLEVDWPKRFDIVQGIARGLLYLHRDSRLKVIHRDLKVSNILLDEKMNPKISDFGLARMYEGTQCQDKTRRVVGTLGYMSPEYAWTGVFSEKSDIYSFGVLLLEIIIGEKISRFSYGEEGKTLLAYIGLLCVQHQPADRPNTLELLAMLTTTSDLPSPKQPTFVVHSRDDESSLSKDLFTVNEMTQSMILGR

SEQ ID NO: 85895 - protein, 622 aa, Arabidopsis thaliana
  peptide (1)..(622): Ceres Seq. ID no. 12684323
  misc_feature (1)..(556): Homolog of NCBI NO: 30682152 NR Description: S-locus protein kinase, putative [Arabidopsis
  misc_feature (557)..(622): Homolog of NCBI NO: 30682152 NR Description: S-locus protein kinase, putative [Arabidopsis
  misc_feature (1)..(556): Homolog of NCBI NO: 30682149 NR Description: S-locus protein kinase, putative [Arabidopsis
  misc_feature (557)..(622): Homolog of NCBI NO: 30682149 NR Description: S-locus protein kinase, putative [Arabidopsis
  misc_feature (96)..(622): Homolog of NCBI NO: 30696575 NR Description: S-locus protein kinase, putative [Arabidopsis
  misc_feature (1)..(69): Homolog of NCBI NO: 30696575 NR Description: S-locus protein kinase, putative [Arabidopsis
  misc_feature (1)..(303): Homolog of NCBI NO: 7434416 NR Description: serine/threonine kinase (EC 2.7.1.-) BRLK - wild >gi|2181190|emb|CAA73134.1| serine/threonine kinase [Brassica
  misc_feature (318)..(560): Homolog of NCBI NO: 7434416 NR Description: serine/threonine kinase (EC 2.7.1.-) BRLK - wild >gi|2181190|emb|CAA73134.1| serine/threonine kinase [Brassica
  misc_feature (1)..(303): Homolog of NCBI NO: 15234429 NR Description: serine/threonine kinase - like protein; protein
  misc_feature (318)..(556): Homolog of NCBI NO: 15234429 NR Description: serine/threonine kinase - like protein; protein
MLPFSSLMYNLATGEKRVLTSWKTDTDPSPGVFVGQITPQVPSQVLIMRGSTRYYRTGPWAKTRFTGIPLMDDTYASPFSLQQDANGSGFFTYFDRSFKLSRIIISSEGSMKRFRHNGTDWELSYMAPANSCDIYGVCGPFGLCIVSVPLKCKCLKGFVPHSTEEWKRGNWTGGCARLTELHCQGNSTGKDVNIFHPVTNVKLPDFYEYESSVDAEECHQSCLHNCSCLAFAYIHGIGCLIWNQNLMDAVQFSAGGEILSIRLAHSELGGNKRNKIIVASTVSLSLFVILTSAAFGFWRYRVKHKAYTLKDAWRNDLKSKEVPGLEFFEMNTIQTATNNFSLSNKLGQGGFGSVYKGKLQDGKEIAVKQLSSSSGQGKEEFMNEIVLISKLQHRNLVRVLGCCIEGEEKLLIYEFMLNKSLDTFVFDARKKLEVDWPKRFDIVQGIARGLLYLHRDSRLKVIHRDLKVSNILLDEKMNPKISDFGLARMYEGTQCQDKTRRVVGTLGYMSPEYAWTGVFSEKSDIYSFGVLLLEIIIGEKISRFSYGEEGKTLLAYIGLLCVQHQPADRPNTLELLAMLTTTSDLPSPKQPTFVVHSRDDESSLSKDLFTVNEMTQSMILGR

SEQ ID NO: 85896 - protein, 615 aa, Arabidopsis thaliana
  peptide (1)..(615): Ceres Seq. ID no. 12684324
  misc_feature (1)..(549): Homolog of NCBI NO: 30682152 NR Description: S-locus protein kinase, putative [Arabidopsis
  misc_feature (550)..(615): Homolog of NCBI NO: 30682152 NR Description: S-locus protein kinase, putative [Arabidopsis
  misc_feature (1)..(549): Homolog of NCBI NO: 30682149 NR Description: S-locus protein kinase, putative [Arabidopsis
  misc_feature (550)..(615): Homolog of NCBI NO: 30682149 NR Description: S-locus protein kinase, putative [Arabidopsis
  misc_feature (89)..(615): Homolog of NCBI NO: 30696575 NR Description: S-locus protein kinase, putative [Arabidopsis
  misc_feature (1)..(62): Homolog of NCBI NO: 30696575 NR Description: S-locus protein kinase, putative [Arabidopsis
  misc_feature (1)..(296): Homolog of NCBI NO: 7434416 NR Description: serine/threonine kinase (EC 2.7.1.-) BRLK - wild >gi|2181190|emb|CAA73134.1| serine/threonine kinase [Brassica
  misc_feature (311)..(553): Homolog of NCBI NO: 7434416 NR Description: serine/threonine kinase (EC 2.7.1.-) BRLK - wild >gi|2181190|emb|CAA73134.1| serine/threonine kinase [Brassica
  misc_feature (1)..(296): Homolog of NCBI NO: 15234429 NR Description: serine/threonine kinase - like protein; protein
  misc_feature (311)..(549): Homolog of NCBI NO: 15234429 NR Description: serine/threonine kinase - like protein; protein
MYNLATGEKRVLTSWKTDTDPSPGVFVGQITPQVPSQVLIMRGSTRYYRTGPWAKTRFTGIPLMDDTYASPFSLQQDANGSGFFTYFDRSFKLSRIIISSEGSMKRFRHNGTDWELSYMAPANSCDIYGVCGPFGLCIVSVPLKCKCLKGFVPHSTEEWKRGNWTGGCARLTELHCQGNSTGKDVNIFHPVTNVKLPDFYEYESSVDAEECHQSCLHNCSCLAFAYIHGIGCLIWNQNLMDAVQFSAGGEILSIRLAHSELGGNKRNKIIVASTVSLSLFVILTSAAFGFWRYRVKHKAYTLKDAWRNDLKSKEVPGLEFFEMNTIQTATNNFSLSNKLGQGGFGSVYKGKLQDGKEIAVKQLSSSSGQGKEEFMNEIVLISKLQHRNLVRVLGCCIEGEEKLLIYEFMLNKSLDTFVFDARKKLEVDWPKRFDIVQGIARGLLYLHRDSRLKVIHRDLKVSNILLDEKMNPKISDFGLARMYEGTQCQDKTRRVVGTLGYMSPEYAWTGVFSEKSDIYSFGVLLLEIIIGEKISRFSYGEEGKTLLAYIGLLCVQHQPADRPNTLELLAMLTTTSDLPSPKQPTFVVHSRDDESSLSKDLFTVNEMTQSMILGR

SEQ ID NO: 85897 - DNA, 1173 bp, Arabidopsis thaliana
  misc_feature (1)..(1173): Ceres Seq. ID no. 12684351
  misc_feature: MA Experiment ID: 20000307 Result: Down-regulated in Transcription
  misc_feature: MA Experiment 20000307 PARAMETER Experiment Name: At_Germinating_Seeds_Sub_P Parameter: Age (hr) Value: 24 vs. 0
  misc_feature: MA Experiment 20000307 PARAMETER Experiment Name: At_Germinating_Seeds_Sub_P Parameter: Organism Value: A. thaliana
  misc_feature: MA Experiment 20000307 PARAMETER Experiment Name: At_Germinating_Seeds_Sub_P Parameter: Plant Line Value: WS
  misc_feature: MA Experiment 20000307 PARAMETER Experiment Name: At_Germinating_Seeds_Sub_P Parameter: Tissue Value: Germinating Seeds
  misc_feature: MA Experiment ID: 20000329 Result: Up-regulated in Transcription
  misc_feature: MA Experiment 20000329 PARAMETER Experiment Name: At_4deg_Cold_Sub_P Parameter: Age (day) Value: 14
  misc_feature: MA Experiment 20000329 PARAMETER Experiment Name: At_4deg_Cold_Sub_P Parameter: Organism Value: A. thaliana
  misc_feature: MA Experiment 20000329 PARAMETER Experiment Name: At_4deg_Cold_Sub_P Parameter: Plant Line Value: WS
  misc_feature: MA Experiment 20000329 PARAMETER Experiment Name: At_4deg_Cold_Sub_P Parameter: Temperature (deg C) Value: 4 vs. 22
  misc_feature: MA Experiment 20000329 PARAMETER Experiment Name: At_4deg_Cold_Sub_P Parameter: Timepoint (hr) Value: 6
  misc_feature: MA Experiment 20000329 PARAMETER Experiment Name: At_4deg_Cold_Sub_P Parameter: Tissue Value: Aerial
atgtctcacagaaagtttgagcatccaagacatggttctttgggtttccttccaaggaaaagagctagccgacaccgtgggaaagtgaaggccttccctaaggatgatccaactaagccttgcagactcacctccttcttgggatacaaagctgggatgactcacattgtgagagatgttgaaaaacctggatcaaaactacacaagaaggaaacatgtgaagctgtgacgatcattgagacacctccaatggtggttgttggtgtggttggttatgtaaagacacctcgtggtctgcggtctctatgcactgtgtgggctcagcatctgagcgaagaattgagaaggaggttctacaagaactgggccaagtcaaagaagaaggctttcactagatattctaagaaacatgaaactgaagaagggaaaaaagatattcaaagtcaattggagaagatgaagaagtactgctctgtcatcagagttcttgctcacactcagataaggaaaatgaaagggctgaagcagaagaaggcacatctgaatgagattcagatcaatggtggagatatagcaaagaaagttgactatgcctgcagtttatttgaaaaacaagtcccagttgatgccatcttccagaaagatgaaatgattgatatcattggtgtcaccaaaggaaaaggttatgaaggtgtggttacaagatggggagtgacccgacttccaagaaagactcatcgtggtcttcgcaaggttgcttgtatcggtgcttggcatccagctagagtctcctacacggtggctagagctggacaaaacggttaccatcaccgtactgaaatgaacaagaaggtataccgggttgggaaagttggccaggagactcactcagccatgaccgagtatgacagaaccgagaaggatatcacaccaatgggaggatttccccactatgggatagtgaaggaagattatttgatgatcaagggatgttgcgtggggcctaagaaacgtgtggtgactttaagacagactttgcttaagcagacgtctaggcttgctatggaggagatcaagcttaagttcattgacgctgcttccaatgggggacacggtcgtttccagacttctcaagagaaggccaagttctatggtagaaccatcaaagcttag

SEQ ID NO: 85898 - protein, 390 aa, Arabidopsis thaliana; identical to SEQ ID NO: 23529
  peptide (1)..(390): Ceres Seq. ID no. 12684352
  misc_feature (50)..(343): Pfam Name: Ribosomal protein L3 Pfam Description: Ribosomal protein L3
  misc_feature (1)..(390): Homolog of NCBI NO: 15220533 NR Description: ribosomal protein; protein id: At1g61580.1 thaliana] >gi|21542436|sp|P22738|RL3B_ARATH 60S ribosomal protein
  misc_feature (1)..(390): Homolog of NCBI NO: 81658 NR Description: ribosomal protein L3.e (clone ARP2), cytosolic -
  misc_feature (1)..(389): Homolog of NCBI NO: 15218306 NR Description: ribosomal protein; protein id: At1g43170.1, by cDNA: 14534., supported by cDNA: gi_11935190, supported by gi_13487799, supported by cDNA: gi_13605656, supported by cDNA:
  misc_feature (1)..(389): Homolog of NCBI NO: 23397228 NR Description: putative ribosomal protein [Arabidopsis thaliana]
  misc_feature (1)..(389): Homolog of NCBI NO: 81657 NR Description: ribosomal protein L3.e (clone ARP1), cytosolic -
  misc_feature (1)..(390): Homolog of NCBI NO: 548770 NR Description: 60S RIBOSOMAL PROTEIN L3 >gi|481228|pir||S38359
  misc_feature (1)..(390): Homolog of NCBI NO: 33526877 NR Description: ribosomal protein L3 [Triticum aestivum]
  misc_feature (1)..(390): Homolog of NCBI NO: 33526886 NR Description: ribosomal protein L3 [Triticum aestivum]
  misc_feature (1)..(384): Homolog of NCBI NO: 6688812 NR Description: L3 Ribosomal protein [Medicago sativa subsp. x
  misc_feature (1)..(385): Homolog of NCBI NO: 4506649 NR Description: ribosomal protein L3; 60S ribosomal protein L3;

SEQ ID NO: 85899 - protein, 338 aa, Arabidopsis thaliana; identical to SEQ ID NO: 23530
  peptide (1)..(338): Ceres Seq. ID no. 12684353
  misc_feature (1)..(291): Pfam Name: Ribosomal protein L3 Pfam Description: Ribosomal protein L3
  misc_feature (1)..(338): Homolog of NCBI NO: 15220533 NR Description: ribosomal protein; protein id: At1g61580.1 thaliana] >gi|21542436|sp|P22738|RL3B_ARATH 60S ribosomal protein
  misc_feature (1)..(338): Homolog of NCBI NO: 81658 NR Description: ribosomal protein L3.e (clone ARP2), cytosolic -
  misc_feature (1)..(337): Homolog of NCBI NO: 15218306 NR Description: ribosomal protein; protein id: At1g43170.1, by cDNA: 14534., supported by cDNA: gi_11935190, supported by gi_13487799, supported by cDNA: gi_13605656, supported by cDNA:
  misc_feature (1)..(337): Homolog of NCBI NO: 23397228 NR Description: putative ribosomal protein [Arabidopsis thaliana]
  misc_feature (1)..(337): Homolog of NCBI NO: 81657 NR Description: ribosomal protein L3.e (clone ARP1), cytosolic -
  misc_feature (1)..(338): Homolog of NCBI NO: 548770 NR Description: 60S RIBOSOMAL PROTEIN L3 >gi|481228|pir||S38359
  misc_feature (1)..(338): Homolog of NCBI NO: 33526877 NR Description: ribosomal protein L3 [Triticum aestivum]
  misc_feature (1)..(338): Homolog of NCBI NO: 33526886 NR Description: ribosomal protein L3 [Triticum aestivum]
  misc_feature (1)..(332): Homolog of NCBI NO: 6688812 NR Description: L3 Ribosomal protein [Medicago sativa subsp. x
  misc_feature (1)..(333): Homolog of NCBI NO: 4506649 NR Description: ribosomal protein L3; 60S ribosomal protein L3;

SEQ ID NO: 85900 - protein, 307 aa, Arabidopsis thaliana
  peptide (1)..(307): Ceres Seq. ID no. 12684354
  misc_feature (1)..(260): Pfam Name: Ribosomal protein L3 Pfam Description: Ribosomal protein L3
  misc_feature (1)..(307): Homolog of NCBI NO: 15220533 NR Description: ribosomal protein; protein id: At1g61580.1 thaliana] >gi|21542436|sp|P22738|RL3B_ARATH 60S ribosomal protein
  misc_feature (1)..(307): Homolog of NCBI NO: 81658 NR Description: ribosomal protein L3.e (clone ARP2), cytosolic -
  misc_feature (1)..(306): Homolog of NCBI NO: 15218306 NR Description: ribosomal protein; protein id: At1g43170.1, by cDNA: 14534., supported by cDNA: gi_11935190, supported by gi_13487799, supported by cDNA: gi_13605656, supported by cDNA:
  misc_feature (1)..(306): Homolog of NCBI NO: 23397228 NR Description: putative ribosomal protein [Arabidopsis thaliana]
  misc_feature (1)..(306): Homolog of NCBI NO: 81657 NR Description: ribosomal protein L3.e (clone ARP1), cytosolic -
  misc_feature (1)..(307): Homolog of NCBI NO: 548770 NR Description: 60S RIBOSOMAL PROTEIN L3 >gi|481228|pir||S38359
  misc_feature (1)..(307): Homolog of NCBI NO: 33526877 NR Description: ribosomal protein L3 [Triticum aestivum]
  misc_feature (1)..(307): Homolog of NCBI NO: 33526886 NR Description: ribosomal protein L3 [Triticum aestivum]
  misc_feature (1)..(301): Homolog of NCBI NO: 6688812 NR Description: L3 Ribosomal protein [Medicago sativa subsp. x
  misc_feature (1)..(302): Homolog of NCBI NO: 4506649 NR Description: ribosomal protein L3; 60S ribosomal protein L3;
MVVVGVVGYVKTPRGLRSLCTVWAQHLSEELRRRFYKNWAKSKKKAFTRYSKKHETEEGKKDIQSQLEKMKKYCSVIRVLAHTQIRKMKGLKQKKAHLNEIQINGGDIAKKVDYACSLFEKQVPVDAIFQKDEMIDIIGVTKGKGYEGVVTRWGVTRLPRKTHRGLRKVACIGAWHPARVSYTVARAGQNGYHHRTEMNKKVYRVGKVGQETHSAMTEYDRTEKDITPMGGFPHYGIVKEDYLMIKGCCVGPKKRVVTLRQTLLKQTSRLAMEEIKLKFIDAASNGGHGRFQTSQEKAKFYGRTIKA

SEQ ID NO: 85901 - DNA, 1710 bp, Arabidopsis thaliana
  misc_feature (1)..(1710): Ceres Seq. ID no. 12684370
  misc_feature: MA Experiment ID: 20000185 Result: Down-regulated in Transcription
  misc_feature: MA Experiment 20000185 PARAMETER Experiment Name: At_Roots__P Parameter: Age (day) Value: 7 vs. 21
  misc_feature: MA Experiment 20000185 PARAMETER Experiment Name: At_Roots__P Parameter: Organism Value: A. thaliana
  misc_feature: MA Experiment 20000185 PARAMETER Experiment Name: At_Roots__P Parameter: Tissue Value: Roots vs. Whole Plant
  misc_feature: MA Experiment ID: 20000264 Result: Up-regulated in Transcription
  misc_feature: MA Experiment 20000264 PARAMETER Experiment Name: At_Open_Flower_P Parameter: Age (day) Value: 21
  misc_feature: MA Experiment 20000264 PARAMETER Experiment Name: At_Open_Flower_P Parameter: Plant Line Value: WS
  misc_feature: MA Experiment 20000264 PARAMETER Experiment Name: At_Open_Flower_P Parameter: Tissue Value: Open Flower vs. Whole Plant
  misc_feature: MA Experiment ID: 20000265 Result: Up-regulated in Transcription
  misc_feature: MA Experiment 20000265 PARAMETER Experiment Name: At_Open_Flower_P Parameter: Age (day) Value: 21
  misc_feature: MA Experiment 20000265 PARAMETER Experiment Name: At_Open_Flower_P Parameter: Plant Line Value: WS
  misc_feature: MA Experiment 20000265 PARAMETER Experiment Name: At_Open_Flower_P Parameter: Tissue Value: Closed Flower vs. Whole Plant
  misc_feature: MA Experiment ID: 20000438 Result: Down-regulated in Transcription
  misc_feature: MA Experiment 20000438 PARAMETER Experiment Name: At_Shoots__P Parameter: Age (day) Value: 14
  misc_feature: MA Experiment 20000438 PARAMETER Experiment Name: At_Shoots__P Parameter: Tissue Value: Shoots vs. Whole Plant
  misc_feature: MA Experiment ID: 20000439 Result: Down-regulated in Transcription
  misc_feature: MA Experiment 20000439 PARAMETER Experiment Name: At_Roots__P Parameter: Age (day) Value: 14 vs. 21
  misc_feature: MA Experiment 20000439 PARAMETER Experiment Name: At_Roots__P Parameter: Organism Value: A. thaliana
  misc_feature: MA Experiment 20000439 PARAMETER Experiment Name: At_Roots__P Parameter: Tissue Value: Roots vs. Whole Plant
  misc_feature: MA Experiment ID: 20000441 Result: Down-regulated in Transcription
  misc_feature: MA Experiment 20000441 PARAMETER Experiment Name: At_1uM_BR-BRZ__P Parameter: Tissue Value: Shoot Apices
  misc_feature: MA Experiment 20000441 PARAMETER Experiment Name: At_1uM_BR-BRZ__P Parameter: Treatment Value: 1uM BR vs. No Treatment
  misc_feature: MA Experiment ID: 20000443 Result: Down-regulated in Transcription
  misc_feature: MA Experiment 20000443 PARAMETER Experiment Name: At_1uM_BR-BRZ__P Parameter: Tissue Value: Shoot Apices
  misc_feature: MA Experiment 20000443 PARAMETER Experiment Name: At_1uM_BR-BRZ__P Parameter: Treatment Value: 1uM BRZ vs. No Treatment
  misc_feature: MA Experiment ID: 20000794 Result: Up-regulated in Transcription
  misc_feature: MA Experiment 20000794 PARAMETER Experiment Name: At_Petals_P Parameter: Age (day) Value: 23-25 days
  misc_feature: MA Experiment 20000794 PARAMETER Experiment Name: At_Petals_P Parameter: Plant Line Value: WS
  misc_feature: MA Experiment 20000794 PARAMETER Experiment Name: At_Petals_P Parameter: Tissue Value: Petals vs. Whole plant
  misc_feature: MA Experiment ID: 20001451 Result: Up-regulated in Transcription
  misc_feature: MA Experiment 20001451 PARAMETER Experiment Name: At_Far-red-induction_P Parameter: Age (day) Value: 7
  misc_feature: MA Experiment 20001451 PARAMETER Experiment Name: At_Far-red-induction_P Parameter: Light Value: Far-red vs. White
  misc_feature: MA Experiment 20001451 PARAMETER Experiment Name: At_Far-red-induction_P Parameter: Organism Value: A. thaliana
  misc_feature: MA Experiment 20001451 PARAMETER Experiment Name: At_Far-red-induction_P Parameter: Plant Line Value: Columbia
  misc_feature: MA Experiment 20001451 PARAMETER Experiment Name: At_Far-red-induction_P Parameter: Timepoint (hr) Value: 24
  misc_feature: MA Experiment 20001451 PARAMETER Experiment Name: At_Far-red-induction_P Parameter: Tissue Value: Whole Plant
  misc_feature: MA Experiment ID: 20001761 Result: Up-regulated in Transcription
  misc_feature: MA Experiment 20001761 PARAMETER Experiment Name: At_50mM_NH4NO3_L-to-H_P Parameter: Timepoint (hr) Value: 4
  misc_feature: MA Experiment 20001761 PARAMETER Experiment Name: At_50mM_NH4NO3_L-to-H_P Parameter: Tissue Value: Siliques
  misc_feature: MA Experiment 20001761 PARAMETER Experiment Name: At_50mM_NH4NO3_L-to-H_P Parameter: Treatment Value: 50mM NH4NO3 vs 100mM Mannitol
  misc_feature: MA Experiment ID: 20001768 Result: Up-regulated in Transcription
  misc_feature: MA Experiment 20001768 PARAMETER Experiment Name: At_Far-red-enriched-adult_P Parameter: Age (day) Value: 28
  misc_feature: MA Experiment 20001768 PARAMETER Experiment Name: At_Far-red-enriched-adult_P Parameter: Light Value: Far-red enriched vs. White
  misc_feature: MA Experiment 20001768 PARAMETER Experiment Name: At_Far-red-enriched-adult_P Parameter: Organism Value: A. thaliana
  misc_feature: MA Experiment 20001768 PARAMETER Experiment Name: At_Far-red-enriched-adult_P Parameter: Plant Line Value: Columbia
  misc_feature: MA Experiment 20001768 PARAMETER Experiment Name: At_Far-red-enriched-adult_P Parameter: Timepoint (hr) Value: 1
  misc_feature: MA Experiment 20001768 PARAMETER Experiment Name: At_Far-red-enriched-adult_P Parameter: Tissue Value: Aerial
  misc_feature: MA Experiment ID: 20001911 Result: Down-regulated in Transcription
  misc_feature: MA Experiment 20001911 PARAMETER Experiment Name: At_Drought_Reproduction_P Parameter: Age (day) Value: 40
  misc_feature: MA Experiment 20001911 PARAMETER Experiment Name: At_Drought_Reproduction_P Parameter: Organism Value: A. thaliana
  misc_feature: MA Experiment 20001911 PARAMETER Experiment Name: At_Drought_Reproduction_P Parameter: Plant Line Value: WS
  misc_feature: MA Experiment 20001911 PARAMETER Experiment Name: At_Drought_Reproduction_P Parameter: Timepoint (day) Value: 10
  misc_feature: MA Experiment 20001911 PARAMETER Experiment Name: At_Drought_Reproduction_P Parameter: Tissue Value: Flowers
  misc_feature: MA Experiment 20001911 PARAMETER Experiment Name: At_Drought_Reproduction_P Parameter: Treatment Value: Drought vs. No Drought
atggccttaatagctaccaaaataagttcacgttcttgttttgtttctgcttatccaaacaattctccaacgtttctgatatccaaatttcccaatacggtcgattctttgtcgcctgcaaatactgctaaaagatcgatcttgagaaacgtccatgcttcagtttctaacccttcgaagcagtttcataataagacatccttagaatatttacacgagttgaatatcaagaagatcaagaatatactaagtgcaaacgtagatgttccatccgagaacctggagatgatcgatgtcattcaaagtttaggcattgatctccattttcgacaagagatcgagcaaacccttcacatgatttacaaagaaggcctccaattcaacggtgatctccatgagatagcgcttcgctttcgattgctgagacaagagggtcactatgttcaagaaattattttcaaaaacatcctagacaagaagggtggatttaaagacgtagtaaaaaatgacgtcaagggtctaacagaattgtttgaagcttctgagctccgtgtagaaggtgaagaaacactcgacggtgcgagagaattcacatatagccgccttaatgaactttgctcaggtagagaaagtcatcaaaagcaagagataatgaagtctttggcgcaacctcgccacaaaaccgtaagaggattaacgtccaagaggttcacaagcatgatcaaaatcgcgggtcaagaagatccagaatggttacagtctctattacgagtggcggagatcgattccattaggctaaagtcattgactcaaggagaaatgtctcaaacatttaaatggtggacagaacttggtttagaaaaagatgtggagaaggcaagaagccagccgttaaaatggcatacgtggtccatgaaaattcttcaagatccgaccttaaccgaacaaaggcttgatcttaccaaaccaatatcgcttgtttatgttatagatgacattttcgatgtctatggggagctagaagaactaaccatcttcacacgagttgttgagagatgggatcataaggggcttaagacgctacccaaatacatgagggtttgttttgaagctctagatatgatcacaacggagattagcatgaagatctacaaatcacatggttggaacccgacatacgctcttcgacaatcgtgggcaagtttgtgtaaagcattcttggtagaagcaaagtggtttaattcgggttacttacccaccactgaagagtatatgaagaatggggttgtgagttcaggtgttcatttagtgatgcttcatgcctatatcttgttaggcgaagaactaacaaaagagaaagtcgaactaatagagagtaacccggggattgtatcatctgcagctacaattctcaggctctgggatgatctcggaagtgccaaggatgagaaccaagatggaactgatggatcatatgtagagtgttacctgaacgagtacaagggatcaactgttgatgaagcaagaacacatgttgcccagaagatatctagagcatggaaacgcttgaacagggagtgtctgaatccatgtccattctcaagatcattctcaaaagcttgtctcaacattgcaagaacagttcctttaatgtacagctatgatgatgatcaacgacttcccgacgaatatctcaagtctctaatgtaa

SEQ ID NO: 85902 - protein, 569 aa, Arabidopsis thaliana
  peptide (1)..(569): Ceres Seq. ID no. 12684371
  misc_feature (96)..(248): Pfam Name: Terpene synthase, N-terminal domain Pfam Description: Terpene synthase, N-terminal domain
  misc_feature (1)..(569): Homolog of NCBI NO: 29468398 NR Description: linalool synthase [Arabidopsis thaliana]
  misc_feature (96)..(569): Homolog of NCBI NO: 15220567 NR Description: terpene synthase/cyclase family; protein id:
  misc_feature (96)..(429): Homolog of NCBI NO: 25404336 NR Description: hypothetical protein T13M11.3 [imported] -
  misc_feature (482)..(569): Homolog of NCBI NO: 25404336 NR Description: hypothetical protein T13M11.3 [imported] -
  misc_feature (2)..(569): Homolog of NCBI NO: 30349142 NR Description: myrcene synthase Oc15 [Antirrhinum majus]
  misc_feature (3)..(569): Homolog of NCBI NO: 30349144 NR Description: myrcene synthase 1e20 [Antirrhinum majus]
  misc_feature (31)..(569): Homolog of NCBI NO: 30349140 NR Description: (E)-b-ocimene synthase [Antirrhinum majus]
  misc_feature (36)..(566): Homolog of NCBI NO: 14331015 NR Description: putative chloroplast terpene synthase [Quercus
  misc_feature (92)..(569): Homolog of NCBI NO: 40539112 NR Description: putative terpene synthase [Oryza sativa (japonica
  misc_feature (97)..(569): Homolog of NCBI NO: 37535582 NR Description: putative monoterpene synthase [Oryza sativa
MALIATKISSRSCFVSAYPNNSPTFLISKFPNTVDSLSPANTAKRSILRNVHASVSNPSKQFHNKTSLEYLHELNIKKIKNILSANVDVPSENLEMIDVIQSLGIDLHFRQEIEQTLHMIYKEGLQFNGDLHEIALRFRLLRQEGHYVQEIIFKNILDKKGGFKDVVKNDVKGLTELFEASELRVEGEETLDGAREFTYSRLNELCSGRESHQKQEIMKSLAQPRHKTVRGLTSKRFTSMIKIAGQEDPEWLQSLLRVAEIDSIRLKSLTQGEMSQTFKWWTELGLEKDVEKARSQPLKWHTWSMKILQDPTLTEQRLDLTKPISLVYVIDDIFDVYGELEELTIFTRVVERWDHKGLKTLPKYMRVCFEALDMITTEISMKIYKSHGWNPTYALRQSWASLCKAFLVEAKWFNSGYLPTTEEYMKNGVVSSGVHLVMLHAYILLGEELTKEKVELIESNPGIVSSAATILRLWDDLGSAKDENQDGTDGSYVECYLNEYKGSTVDEARTHVAQKISRAWKRLNRECLNPCPFSRSFSKACLNIARTVPLMYSYDDDQRLPDEYLKSLM

SEQ ID NO: 85903 - protein, 474 aa, Arabidopsis thaliana; identical to SEQ ID NO: 80766
  peptide (1)..(474): Ceres Seq. ID no. 12684372
  misc_feature (1)..(153): Pfam Name: Terpene synthase, N-terminal domain Pfam Description: Terpene synthase, N-terminal domain
  misc_feature (1)..(474): Homolog of NCBI NO: 29468398 NR Description: linalool synthase [Arabidopsis thaliana]
  misc_feature (1)..(474): Homolog of NCBI NO: 15220567 NR Description: terpene synthase/cyclase family; protein id:
  misc_feature (1)..(334): Homolog of NCBI NO: 25404336 NR Description: hypothetical protein T13M11.3 [imported] -
  misc_feature (387)..(474): Homolog of NCBI NO: 25404336 NR Description: hypothetical protein T13M11.3 [imported] -
  misc_feature (1)..(474): Homolog of NCBI NO: 30349142 NR Description: myrcene synthase Oc15 [Antirrhinum majus]
  misc_feature (1)..(474): Homolog of NCBI NO: 30349144 NR Description: myrcene synthase 1e20 [Antirrhinum majus]
  misc_feature (1)..(474): Homolog of NCBI NO: 30349140 NR Description: (E)-b-ocimene synthase [Antirrhinum majus]
  misc_feature (1)..(471): Homolog of NCBI NO: 14331015 NR Description: putative chloroplast terpene synthase [Quercus
  misc_feature (1)..(474): Homolog of NCBI NO: 40539112 NR Description: putative terpene synthase [Oryza sativa (japonica
  misc_feature (2)..(474): Homolog of NCBI NO: 37535582 NR Description: putative monoterpene synthase [Oryza sativa

SEQ ID NO: 85904 - protein, 451 aa, Arabidopsis thaliana; identical to SEQ ID NO: 80767
  peptide (1)..(451): Ceres Seq. ID no. 12684373
  misc_feature (1)..(130): Pfam Name: Terpene synthase, N-terminal domain Pfam Description: Terpene synthase, N-terminal domain
  misc_feature (1)..(451): Homolog of NCBI NO: 29468398 NR Description: linalool synthase [Arabidopsis thaliana]
  misc_feature (1)..(451): Homolog of NCBI NO: 15220567 NR Description: terpene synthase/cyclase family; protein id:
  misc_feature (1)..(311): Homolog of NCBI NO: 25404336 NR Description: hypothetical protein T13M11.3 [imported] -
  misc_feature (364)..(451): Homolog of NCBI NO: 25404336 NR Description: hypothetical protein T13M11.3 [imported] -
  misc_feature (1)..(451): Homolog of NCBI NO: 30349142 NR Description: myrcene synthase Oc15 [Antirrhinum majus]
  misc_feature (1)..(451): Homolog of NCBI NO: 30349144 NR Description: myrcene synthase 1e20 [Antirrhinum majus]
  misc_feature (1)..(451): Homolog of NCBI NO: 30349140 NR Description: (E)-b-ocimene synthase [Antirrhinum majus]
  misc_feature (1)..(448): Homolog of NCBI NO: 14331015 NR Description: putative chloroplast terpene synthase [Quercus
  misc_feature (1)..(451): Homolog of NCBI NO: 40539112 NR Description: putative terpene synthase [Oryza sativa (japonica
  misc_feature (1)..(451): Homolog of NCBI NO: 37535582 NR Description: putative monoterpene synthase [Oryza sativa

SEQ ID NO: 85905 - DNA, 1377 bp, Arabidopsis thaliana
  misc_feature (1)..(1377): Ceres Seq. ID no. 12684397
  misc_feature: MA Experiment ID: 108434 Result: Down-regulated in Transcription
  misc_feature: MA Experiment 108434 PARAMETER Experiment Name: At_Root_Tips_cDNA_P Parameter: Tissue Value: Root Tips
  misc_feature: MA Experiment ID: 108462 Result: Up-regulated in Transcription
  misc_feature: MA Experiment 108462 PARAMETER Experiment Name: At_Germinating_Seeds_cDNA_P Parameter: Age (day) Value: 2 vs. 0
  misc_feature: MA Experiment 108462 PARAMETER Experiment Name: At_Germinating_Seeds_cDNA_P Parameter: Tissue Value: Germinating Seeds
  misc_feature: MA Experiment ID: 108463 Result: Up-regulated in Transcription
  misc_feature: MA Experiment 108463 PARAMETER Experiment Name: At_Germinating_Seeds_cDNA_P Parameter: Age (day) Value: 3 vs. 0
  misc_feature: MA Experiment 108463 PARAMETER Experiment Name: At_Germinating_Seeds_cDNA_P Parameter: Tissue Value: Germinating Seeds
  misc_feature: MA Experiment ID: 108464 Result: Up-regulated in Transcription
  misc_feature: MA Experiment 108464 PARAMETER Experiment Name: At_Germinating_Seeds_cDNA_P Parameter: Age (day) Value: 4 vs. 0
  misc_feature: MA Experiment 108464 PARAMETER Experiment Name: At_Germinating_Seeds_cDNA_P Parameter: Tissue Value: Germinating Seeds
  misc_feature: MA Experiment ID: 108488 Result: Up-regulated in Transcription
  misc_feature: MA Experiment ID: 108489 Result: Up-regulated in Transcription
  misc_feature: MA Experiment ID: 108572 Result: Down-regulated in Transcription
  misc_feature: MA Experiment 108572 PARAMETER Experiment Name: At_Drought_cDNA_P Parameter: Timepoint (hr) Value: 1
  misc_feature: MA Experiment 108572 PARAMETER Experiment Name: At_Drought_cDNA_P Parameter: Tissue Value: Aerial
  misc_feature: MA Experiment 108572 PARAMETER Experiment Name: At_Drought_cDNA_P Parameter: Treatment Value: Drought vs. No Drought
  misc_feature: MA Experiment ID: 108573 Result: Up-regulated in Transcription
  misc_feature: MA Experiment 108573 PARAMETER Experiment Name: At_Drought_cDNA_P Parameter: Timepoint (hr) Value: 6
  misc_feature: MA Experiment 108573 PARAMETER Experiment Name: At_Drought_cDNA_P Parameter: Tissue Value: Aerial
  misc_feature: MA Experiment 108573 PARAMETER Experiment Name: At_Drought_cDNA_P Parameter: Treatment Value: Drought vs. No Drought
  misc_feature: MA Experiment ID: 108577 Result: Down-regulated in Transcription
  misc_feature: MA Experiment 108577 PARAMETER Experiment Name: At_42deg_Heat_cDNA_P Parameter: Temperature (deg C) Value: 42 vs. 22
  misc_feature: MA Experiment 108577 PARAMETER Experiment Name: At_42deg_Heat_cDNA_P Parameter: Timepoint (hr) Value: 6
  misc_feature: MA Experiment 108577 PARAMETER Experiment Name: At_42deg_Heat_cDNA_P Parameter: Tissue Value: Aerial
  misc_feature: MA Experiment ID: 108595 Result: Down-regulated in Transcription
  misc_feature: MA Experiment 108595 PARAMETER Experiment Name: At_Ler-pi_Ovule_cDNA_P Parameter: Plant Line Value: null
  misc_feature: MA Experiment ID: 108608 Result: Down-regulated in Transcription
  misc_feature: MA Experiment 108608 PARAMETER Experiment Name: At_100uM_ABA_cDNA_P Parameter: Timepoint (hr) Value: 1
  misc_feature: MA Experiment 108608 PARAMETER Experiment Name: At_100uM_ABA_cDNA_P Parameter: Tissue Value: Aerial
  misc_feature: MA Experiment 108608 PARAMETER Experiment Name: At_100uM_ABA_cDNA_P Parameter: Treatment Value: 100uM ABA vs. No Treatment
  misc_feature: MA Experiment ID: 20000089 Result: Down-regulated in Transcription
  misc_feature: MA Experiment ID: 20000112 Result: Up-regulated in Transcription
  misc_feature: MA Experiment 20000112 PARAMETER Experiment Name: At_42deg_Heat_cDNA_P Parameter: Temperature (deg C) Value: 42 vs. 22
  misc_feature: MA Experiment 20000112 PARAMETER Experiment Name: At_42deg_Heat_cDNA_P Parameter: Timepoint (hr) Value: 2
  misc_feature: MA Experiment 20000112 PARAMETER Experiment Name: At_42deg_Heat_cDNA_P Parameter: Tissue Value: Aerial
  misc_feature: MA Experiment ID: 20000224 Result: Down-regulated in Transcription
  misc_feature: MA Experiment ID: 20000348 Result: Down-regulated in Transcription
  misc_feature: MA Experiment 20000348 PARAMETER Experiment Name: At_100uM_ABA_Sub_P Parameter: Age (day) Value: 14
  misc_feature: MA Experiment 20000348 PARAMETER Experiment Name: At_100uM_ABA_Sub_P Parameter: Organism Value: A. thaliana
  misc_feature: MA Experiment 20000348 PARAMETER Experiment Name: At_100uM_ABA_Sub_P Parameter: Plant Line Value: WS
  misc_feature: MA Experiment 20000348 PARAMETER Experiment Name: At_100uM_ABA_Sub_P Parameter: Timepoint (hr) Value: 1
  misc_feature: MA Experiment 20000348 PARAMETER Experiment Name: At_100uM_ABA_Sub_P Parameter: Tissue Value: Aerial
  misc_feature: MA Experiment 20000348 PARAMETER Experiment Name: At_100uM_ABA_Sub_P Parameter: Treatment Value: 100uM ABA vs. No Treatment
  misc_feature: MA Experiment ID: 20000355 Result: Down-regulated in Transcription
  misc_feature: MA Experiment 20000355 PARAMETER Experiment Name: At_Siliques_Sub_P Parameter: Age (day) Value: 21
  misc_feature: MA Experiment 20000355 PARAMETER Experiment Name: At_Siliques_Sub_P Parameter: Organism Value: A. thaliana
  misc_feature: MA Experiment 20000355 PARAMETER Experiment Name: At_Siliques_Sub_P Parameter: Plant Line Value: WS
  misc_feature: MA Experiment 20000355 PARAMETER Experiment Name: At_Siliques_Sub_P Parameter: Tissue Value: Less Than 5mm Siliques vs. Whole Plant
  misc_feature: MA Experiment ID: 20000440 Result: Down-regulated in Transcription
  misc_feature: MA Experiment 20000440 PARAMETER Experiment Name: At_Closed-Flower__Sub_P Parameter: Tissue Value: Closed Flower vs. Whole Plant
  misc_feature: MA Experiment ID: 20001806 Result: Up-regulated in Transcription
  misc_feature: MA Experiment 20001806 PARAMETER Experiment Name: At_50mM_NH4NO3_L-to-H_Sub_P Parameter: Timepoint (hr) Value: 4
  misc_feature: MA Experiment 20001806 PARAMETER Experiment Name: At_50mM_NH4NO3_L-to-H_Sub_P Parameter: Tissue Value: Leaf
  misc_feature: MA Experiment 20001806 PARAMETER Experiment Name: At_50mM_NH4NO3_L-to-H_Sub_P Parameter: Treatment Value: 50mM NH4NO3 vs 100mM Mannitol
  misc_feature: MA Experiment ID: 20001807 Result: Up-regulated in Transcription
  misc_feature: MA Experiment 20001807 PARAMETER Experiment Name: At_50mM_NH4NO3_L-to-H_Sub_P Parameter: Timepoint (hr) Value: 6
  misc_feature: MA Experiment 20001807 PARAMETER Experiment Name: At_50mM_NH4NO3_L-to-H_Sub_P Parameter: Tissue Value: Leaf
  misc_feature: MA Experiment 20001807 PARAMETER Experiment Name: At_50mM_NH4NO3_L-to-H_Sub_P Parameter: Treatment Value: 50mM NH4NO3 vs 100mM Mannitol
atgagaaacaatttcgtccctataattctctccttcatcatcttcttgactccatcaatcgcagaacaagaaccttcaattctttctcccgtcgatcaactcctcaacaaaacaagctcatacctcgatttttcaacaaaattcaaccaaccaagaatcgaactaacaacatcaacgatcatcgccggcttactctctttcctagcttcatcaatctcaagcgccggtggaatcggcggtggaggtttatatgttccgataatgacaatcgtggccggtctcgatctaaagacagcttcaagcttctcagcttttatggttactggtggatctatagctaacgtgggatgcaatctattcgttagaaaccctaaatctggtggcaaaaccctaatcgacttcgatttagctcttttattggaaccatgtatgcttcttggagttagtattggtgtgatctgtaatcttgtttttccgaactggttgattacgagtctcttcgctgtgtttcttgcgtggtcgacgttgaagacttttggaaatggactttattattggagattggaatcggagatggtgaagattagagaatcgaatagaattgaagaagatgatgaagaagataagattgagagtctaaagttgcctctcttggaggattatcagagaccaaagaggtttccatggattaagcttggagttttggtcattatttggctttcttacttcgcagtttatcttcttcgaggaaacaaatatggcgagggaatcatatcgatcgagccatgtggaaacgcctactggctcatttcatcgtctcaaataccactaactctcttcttcactctctggatctgcttcagtgacaatgttcaaagccaacaacaatcagattaccatgtctcagtaaaggatgtagaagatttgagatcaaatgatggagcaagatcaaacaagtgtatgttccctgtaatggctctattagctggagttttgggtggtgtttttggtattggaggtggaatgctcattagtcctcttcttctccaagttggtatcgctcccgaggtaactgcagcgacatgttctttcatggttcttttttcatcaacgatgtctgcgattcaatacttattactaggcatggaacataccggaaccgcaagtatatttgcggttatatgttttgtggcatcactcgtgggactaaaggtggttcaaaaggtaataaccgagtatggaagggcttcgatcattgtgttctcggttggtatcgtcatggcattgagtattgtgttgatgacaagctatggagctcttgatgtttggaatgattatgtctctggtcgttacatgggtttcaagttaccttgttga

SEQ ID NO: 85906 - protein, 458 aa, Arabidopsis thaliana
  peptide (1)..(458): Ceres Seq. ID no. 12684398
  misc_feature (1)..(458): Homolog of NCBI NO: 15220600 NR Description: unknown protein; protein id: At1g61740.1, by cDNA: gi_13272464 [Arabidopsis thaliana]
  misc_feature (70)..(458): Homolog of NCBI NO: 11358507 NR Description: membrane protein [imported] - Arabidopsis (fragment) >gi|4079632|emb|CAA10487.1| hypothetical protein
  misc_feature (1)..(458): Homolog of NCBI NO: 15220419 NR Description: hypothetical protein; protein id: At1g11540.1
  misc_feature (33)..(458): Homolog of NCBI NO: 6554197 NR Description: T23J18.20 [Arabidopsis thaliana]
  misc_feature (1)..(418): Homolog of NCBI NO: 15233579 NR Description: hypothetical protein; protein id: At4g21250.1
  misc_feature (7)..(458): Homolog of NCBI NO: 34908754 NR Description: P0415A04.10 [Oryza sativa (japonica
  misc_feature (50)..(440): Homolog of NCBI NO: 34908752 NR Description: P0415A04.9 [Oryza sativa (japonica
  misc_feature (329)..(458): Homolog of NCBI NO: 15233581 NR Description: hypothetical protein; protein id: At4g21260.1
  misc_feature (87)..(200): Homolog of NCBI NO: 15233581 NR Description: hypothetical protein; protein id: At4g21260.1
  misc_feature (51)..(458): Homolog of NCBI NO: 40253412 NR Description: membrane protein-like [Oryza sativa (japonica
MRNNFVPIILSFIIFLTPSIAEQEPSILSPVDQLLNKTSSYLDFSTKFNQPRIELTTSTIIAGLLSFLASSISSAGGIGGGGLYVPIMTIVAGLDLKTASSFSAFMVTGGSIANVGCNLFVRNPKSGGKTLIDFDLALLLEPCMLLGVSIGVICNLVFPNWLITSLFAVFLAWSTLKTFGNGLYYWRLESEMVKIRESNRIEEDDEEDKIESLKLPLLEDYQRPKRFPWIKLGVLVIIWLSYFAVYLLRGNKYGEGIISIEPCGNAYWLISSSQIPLTLFFTLWICFSDNVQSQQQSDYHVSVKDVEDLRSNDGARSNKCMFPVMALLAGVLGGVFGIGGGMLISPLLLQVGIAPEVTAATCSFMVLFSSTMSAIQYLLLGMEHTGTASIFAVICFVASLVGLKVVQKVITEYGRASIIVFSVGIVMALSIVLMTSYGALDVWNDYVSGRYMGFKLPC

SEQ ID NO: 85907 - protein, 371 aa, Arabidopsis thaliana; identical to SEQ ID NO: 77763
  peptide (1)..(371): Ceres Seq. ID no. 12684399
  misc_feature (1)..(371): Homolog of NCBI NO: 15220600 NR Description: unknown protein; protein id: At1g61740.1, by cDNA: gi_13272464 [Arabidopsis thaliana]
  misc_feature (1)..(371): Homolog of NCBI NO: 11358507 NR Description: membrane protein [imported] - Arabidopsis (fragment) >gi|4079632|emb|CAA10487.1| hypothetical protein
  misc_feature (1)..(371): Homolog of NCBI NO: 15220419 NR Description: hypothetical protein; protein id: At1g11540.1
  misc_feature (1)..(371): Homolog of NCBI NO: 6554197 NR Description: T23J18.20 [Arabidopsis thaliana]
  misc_feature (1)..(331): Homolog of NCBI NO: 15233579 NR Description: hypothetical protein; protein id: At4g21250.1
  misc_feature (1)..(371): Homolog of NCBI NO: 34908754 NR Description: P0415A04.10 [Oryza sativa (japonica
  misc_feature (1)..(353): Homolog of NCBI NO: 34908752 NR Description: P0415A04.9 [Oryza sativa (japonica
  misc_feature (242)..(371): Homolog of NCBI NO: 15233581 NR Description: hypothetical protein; protein id: At4g21260.1
  misc_feature (1)..(113): Homolog of NCBI NO: 15233581 NR Description: hypothetical protein; protein id: At4g21260.1
  misc_feature (1)..(371): Homolog of NCBI NO: 40253412 NR Description: membrane protein-like [Oryza sativa (japonica

SEQ ID NO: 85908 - protein, 353 aa, Arabidopsis thaliana; identical to SEQ ID NO: 77764
  peptide (1)..(353): Ceres Seq. ID no. 12684400
  misc_feature (1)..(353): Homolog of NCBI NO: 15220600 NR Description: unknown protein; protein id: At1g61740.1, by cDNA: gi_13272464 [Arabidopsis thaliana]
  misc_feature (1)..(353): Homolog of NCBI NO: 11358507 NR Description: membrane protein [imported] - Arabidopsis (fragment) >gi|4079632|emb|CAA10487.1| hypothetical protein
  misc_feature (1)..(353): Homolog of NCBI NO: 15220419 NR Description: hypothetical protein; protein id: At1g11540.1
  misc_feature (1)..(353): Homolog of NCBI NO: 6554197 NR Description: T23J18.20 [Arabidopsis thaliana]
  misc_feature (1)..(313): Homolog of NCBI NO: 15233579 NR Description: hypothetical protein; protein id: At4g21250.1
  misc_feature (1)..(353): Homolog of NCBI NO: 34908754 NR Description: P0415A04.10 [Oryza sativa (japonica
  misc_feature (1)..(335): Homolog of NCBI NO: 34908752 NR Description: P0415A04.9 [Oryza sativa (japonica
  misc_feature (224)..(353): Homolog of NCBI NO: 15233581 NR Description: hypothetical protein; protein id: At4g21260.1
  misc_feature (1)..(95): Homolog of NCBI NO: 15233581 NR Description: hypothetical protein; protein id: At4g21260.1
  misc_feature (1)..(353): Homolog of NCBI NO: 40253412 NR Description: membrane protein-like [Oryza sativa (japonica

SEQ ID NO: 85909 - DNA, 1041 bp, Arabidopsis thaliana
  misc_feature (1)..(1041): Ceres Seq. ID no. 12684403
  misc_feature: MA Experiment ID: 20000182 Result: Up-regulated in Transcription
  misc_feature: MA Experiment 20000182 PARAMETER Experiment Name: At_2mM_SA_P Parameter: Age (day) Value: 14
  misc_feature: MA Experiment 20000182 PARAMETER Experiment Name: At_2mM_SA_P Parameter: Organism Value: A. thaliana
  misc_feature: MA Experiment 20000182 PARAMETER Experiment Name: At_2mM_SA_P Parameter: Plant Line Value: WS
  misc_feature: MA Experiment 20000182 PARAMETER Experiment Name: At_2mM_SA_P Parameter: Timepoint (hr) Value: 6
  misc_feature: MA Experiment 20000182 PARAMETER Experiment Name: At_2mM_SA_P Parameter: Tissue Value: Aerial
  misc_feature: MA Experiment 20000182 PARAMETER Experiment Name: At_2mM_SA_P Parameter: Treatment Value: 2mM SA vs. No Treatment
  misc_feature: MA Experiment ID: 20000184 Result: Down-regulated in Transcription
  misc_feature: MA Experiment 20000184 PARAMETER Experiment Name: At_Shoots__P Parameter: Age (day) Value: 7
  misc_feature: MA Experiment 20000184 PARAMETER Experiment Name: At_Shoots__P Parameter: Tissue Value: Shoots vs. Whole Plant
  misc_feature: MA Experiment ID: 20000185 Result: Up-regulated in Transcription
  misc_feature: MA Experiment 20000185 PARAMETER Experiment Name: At_Roots__P Parameter: Age (day) Value: 7 vs. 21
  misc_feature: MA Experiment 20000185 PARAMETER Experiment Name: At_Roots__P Parameter: Organism Value: A. thaliana
  misc_feature: MA Experiment 20000185 PARAMETER Experiment Name: At_Roots__P Parameter: Tissue Value: Roots vs. Whole Plant
  misc_feature: MA Experiment ID: 20000234 Result: Down-regulated in Transcription
  misc_feature: MA Experiment 20000234 PARAMETER Experiment Name: At_Siliques_P Parameter: Age (day) Value: 21
  misc_feature: MA Experiment 20000234 PARAMETER Experiment Name: At_Siliques_P Parameter: Organism Value: A. thaliana
  misc_feature: MA Experiment 20000234 PARAMETER Experiment Name: At_Siliques_P Parameter: Plant Line Value: WS
  misc_feature: MA Experiment 20000234 PARAMETER Experiment Name: At_Siliques_P Parameter: Tissue Value: Less Than 5mm Siliques vs. Whole Plant
  misc_feature: MA Experiment ID: 20000235 Result: Down-regulated in Transcription
  misc_feature: MA Experiment 20000235 PARAMETER Experiment Name: At_Siliques_P Parameter: Age (day) Value: 21
  misc_feature: MA Experiment 20000235 PARAMETER Experiment Name: At_Siliques_P Parameter: Organism Value: A. thaliana
  misc_feature: MA Experiment 20000235 PARAMETER Experiment Name: At_Siliques_P Parameter: Plant Line Value: WS
  misc_feature: MA Experiment 20000235 PARAMETER Experiment Name: At_Siliques_P Parameter: Tissue Value: 5-10mm Siliques vs. Whole Plant
  misc_feature: MA Experiment ID: 20000264 Result: Down-regulated in Transcription
  misc_feature: MA Experiment 20000264 PARAMETER Experiment Name: At_Open_Flower_P Parameter: Age (day) Value: 21
  misc_feature: MA Experiment 20000264 PARAMETER Experiment Name: At_Open_Flower_P Parameter: Plant Line Value: WS
  misc_feature: MA Experiment 20000264 PARAMETER Experiment Name: At_Open_Flower_P Parameter: Tissue Value: Open Flower vs. Whole Plant
  misc_feature: MA Experiment ID: 20000265 Result: Down-regulated in Transcription
  misc_feature: MA Experiment 20000265 PARAMETER Experiment Name: At_Open_Flower_P Parameter: Age (day) Value: 21
  misc_feature: MA Experiment 20000265 PARAMETER Experiment Name: At_Open_Flower_P Parameter: Plant Line Value: WS
  misc_feature: MA Experiment 20000265 PARAMETER Experiment Name: At_Open_Flower_P Parameter: Tissue Value: Closed Flower vs. Whole Plant
  misc_feature: MA Experiment ID: 20000269 Result: Down-regulated in Transcription
  misc_feature: MA Experiment 20000269 PARAMETER Experiment Name: At_1mM_KNO3_L-vs-H_Roots_P Parameter: Age (day) Value: 7,10,12
  misc_feature: MA Experiment 20000269 PARAMETER Experiment Name: At_1mM_KNO3_L-vs-H_Roots_P Parameter: Organism Value: A. thaliana
  misc_feature: MA Experiment 20000269 PARAMETER Experiment Name: At_1mM_KNO3_L-vs-H_Roots_P Parameter: Plant Line Value: WS
  misc_feature: MA Experiment 20000269 PARAMETER Experiment Name: At_1mM_KNO3_L-vs-H_Roots_P Parameter: Timepoint (day) Value: 7,10,12
  misc_feature: MA Experiment 20000269 PARAMETER Experiment Name: At_1mM_KNO3_L-vs-H_Roots_P Parameter: Tissue Value: Roots
  misc_feature: MA Experiment 20000269 PARAMETER Experiment Name: At_1mM_KNO3_L-vs-H_Roots_P Parameter: Treatment Value: 1mM KNO3 vs. 50mM KNO3
  misc_feature: MA Experiment ID: 20000286 Result: Down-regulated in Transcription
  misc_feature: MA Experiment 20000286 PARAMETER Experiment Name: At_Open_Flower_P Parameter: Age (day) Value: 21
  misc_feature: MA Experiment 20000286 PARAMETER Experiment Name: At_Open_Flower_P Parameter: Plant Line Value: WS
  misc_feature: MA Experiment 20000286 PARAMETER Experiment Name: At_Open_Flower_P Parameter: Tissue Value: Half Open vs. Whole Plant
  misc_feature: MA Experiment ID: 20000438 Result: Down-regulated in Transcription
  misc_feature: MA Experiment 20000438 PARAMETER Experiment Name: At_Shoots__P Parameter: Age (day) Value: 14
  misc_feature: MA Experiment 20000438 PARAMETER Experiment Name: At_Shoots__P Parameter: Tissue Value: Shoots vs. Whole Plant
  misc_feature: MA Experiment ID: 20000439 Result: Up-regulated in Transcription
  misc_feature: MA Experiment 20000439 PARAMETER Experiment Name: At_Roots__P Parameter: Age (day) Value: 14 vs. 21
  misc_feature: MA Experiment 20000439 PARAMETER Experiment Name: At_Roots__P Parameter: Organism Value: A. thaliana
  misc_feature: MA Experiment 20000439 PARAMETER Experiment Name: At_Roots__P Parameter: Tissue Value: Roots vs. Whole Plant
  misc_feature: MA Experiment ID: 20000453 Result: Up-regulated in Transcription
  misc_feature: MA Experiment 20000453 PARAMETER Experiment Name: At_100uM_ABA_P Parameter: Age (day) Value: 15
  misc_feature: MA Experiment 20000453 PARAMETER Experiment Name: At_100uM_ABA_P Parameter: Organism Value: A. thaliana
  misc_feature: MA Experiment 20000453 PARAMETER Experiment Name: At_100uM_ABA_P Parameter: Plant Line Value: WS
  misc_feature: MA Experiment 20000453 PARAMETER Experiment Name: At_100uM_ABA_P Parameter: Timepoint (hr) Value: 24
  misc_feature: MA Experiment 20000453 PARAMETER Experiment Name: At_100uM_ABA_P Parameter: Tissue Value: Aerial
  misc_feature: MA Experiment 20000453 PARAMETER Experiment Name: At_100uM_ABA_P Parameter: Treatment Value: 100uM ABA vs. No Treatment
  misc_feature: MA Experiment ID: 20000573 Result: Up-regulated in Transcription
  misc_feature: MA Experiment 20000573 PARAMETER Experiment Name: At_100uM_ABA_Mutants__P Parameter: Organism Value: A. thaliana
  misc_feature: MA Experiment 20000573 PARAMETER Experiment Name: At_100uM_ABA_Mutants__P Parameter: Plant Line Value: CS22 vs. Ler wt
  misc_feature: MA Experiment 20000573 PARAMETER Experiment Name: At_100uM_ABA_Mutants__P Parameter: Timepoint (hr) Value: N/A
  misc_feature: MA Experiment 20000573 PARAMETER Experiment Name: At_100uM_ABA_Mutants__P Parameter: Tissue Value: Whole Plant
  misc_feature: MA Experiment 20000573 PARAMETER Experiment Name: At_100uM_ABA_Mutants__P Parameter: Treatment Value: None
  misc_feature: MA Experiment ID: 20000574 Result: Up-regulated in Transcription
  misc_feature: MA Experiment 20000574 PARAMETER Experiment Name: At_100uM_ABA_Mutants__P Parameter: Organism Value: A. thaliana
  misc_feature: MA Experiment 20000574 PARAMETER Experiment Name: At_100uM_ABA_Mutants__P Parameter: Plant Line Value: CS23 vs. Ler wt
  misc_feature: MA Experiment 20000574 PARAMETER Experiment Name: At_100uM_ABA_Mutants__P Parameter: Timepoint (hr) Value: N/A
  misc_feature: MA Experiment 20000574 PARAMETER Experiment Name: At_100uM_ABA_Mutants__P Parameter: Tissue Value: Whole Plant
  misc_feature: MA Experiment 20000574 PARAMETER Experiment Name: At_100uM_ABA_Mutants__P Parameter: Treatment Value: None
  misc_feature: MA Experiment ID: 20000794 Result: Down-regulated in Transcription
  misc_feature: MA Experiment 20000794 PARAMETER Experiment Name: At_Petals_P Parameter: Age (day) Value: 23-25 days
  misc_feature: MA Experiment 20000794 PARAMETER Experiment Name: At_Petals_P Parameter: Plant Line Value: WS
  misc_feature: MA Experiment 20000794 PARAMETER Experiment Name: At_Petals_P Parameter: Tissue Value: Petals vs. Whole plant
  misc_feature: MA Experiment ID: 20001247 Result: Up-regulated in Transcription
  misc_feature: MA Experiment 20001247 PARAMETER Experiment Name: At_Far-red-induction_P Parameter: Age (day) Value: 7
  misc_feature: MA Experiment 20001247 PARAMETER Experiment Name: At_Far-red-induction_P Parameter: Light Value: Far-red vs. White
  misc_feature: MA Experiment 20001247 PARAMETER Experiment Name: At_Far-red-induction_P Parameter: Organism Value: A. thaliana
  misc_feature: MA Experiment 20001247 PARAMETER Experiment Name: At_Far-red-induction_P Parameter: Plant Line Value: Columbia
  misc_feature: MA Experiment 20001247 PARAMETER Experiment Name: At_Far-red-induction_P Parameter: Timepoint (hr) Value: 1
  misc_feature: MA Experiment 20001247 PARAMETER Experiment Name: At_Far-red-induction_P Parameter: Tissue Value: Whole Plant
  misc_feature: MA Experiment ID: 20001904 Result: Up-regulated in Transcription
  misc_feature: MA Experiment 20001904 PARAMETER Experiment Name: At_Drought_Reproduction_P Parameter: Age (day) Value: 37
  misc_feature: MA Experiment 20001904 PARAMETER Experiment Name: At_Drought_Reproduction_P Parameter: Organism Value: A. thaliana
  misc_feature: MA Experiment 20001904 PARAMETER Experiment Name: At_Drought_Reproduction_P Parameter: Plant Line Value: WS
  misc_feature: MA Experiment 20001904 PARAMETER Experiment Name: At_Drought_Reproduction_P Parameter: Timepoint (day) Value: 7
  misc_feature: MA Experiment 20001904 PARAMETER Experiment Name: At_Drought_Reproduction_P Parameter: Tissue Value: Rosettes
  misc_feature: MA Experiment 20001904 PARAMETER Experiment Name: At_Drought_Reproduction_P Parameter: Treatment Value: Drought vs. No Drought
  misc_feature: MA Experiment ID: 20001905 Result: Up-regulated in Transcription
  misc_feature: MA Experiment 20001905 PARAMETER Experiment Name: At_Drought_Reproduction_P Parameter: Age (day) Value: 40
  misc_feature: MA Experiment 20001905 PARAMETER Experiment Name: At_Drought_Reproduction_P Parameter: Organism Value: A. thaliana
  misc_feature: MA Experiment 20001905 PARAMETER Experiment Name: At_Drought_Reproduction_P Parameter: Plant Line Value: WS
  misc_feature: MA Experiment 20001905 PARAMETER Experiment Name: At_Drought_Reproduction_P Parameter: Timepoint (day) Value: 10
  misc_feature: MA Experiment 20001905 PARAMETER Experiment Name: At_Drought_Reproduction_P Parameter: Tissue Value: Rosettes
  misc_feature: MA Experiment 20001905 PARAMETER Experiment Name: At_Drought_Reproduction_P Parameter: Treatment Value: Drought vs. No Drought
atgcagaaagatttcgggtacttagctgatatatgtttcaaacattttggagaccgagttaaacactggatcacgattaacgaaccaaaccaacatataagcttagcatatcgaagtggtttgtttccaccagcgcggtgctccatgccatacggaaattgtactcacgggaactcagaaactgagccttttatagccgctcataatatgatcctcgcacatgcaaaggcgattcaaatataccgaaccaaatatcaaagagaacaaaagggaatcattggcattgtggtacaaacatcatggtttgaacccataagcgattcgattgctgataaaaatgctgccgagagagctcaatcattttattcaaattggattctagatcccgttgtgtatgggaaatatccggaagaaatggtgaatctacttggatcagctttgccaaaattttcgagcaatgaaatgaacagcctaatgagctataaatcagactttttgggtattaatcactatacaagttacttcatacaagattgtttgatcactgcttgtaattctggagacggagcttctaaaagcgaaggattagccctcaaattggaccggaaaggaaatgtttccatcggagaactgaccgacgtaaattggcagcatattgatcctaacggattcagaaagatgttgaattacctaaaaaataggtaccacaacataccaatgtacatcaccgaaaatggtttcggacagttgcaaaaaccagagacaacagttgaagaacttctgcatgatacaaaaaggatacaatacttgagtggatatttggatgctttgaaagcagcaatgagggatggagcaaatgtgaagggatatttcgcatggtcactattagataattttgaatggttgtacggatacaaggttcgatttgggctattccacgttgattttacaactttgaaaaggacaccaaagcaatcagctacatggtacaagaacttcattgaacagaacgtgaatatagaagatcaaatagataaataa

SEQ ID NO: 85910 - protein, 346 aa, Arabidopsis thaliana
  peptide (1)..(346): Ceres Seq. ID no. 12684404
  misc_feature (1)..(346): Homolog of NCBI NO: 7435450 NR Description: beta-glucosidase homolog F8K4.3 - Arabidopsis
  misc_feature (1)..(346): Homolog of NCBI NO: 30696622 NR Description: glycosyl hydrolase family 1 [Arabidopsis thaliana]
  misc_feature (1)..(346): Homolog of NCBI NO: 30696625 NR Description: glycosyl hydrolase family 1 [Arabidopsis thaliana]
  misc_feature (1)..(345): Homolog of NCBI NO: 15220627 NR Description: glycosyl hydrolase family 1; protein id:
  misc_feature (1)..(337): Homolog of NCBI NO: 22328863 NR Description: glycosyl hydrolase family 1; protein id:
  misc_feature (1)..(343): Homolog of NCBI NO: 38345329 NR Description: OSJNBa0004N05.26 [Oryza sativa (japonica
  misc_feature (1)..(334): Homolog of NCBI NO: 38345324 NR Description: OSJNBa0004N05.21 [Oryza sativa (japonica
  misc_feature (1)..(334): Homolog of NCBI NO: 38345327 NR Description: OSJNBa0004N05.24 [Oryza sativa (japonica
  misc_feature (3)..(336): Homolog of NCBI NO: 17226270 NR Description: beta-mannosidase enzyme [Lycopersicon esculentum]
  misc_feature (3)..(337): Homolog of NCBI NO: 15229584 NR Description: glycosyl hydrolase family 1; protein id: supported by cDNA: 11984. [Arabidopsis thaliana]
MQKDFGYLADICFKHFGDRVKHWITINEPNQHISLAYRSGLFPPARCSMPYGNCTHGNSETEPFIAAHNMILAHAKAIQIYRTKYQREQKGIIGIVVQTSWFEPISDSIADKNAAERAQSFYSNWILDPVVYGKYPEEMVNLLGSALPKFSSNEMNSLMSYKSDFLGINHYTSYFIQDCLITACNSGDGASKSEGLALKLDRKGNVSIGELTDVNWQHIDPNGFRKMLNYLKNRYHNIPMYITENGFGQLQKPETTVEELLHDTKRIQYLSGYLDALKAAMRDGANVKGYFAWSLLDNFEWLYGYKVRFGLFHVDFTTLKRTPKQSATWYKNFIEQNVNIEDQIDK

SEQ ID NO: 85911 - protein, 298 aa, Arabidopsis thaliana
  peptide (1)..(298): Ceres Seq. ID no. 12684405
  misc_feature (1)..(298): Homolog of NCBI NO: 7435450 NR Description: beta-glucosidase homolog F8K4.3 - Arabidopsis
  misc_feature (1)..(298): Homolog of NCBI NO: 30696622 NR Description: glycosyl hydrolase family 1 [Arabidopsis thaliana]
  misc_feature (1)..(298): Homolog of NCBI NO: 30696625 NR Description: glycosyl hydrolase family 1 [Arabidopsis thaliana]
  misc_feature (1)..(297): Homolog of NCBI NO: 15220627 NR Description: glycosyl hydrolase family 1; protein id:
  misc_feature (1)..(289): Homolog of NCBI NO: 22328863 NR Description: glycosyl hydrolase family 1; protein id:
  misc_feature (1)..(295): Homolog of NCBI NO: 38345329 NR Description: OSJNBa0004N05.26 [Oryza sativa (japonica
  misc_feature (1)..(286): Homolog of NCBI NO: 38345324 NR Description: OSJNBa0004N05.21 [Oryza sativa (japonica
  misc_feature (1)..(286): Homolog of NCBI NO: 38345327 NR Description: OSJNBa0004N05.24 [Oryza sativa (japonica
  misc_feature (1)..(288): Homolog of NCBI NO: 17226270 NR Description: beta-mannosidase enzyme [Lycopersicon esculentum]
  misc_feature (1)..(289): Homolog of NCBI NO: 15229584 NR Description: glycosyl hydrolase family 1; protein id: supported by cDNA: 11984. [Arabidopsis thaliana]
MPYGNCTHGNSETEPFIAAHNMILAHAKAIQIYRTKYQREQKGIIGIVVQTSWFEPISDSIADKNAAERAQSFYSNWILDPVVYGKYPEEMVNLLGSALPKFSSNEMNSLMSYKSDFLGINHYTSYFIQDCLITACNSGDGASKSEGLALKLDRKGNVSIGELTDVNWQHIDPNGFRKMLNYLKNRYHNIPMYITENGFGQLQKPETTVEELLHDTKRIQYLSGYLDALKAAMRDGANVKGYFAWSLLDNFEWLYGYKVRFGLFHVDFTTLKRTPKQSATWYKNFIEQNVNIEDQIDK

SEQ ID NO: 85912 - protein, 277 aa, Arabidopsis thaliana
  peptide (1)..(277): Ceres Seq. ID no. 12684406
  misc_feature (1)..(277): Homolog of NCBI NO: 7435450 NR Description: beta-glucosidase homolog F8K4.3 - Arabidopsis
  misc_feature (1)..(277): Homolog of NCBI NO: 30696622 NR Description: glycosyl hydrolase family 1 [Arabidopsis thaliana]
  misc_feature (1)..(277): Homolog of NCBI NO: 30696625 NR Description: glycosyl hydrolase family 1 [Arabidopsis thaliana]
  misc_feature (1)..(276): Homolog of NCBI NO: 15220627 NR Description: glycosyl hydrolase family 1; protein id:
  misc_feature (1)..(268): Homolog of NCBI NO: 22328863 NR Description: glycosyl hydrolase family 1; protein id:
  misc_feature (1)..(274): Homolog of NCBI NO: 38345329 NR Description: OSJNBa0004N05.26 [Oryza sativa (japonica
  misc_feature (1)..(265): Homolog of NCBI NO: 38345324 NR Description: OSJNBa0004N05.21 [Oryza sativa (japonica
  misc_feature (1)..(265): Homolog of NCBI NO: 38345327 NR Description: OSJNBa0004N05.24 [Oryza sativa (japonica
  misc_feature (1)..(267): Homolog of NCBI NO: 17226270 NR Description: beta-mannosidase enzyme [Lycopersicon esculentum]
  misc_feature (1)..(268): Homolog of NCBI NO: 15229584 NR Description: glycosyl hydrolase family 1; protein id: supported by cDNA: 11984. [Arabidopsis thaliana]
MILAHAKAIQIYRTKYQREQKGIIGIVVQTSWFEPISDSIADKNAAERAQSFYSNWILDPVVYGKYPEEMVNLLGSALPKFSSNEMNSLMSYKSDFLGINHYTSYFIQDCLITACNSGDGASKSEGLALKLDRKGNVSIGELTDVNWQHIDPNGFRKMLNYLKNRYHNIPMYITENGFGQLQKPETTVEELLHDTKRIQYLSGYLDALKAAMRDGANVKGYFAWSLLDNFEWLYGYKVRFGLFHVDFTTLKRTPKQSATWYKNFIEQNVNIEDQIDK

SEQ ID NO: 85913 - DNA, 1142 bp, Arabidopsis thaliana
  misc_feature (1)..(1142): Ceres Seq. ID no. 12684488
  misc_feature: MA Experiment ID: 108434 Result: Down-regulated in Transcription
  misc_feature: MA Experiment 108434 PARAMETER Experiment Name: At_Root_Tips_cDNA_P Parameter: Tissue Value: Root Tips
  misc_feature: MA Experiment ID: 108461 Result: Up-regulated in Transcription
  misc_feature: MA Experiment 108461 PARAMETER Experiment Name: At_Germinating_Seeds_cDNA_P Parameter: Age (day) Value: 1 vs. 0
  misc_feature: MA Experiment 108461 PARAMETER Experiment Name: At_Germinating_Seeds_cDNA_P Parameter: Tissue Value: Germinating Seeds
  misc_feature: MA Experiment ID: 108462 Result: Up-regulated in Transcription
  misc_feature: MA Experiment 108462 PARAMETER Experiment Name: At_Germinating_Seeds_cDNA_P Parameter: Age (day) Value: 2 vs. 0
  misc_feature: MA Experiment 108462 PARAMETER Experiment Name: At_Germinating_Seeds_cDNA_P Parameter: Tissue Value: Germinating Seeds
  misc_feature: MA Experiment ID: 108463 Result: Up-regulated in Transcription
  misc_feature: MA Experiment 108463 PARAMETER Experiment Name: At_Germinating_Seeds_cDNA_P Parameter: Age (day) Value: 3 vs. 0
  misc_feature: MA Experiment 108463 PARAMETER Experiment Name: At_Germinating_Seeds_cDNA_P Parameter: Tissue Value: Germinating Seeds
  misc_feature: MA Experiment ID: 108464 Result: Up-regulated in Transcription
  misc_feature: MA Experiment 108464 PARAMETER Experiment Name: At_Germinating_Seeds_cDNA_P Parameter: Age (day) Value: 4 vs. 0
  misc_feature: MA Experiment 108464 PARAMETER Experiment Name: At_Germinating_Seeds_cDNA_P Parameter: Tissue Value: Germinating Seeds
  misc_feature: MA Experiment ID: 108605 Result: Down-regulated in Transcription
  misc_feature: MA Experiment 108605 PARAMETER Experiment Name: At_100uM_ABA_cDNA_P Parameter: Timepoint (hr) Value: 6
  misc_feature: MA Experiment 108605 PARAMETER Experiment Name: At_100uM_ABA_cDNA_P Parameter: Tissue Value: Aerial
  misc_feature: MA Experiment 108605 PARAMETER Experiment Name: At_100uM_ABA_cDNA_P Parameter: Treatment Value: 100uM ABA vs. No Treatment
  misc_feature: MA Experiment ID: 108607 Result: Down-regulated in Transcription
  misc_feature: MA Experiment 108607 PARAMETER Experiment Name: At_100uM_ABA_cDNA_P Parameter: Timepoint (hr) Value: 4
  misc_feature: MA Experiment 108607 PARAMETER Experiment Name: At_100uM_ABA_cDNA_P Parameter: Tissue Value: Aerial
  misc_feature: MA Experiment 108607 PARAMETER Experiment Name: At_100uM_ABA_cDNA_P Parameter: Treatment Value: 100uM ABA vs. No Treatment
  misc_feature: MA Experiment ID: 20000071 Result: Down-regulated in Transcription
  misc_feature: MA Experiment 20000071 PARAMETER Experiment Name: At_100uM_ABA_Mutants_cDNA_P Parameter: Plant Line Value: CS8104
  misc_feature: MA Experiment 20000071 PARAMETER Experiment Name: At_100uM_ABA_Mutants_cDNA_P Parameter: Timepoint (hr) Value: 6
  misc_feature: MA Experiment 20000071 PARAMETER Experiment Name: At_100uM_ABA_Mutants_cDNA_P Parameter: Tissue Value: Aerial
  misc_feature: MA Experiment 20000071 PARAMETER Experiment Name: At_100uM_ABA_Mutants_cDNA_P Parameter: Treatment Value: 100uM ABA vs. No Treatment
  misc_feature: MA Experiment ID: 20000117 Result: Down-regulated in Transcription
  misc_feature: MA Experiment 20000117 PARAMETER Experiment Name: At_100uM_ABA_Mutants_cDNA_P Parameter: Plant Line Value: Columbia
  misc_feature: MA Experiment 20000117 PARAMETER Experiment Name: At_100uM_ABA_Mutants_cDNA_P Parameter: Timepoint (hr) Value: 6
  misc_feature: MA Experiment 20000117 PARAMETER Experiment Name: At_100uM_ABA_Mutants_cDNA_P Parameter: Tissue Value: Aerial
  misc_feature: MA Experiment 20000117 PARAMETER Experiment Name: At_100uM_ABA_Mutants_cDNA_P Parameter: Treatment Value: 100uM ABA vs. No Treatment
  misc_feature: MA Experiment ID: 20000169 Result: Down-regulated in Transcription
  misc_feature: MA Experiment 20000169 PARAMETER Experiment Name: At_100uM_ABA_P Parameter: Age (day) Value: 14
  misc_feature: MA Experiment 20000169 PARAMETER Experiment Name: At_100uM_ABA_P Parameter: Organism Value: A. thaliana
  misc_feature: MA Experiment 20000169 PARAMETER Experiment Name: At_100uM_ABA_P Parameter: Plant Line Value: WS
  misc_feature: MA Experiment 20000169 PARAMETER Experiment Name: At_100uM_ABA_P Parameter: Timepoint (hr) Value: 6
  misc_feature: MA Experiment 20000169 PARAMETER Experiment Name: At_100uM_ABA_P Parameter: Tissue Value: Aerial
  misc_feature: MA Experiment 20000169 PARAMETER Experiment Name: At_100uM_ABA_P Parameter: Treatment Value: 100uM ABA vs. No Treatment
  misc_feature: MA Experiment ID: 20000180 Result: Up-regulated in Transcription
  misc_feature: MA Experiment 20000180 PARAMETER Experiment Name: At_Germinating_Seeds_P Parameter: Age (hr) Value: 24 vs. 0
  misc_feature: MA Experiment 20000180 PARAMETER Experiment Name: At_Germinating_Seeds_P Parameter: Tissue Value: Germinating Seeds
  misc_feature: MA Experiment ID: 20000224 Result: Up-regulated in Transcription
  misc_feature: MA Experiment ID: 20000264 Result: Up-regulated in Transcription
  misc_feature: MA Experiment 20000264 PARAMETER Experiment Name: At_Open_Flower_P Parameter: Age (day) Value: 21
  misc_feature: MA Experiment 20000264 PARAMETER Experiment Name: At_Open_Flower_P Parameter: Plant Line Value: WS
  misc_feature: MA Experiment 20000264 PARAMETER Experiment Name: At_Open_Flower_P Parameter: Tissue Value: Open Flower vs. Whole Plant
  misc_feature: MA Experiment ID: 20000267 Result: Down-regulated in Transcription
  misc_feature: MA Experiment 20000267 PARAMETER Experiment Name: At_Drought_P Parameter: Age (day) Value: 7
  misc_feature: MA Experiment 20000267 PARAMETER Experiment Name: At_Drought_P Parameter: Organism Value: A. thaliana
  misc_feature: MA Experiment 20000267 PARAMETER Experiment Name: At_Drought_P Parameter: Plant Line Value: WS
  misc_feature: MA Experiment 20000267 PARAMETER Experiment Name: At_Drought_P Parameter: Timepoint (hr) Value: 6
  misc_feature: MA Experiment 20000267 PARAMETER Experiment Name: At_Drought_P Parameter: Tissue Value: Whole Plant
  misc_feature: MA Experiment 20000267 PARAMETER Experiment Name: At_Drought_P Parameter: Treatment Value: Drought vs. No Drought
  misc_feature: MA Experiment ID: 20000436 Result: Down-regulated in Transcription
  misc_feature: MA Experiment 20000436 PARAMETER Experiment Name: At_Drought_P Parameter: Age (day) Value: 7
  misc_feature: MA Experiment 20000436 PARAMETER Experiment Name: At_Drought_P Parameter: Organism Value: A. thaliana
  misc_feature: MA Experiment 20000436 PARAMETER Experiment Name: At_Drought_P Parameter: Plant Line Value: WS
  misc_feature: MA Experiment 20000436 PARAMETER Experiment Name: At_Drought_P Parameter: Timepoint (hr) Value: 12
  misc_feature: MA Experiment 20000436 PARAMETER Experiment Name: At_Drought_P Parameter: Tissue Value: Whole Plant
  misc_feature: MA Experiment 20000436 PARAMETER Experiment Name: At_Drought_P Parameter: Treatment Value: Drought vs. No Drought
  misc_feature: MA Experiment ID: 20000437 Result: Down-regulated in Transcription
  misc_feature: MA Experiment 20000437 PARAMETER Experiment Name: At_Drought_P Parameter: Age (day) Value: 8
  misc_feature: MA Experiment 20000437 PARAMETER Experiment Name: At_Drought_P Parameter: Organism Value: A. thaliana
  misc_feature: MA Experiment 20000437 PARAMETER Experiment Name: At_Drought_P Parameter: Plant Line Value: WS
  misc_feature: MA Experiment 20000437 PARAMETER Experiment Name: At_Drought_P Parameter: Timepoint (hr) Value: 24
  misc_feature: MA Experiment 20000437 PARAMETER Experiment Name: At_Drought_P Parameter: Tissue Value: Whole Plant
  misc_feature: MA Experiment 20000437 PARAMETER Experiment Name: At_Drought_P Parameter: Treatment Value: Drought vs. No Drought
  misc_feature: MA Experiment ID: 20000438 Result: Up-regulated in Transcription
  misc_feature: MA Experiment 20000438 PARAMETER Experiment Name: At_Shoots__P Parameter: Age (day) Value: 14
  misc_feature: MA Experiment 20000438 PARAMETER Experiment Name: At_Shoots__P Parameter: Tissue Value: Shoots vs. Whole Plant
  misc_feature: MA Experiment ID: 20000441 Result: Up-regulated in Transcription
  misc_feature: MA Experiment 20000441 PARAMETER Experiment Name: At_1uM_BR-BRZ__P Parameter: Tissue Value: Shoot Apices
  misc_feature: MA Experiment 20000441 PARAMETER Experiment Name: At_1uM_BR-BRZ__P Parameter: Treatment Value: 1uM BR vs. No Treatment
  misc_feature: MA Experiment ID: 20000443 Result: Up-regulated in Transcription
  misc_feature: MA Experiment 20000443 PARAMETER Experiment Name: At_1uM_BR-BRZ__P Parameter: Tissue Value: Shoot Apices
  misc_feature: MA Experiment 20000443 PARAMETER Experiment Name: At_1uM_BR-BRZ__P Parameter: Treatment Value: 1uM BRZ vs. No Treatment
  misc_feature: MA Experiment ID: 20000496 Result: Down-regulated in Transcription
  misc_feature: MA Experiment 20000496 PARAMETER Experiment Name: At_Guard_Cells_P Parameter: Harvest Date Value: 7/19/2002
  misc_feature: MA Experiment 20000496 PARAMETER Experiment Name: At_Guard_Cells_P Parameter: Organism Value: Canola
  misc_feature: MA Experiment 20000496 PARAMETER Experiment Name: At_Guard_Cells_P Parameter: Tissue Value: Guard Cells vs. Leaves
  misc_feature: MA Experiment ID: 20000794 Result: Up-regulated in Transcription
  misc_feature: MA Experiment 20000794 PARAMETER Experiment Name: At_Petals_P Parameter: Age (day) Value: 23-25 days
  misc_feature: MA Experiment 20000794 PARAMETER Experiment Name: At_Petals_P Parameter: Plant Line Value: WS
  misc_feature: MA Experiment 20000794 PARAMETER Experiment Name: At_Petals_P Parameter: Tissue Value: Petals vs. Whole plant
  misc_feature: MA Experiment ID: 20001451 Result: Down-regulated in Transcription
  misc_feature: MA Experiment 20001451 PARAMETER Experiment Name: At_Far-red-induction_P Parameter: Age (day) Value: 7
  misc_feature: MA Experiment 20001451 PARAMETER Experiment Name: At_Far-red-induction_P Parameter: Light Value: Far-red vs. White
  misc_feature: MA Experiment 20001451 PARAMETER Experiment Name: At_Far-red-induction_P Parameter: Organism Value: A. thaliana
  misc_feature: MA Experiment 20001451 PARAMETER Experiment Name: At_Far-red-induction_P Parameter: Plant Line Value: Columbia
  misc_feature: MA Experiment 20001451 PARAMETER Experiment Name: At_Far-red-induction_P Parameter: Timepoint (hr) Value: 24
  misc_feature: MA Experiment 20001451 PARAMETER Experiment Name: At_Far-red-induction_P Parameter: Tissue Value: Whole Plant
  misc_feature: MA Experiment ID: 20001554 Result: Down-regulated in Transcription
  misc_feature: MA Experiment 20001554 PARAMETER Experiment Name: At_Drought_Soil_Dry_P Parameter: Age (day) Value: 21
  misc_feature: MA Experiment 20001554 PARAMETER Experiment Name: At_Drought_Soil_Dry_P Parameter: Organism Value: A. thaliana
  misc_feature: MA Experiment 20001554 PARAMETER Experiment Name: At_Drought_Soil_Dry_P Parameter: Plant Line Value: WS
  misc_feature: MA Experiment 20001554 PARAMETER Experiment Name: At_Drought_Soil_Dry_P Parameter: Post Timepoint (hr) Value: None
  misc_feature: MA Experiment 20001554 PARAMETER Experiment Name: At_Drought_Soil_Dry_P Parameter: Post-Treatment Value: None
  misc_feature: MA Experiment 20001554 PARAMETER Experiment Name: At_Drought_Soil_Dry_P Parameter: Timepoint (day) Value: 7
  misc_feature: MA Experiment 20001554 PARAMETER Experiment Name: At_Drought_Soil_Dry_P Parameter: Treatment Value: Drought vs. No Drought
  misc_feature: MA Experiment ID: 20001555 Result: Down-regulated in Transcription
  misc_feature: MA Experiment 20001555 PARAMETER Experiment Name: At_Drought_Soil_Dry_P Parameter: Age (day) Value: 24
  misc_feature: MA Experiment 20001555 PARAMETER Experiment Name: At_Drought_Soil_Dry_P Parameter: Organism Value: A. thaliana
  misc_feature: MA Experiment 20001555 PARAMETER Experiment Name: At_Drought_Soil_Dry_P Parameter: Plant Line Value: WS
  misc_feature: MA Experiment 20001555 PARAMETER Experiment Name: At_Drought_Soil_Dry_P Parameter: Post Timepoint (hr) Value: None
  misc_feature: MA Experiment 20001555 PARAMETER Experiment Name: At_Drought_Soil_Dry_P Parameter: Post-Treatment Value: None
  misc_feature: MA Experiment 20001555 PARAMETER Experiment Name: At_Drought_Soil_Dry_P Parameter: Timepoint (day) Value: 10
  misc_feature: MA Experiment 20001555 PARAMETER Experiment Name: At_Drought_Soil_Dry_P Parameter: Treatment Value: Drought vs. No Drought
  misc_feature: MA Experiment ID: 20001556 Result: Down-regulated in Transcription
  misc_feature: MA Experiment 20001556 PARAMETER Experiment Name: At_Drought_Soil_Dry_P Parameter: Age (day) Value: 26
  misc_feature: MA Experiment 20001556 PARAMETER Experiment Name: At_Drought_Soil_Dry_P Parameter: Organism Value: A. thaliana
  misc_feature: MA Experiment 20001556 PARAMETER Experiment Name: At_Drought_Soil_Dry_P Parameter: Plant Line Value: WS
  misc_feature: MA Experiment 20001556 PARAMETER Experiment Name: At_Drought_Soil_Dry_P Parameter: Post Timepoint (hr) Value: None
  misc_feature: MA Experiment 20001556 PARAMETER Experiment Name: At_Drought_Soil_Dry_P Parameter: Post-Treatment Value: None
  misc_feature: MA Experiment 20001556 PARAMETER Experiment Name: At_Drought_Soil_Dry_P Parameter: Timepoint (day) Value: 12
  misc_feature: MA Experiment 20001556 PARAMETER Experiment Name: At_Drought_Soil_Dry_P Parameter: Treatment Value: Drought vs. No Drought
  misc_feature: MA Experiment ID: 20001559 Result: Down-regulated in Transcription
  misc_feature: MA Experiment 20001559 PARAMETER Experiment Name: At_Drought_Soil_Dry_P Parameter: Age (day) Value: 28
  misc_feature: MA Experiment 20001559 PARAMETER Experiment Name: At_Drought_Soil_Dry_P Parameter: Organism Value: A. thaliana
  misc_feature: MA Experiment 20001559 PARAMETER Experiment Name: At_Drought_Soil_Dry_P Parameter: Plant Line Value: WS
  misc_feature: MA Experiment 20001559 PARAMETER Experiment Name: At_Drought_Soil_Dry_P Parameter: Post Timepoint (hr) Value: 29
  misc_feature: MA Experiment 20001559 PARAMETER Experiment Name: At_Drought_Soil_Dry_P Parameter: Post-Treatment Value: Re-Water vs. No Drought
  misc_feature: MA Experiment 20001559 PARAMETER Experiment Name: At_Drought_Soil_Dry_P Parameter: Timepoint (day) Value: 14
  misc_feature: MA Experiment 20001559 PARAMETER Experiment Name: At_Drought_Soil_Dry_P Parameter: Treatment Value: Drought vs. No Drought
  misc_feature: MA Experiment ID: 20001771 Result: Up-regulated in Transcription
  misc_feature: MA Experiment 20001771 PARAMETER Experiment Name: At_Far-red-enriched-adult_P Parameter: Age (day) Value: 28
  misc_feature: MA Experiment 20001771 PARAMETER Experiment Name: At_Far-red-enriched-adult_P Parameter: Light Value: Far-red enriched vs. White
  misc_feature: MA Experiment 20001771 PARAMETER Experiment Name: At_Far-red-enriched-adult_P Parameter: Organism Value: A. thaliana
  misc_feature: MA Experiment 20001771 PARAMETER Experiment Name: At_Far-red-enriched-adult_P Parameter: Plant Line Value: Columbia
  misc_feature: MA Experiment 20001771 PARAMETER Experiment Name: At_Far-red-enriched-adult_P Parameter: Timepoint (hr) Value: 16
  misc_feature: MA Experiment 20001771 PARAMETER Experiment Name: At_Far-red-enriched-adult_P Parameter: Tissue Value: Aerial
  misc_feature: MA Experiment ID: 20001905 Result: Up-regulated in Transcription
  misc_feature: MA Experiment 20001905 PARAMETER Experiment Name: At_Drought_Reproduction_P Parameter: Age (day) Value: 40
  misc_feature: MA Experiment 20001905 PARAMETER Experiment Name: At_Drought_Reproduction_P Parameter: Organism Value: A. thaliana
  misc_feature: MA Experiment 20001905 PARAMETER Experiment Name: At_Drought_Reproduction_P Parameter: Plant Line Value: WS
  misc_feature: MA Experiment 20001905 PARAMETER Experiment Name: At_Drought_Reproduction_P Parameter: Timepoint (day) Value: 10
  misc_feature: MA Experiment 20001905 PARAMETER Experiment Name: At_Drought_Reproduction_P Parameter: Tissue Value: Rosettes
  misc_feature: MA Experiment 20001905 PARAMETER Experiment Name: At_Drought_Reproduction_P Parameter: Treatment Value: Drought vs. No Drought
  misc_feature: MA Experiment ID: 20001911 Result: Down-regulated in Transcription
  misc_feature: MA Experiment 20001911 PARAMETER Experiment Name: At_Drought_Reproduction_P Parameter: Age (day) Value: 40
  misc_feature: MA Experiment 20001911 PARAMETER Experiment Name: At_Drought_Reproduction_P Parameter: Organism Value: A. thaliana
  misc_feature: MA Experiment 20001911 PARAMETER Experiment Name: At_Drought_Reproduction_P Parameter: Plant Line Value: WS
  misc_feature: MA Experiment 20001911 PARAMETER Experiment Name: At_Drought_Reproduction_P Parameter: Timepoint (day) Value: 10
  misc_feature: MA Experiment 20001911 PARAMETER Experiment Name: At_Drought_Reproduction_P Parameter: Tissue Value: Flowers
  misc_feature: MA Experiment 20001911 PARAMETER Experiment Name: At_Drought_Reproduction_P Parameter: Treatment Value: Drought vs. No Drought
atggagaagaacatgaagtttccagtagtagacttgtccaagctcaatggggaagagagagaccaaaccatggctctaatcaatgaagcttgtgagaattggggcttctttgagatagtgaaccatggattaccacatgacttaatggacaagatcgagaagatgacaaaggaccattacaagacatgccaagaacaaaagttcaatgacatgctcaagtccaaaggtttggataatcttgagacagaagtcgaagatgtcgattgggaaagcactttctacgttcgtcacctccctcaatccaatctcaatgacatttcagatgtgtctgatgaatacaggacggccatgaaagactttggtaagagactggagaatcttgctgaggatttgttggatctactgtgtgagaatctagggttagagaaagggtatttgaagaaagtgtttcatggaacaaaaggcccaacctttgggacaaaggtgagcaattatccaccatgtcctaaaccagagatgatcaaaggtcttagggcccacactgatgcaggaggcatcatcttgttgtttcaagacgacaaggtcagtggtctccagcttcttaaagatggtgactggattgatgttcctcctctcaaccactctattgtcatcaatcttggtgaccaacttgaggtgataaccaacgggaagtataagagtgtgctgcaccgtgtggtgactcaacaagaaggaaacaggatgtcggttgcatcgttttacaacccgggaagcgatgcggagatctcaccagctacttcgcttgtcgagaaagattccgagtacccgagtttcgtctttgatgactacatgaagctttatgcaggggtcaagtttcagcccaaggagccacggttcgcagcaatgaagaatgcttctgcagttacagaactgaatcctacagcagccgtagagactttctaaaaatggatttgagattcaagtgaagcagagaaagaaagatgagtttgtgttgtgtgttatggcaataagttaaaacttgtattagtgttgattaattgttggtcaattggtgtgttttaaagtgtggggtgtttatgtttatggaagatgataataattataaaaatctaaattctaag

SEQ ID NO: 85914 - protein, 320 aa, Arabidopsis thaliana; identical to SEQ ID NO: 21706
  peptide (1)..(320): Ceres Seq. ID no. 12684489
  misc_feature (156)..(256): Pfam Name: 2OG-Fe(II) oxygenase superfamily Pfam Description: 2OG-Fe(II) oxygenase superfamily
  misc_feature (1)..(320): Homolog of NCBI NO: 15220770 NR Description: ACC oxidase, putative; protein id: At1g62380.1, by cDNA: gi_15028038, supported by cDNA: gi_17065217, supported
  misc_feature (1)..(320): Homolog of NCBI NO: 25285704 NR Description: 1-aminocyclopropane-1-carboxylate oxidase (EC
  misc_feature (1)..(320): Homolog of NCBI NO: 587086 NR Description: ACC oxidase [Brassica oleracea]
  misc_feature (1)..(320): Homolog of NCBI NO: 728780 NR Description: 1-aminocyclopropane-1-carboxylate oxidase (ACC
  misc_feature (1)..(320): Homolog of NCBI NO: 7638440 NR Description: 1-aminocyclopropane-1-carboxylate oxidase
  misc_feature (1)..(320): Homolog of NCBI NO: 7433206 NR Description: probable 1-aminocyclopropane-1-carboxylate
  misc_feature (1)..(320): Homolog of NCBI NO: 15221170 NR Description: putative amino-cyclopropane-carboxylic acid (ACC oxidase); protein id: At1g12010.1, supported by cDNA: supported by cDNA: gi_17386121 [Arabidopsis thaliana]
  misc_feature (1)..(320): Homolog of NCBI NO: 7433194 NR Description: probable 1-aminocyclopropane-1-carboxylate
  misc_feature (1)..(320): Homolog of NCBI NO: 14148975 NR Description: ACC oxidase [Brassica rapa subsp. rapa]
  misc_feature (7)..(315): Homolog of NCBI NO: 18496053 NR Description: ACC oxidase 1 [Fagus sylvatica]

SEQ ID NO: 85915 - protein, 316 aa, Arabidopsis thaliana; identical to SEQ ID NO: 21707
  peptide (1)..(316): Ceres Seq. ID no. 12684490
  misc_feature (152)..(252): Pfam Name: 2OG-Fe(II) oxygenase superfamily Pfam Description: 2OG-Fe(II) oxygenase superfamily
  misc_feature (1)..(316): Homolog of NCBI NO: 15220770 NR Description: ACC oxidase, putative; protein id: At1g62380.1, by cDNA: gi_15028038, supported by cDNA: gi_17065217, supported
  misc_feature (1)..(316): Homolog of NCBI NO: 25285704 NR Description: 1-aminocyclopropane-1-carboxylate oxidase (EC
  misc_feature (1)..(316): Homolog of NCBI NO: 587086 NR Description: ACC oxidase [Brassica oleracea]
  misc_feature (1)..(316): Homolog of NCBI NO: 728780 NR Description: 1-aminocyclopropane-1-carboxylate oxidase (ACC
  misc_feature (1)..(316): Homolog of NCBI NO: 7638440 NR Description: 1-aminocyclopropane-1-carboxylate oxidase
  misc_feature (1)..(316): Homolog of NCBI NO: 7433206 NR Description: probable 1-aminocyclopropane-1-carboxylate
  misc_feature (1)..(316): Homolog of NCBI NO: 15221170 NR Description: putative amino-cyclopropane-carboxylic acid (ACC oxidase); protein id: At1g12010.1, supported by cDNA: supported by cDNA: gi_17386121 [Arabidopsis thaliana]
  misc_feature (1)..(316): Homolog of NCBI NO: 7433194 NR Description: probable 1-aminocyclopropane-1-carboxylate
  misc_feature (1)..(316): Homolog of NCBI NO: 14148975 NR Description: ACC oxidase [Brassica rapa subsp. rapa]
  misc_feature (3)..(311): Homolog of NCBI NO: 18496053 NR Description: ACC oxidase 1 [Fagus sylvatica]

SEQ ID NO: 85916 - protein, 297 aa, Arabidopsis thaliana; identical to SEQ ID NO: 21708
  peptide (1)..(297): Ceres Seq. ID no. 12684491
  misc_feature (133)..(233): Pfam Name: 2OG-Fe(II) oxygenase superfamily Pfam Description: 2OG-Fe(II) oxygenase superfamily
  misc_feature (1)..(297): Homolog of NCBI NO: 15220770 NR Description: ACC oxidase, putative; protein id: At1g62380.1, by cDNA: gi_15028038, supported by cDNA: gi_17065217, supported
  misc_feature (1)..(297): Homolog of NCBI NO: 25285704 NR Description: 1-aminocyclopropane-1-carboxylate oxidase (EC
  misc_feature (1)..(297): Homolog of NCBI NO: 587086 NR Description: ACC oxidase [Brassica oleracea]
  misc_feature (1)..(297): Homolog of NCBI NO: 728780 NR Description: 1-aminocyclopropane-1-carboxylate oxidase (ACC
  misc_feature (1)..(297): Homolog of NCBI NO: 7638440 NR Description: 1-aminocyclopropane-1-carboxylate oxidase
  misc_feature (1)..(297): Homolog of NCBI NO: 7433206 NR Description: probable 1-aminocyclopropane-1-carboxylate
  misc_feature (1)..(297): Homolog of NCBI NO: 15221170 NR Description: putative amino-cyclopropane-carboxylic acid (ACC oxidase); protein id: At1g12010.1, supported by cDNA: supported by cDNA: gi_17386121 [Arabidopsis thaliana]
  misc_feature (1)..(297): Homolog of NCBI NO: 7433194 NR Description: probable 1-aminocyclopropane-1-carboxylate
  misc_feature (1)..(297): Homolog of NCBI NO: 14148975 NR Description: ACC oxidase [Brassica rapa subsp. rapa]
  misc_feature (1)..(292): Homolog of NCBI NO: 18496053 NR Description: ACC oxidase 1 [Fagus sylvatica]

SEQ ID NO: 85917 - DNA, 1632 bp, Arabidopsis thaliana
  misc_feature (1)..(1632): Ceres Seq. ID no. 12684549
  misc_feature: MA Experiment ID: 20000180 Result: Down-regulated in Transcription
  misc_feature: MA Experiment 20000180 PARAMETER Experiment Name: At_Germinating_Seeds_P Parameter: Age (hr) Value: 24 vs. 0
  misc_feature: MA Experiment 20000180 PARAMETER Experiment Name: At_Germinating_Seeds_P Parameter: Tissue Value: Germinating Seeds
  misc_feature: MA Experiment ID: 20000184 Result: Up-regulated in Transcription
  misc_feature: MA Experiment 20000184 PARAMETER Experiment Name: At_Shoots__P Parameter: Age (day) Value: 7
  misc_feature: MA Experiment 20000184 PARAMETER Experiment Name: At_Shoots__P Parameter: Tissue Value: Shoots vs. Whole Plant
  misc_feature: MA Experiment ID: 20000185 Result: Up-regulated in Transcription
  misc_feature: MA Experiment 20000185 PARAMETER Experiment Name: At_Roots__P Parameter: Age (day) Value: 7 vs. 21
  misc_feature: MA Experiment 20000185 PARAMETER Experiment Name: At_Roots__P Parameter: Organism Value: A. thaliana
  misc_feature: MA Experiment 20000185 PARAMETER Experiment Name: At_Roots__P Parameter: Tissue Value: Roots vs. Whole Plant
  misc_feature: MA Experiment ID: 20000264 Result: Up-regulated in Transcription
  misc_feature: MA Experiment 20000264 PARAMETER Experiment Name: At_Open_Flower_P Parameter: Age (day) Value: 21
  misc_feature: MA Experiment 20000264 PARAMETER Experiment Name: At_Open_Flower_P Parameter: Plant Line Value: WS
  misc_feature: MA Experiment 20000264 PARAMETER Experiment Name: At_Open_Flower_P Parameter: Tissue Value: Open Flower vs. Whole Plant
  misc_feature: MA Experiment ID: 20000286 Result: Up-regulated in Transcription
  misc_feature: MA Experiment 20000286 PARAMETER Experiment Name: At_Open_Flower_P Parameter: Age (day) Value: 21
  misc_feature: MA Experiment 20000286 PARAMETER Experiment Name: At_Open_Flower_P Parameter: Plant Line Value: WS
  misc_feature: MA Experiment 20000286 PARAMETER Experiment Name: At_Open_Flower_P Parameter: Tissue Value: Half Open vs. Whole Plant
  misc_feature: MA Experiment ID: 20000308 Result: Up-regulated in Transcription
  misc_feature: MA Experiment 20000308 PARAMETER Experiment Name: At_100mM_NaCl__P Parameter: Age (day) Value: 17
  misc_feature: MA Experiment 20000308 PARAMETER Experiment Name: At_100mM_NaCl__P Parameter: Organism Value: A. thaliana
  misc_feature: MA Experiment 20000308 PARAMETER Experiment Name: At_100mM_NaCl__P Parameter: Plant Line Value: WS
  misc_feature: MA Experiment 20000308 PARAMETER Experiment Name: At_100mM_NaCl__P Parameter: Timepoint (hr) Value: 72
  misc_feature: MA Experiment 20000308 PARAMETER Experiment Name: At_100mM_NaCl__P Parameter: Tissue Value: Whole Plant
  misc_feature: MA Experiment 20000308 PARAMETER Experiment Name: At_100mM_NaCl__P Parameter: Treatment Value: 100mM NaCl vs. No Treatment
  misc_feature: MA Experiment ID: 20000436 Result: Up-regulated in Transcription
  misc_feature: MA Experiment 20000436 PARAMETER Experiment Name: At_Drought_P Parameter: Age (day) Value: 7
  misc_feature: MA Experiment 20000436 PARAMETER Experiment Name: At_Drought_P Parameter: Organism Value: A. thaliana
  misc_feature: MA Experiment 20000436 PARAMETER Experiment Name: At_Drought_P Parameter: Plant Line Value: WS
  misc_feature: MA Experiment 20000436 PARAMETER Experiment Name: At_Drought_P Parameter: Timepoint (hr) Value: 12
  misc_feature: MA Experiment 20000436 PARAMETER Experiment Name: At_Drought_P Parameter: Tissue Value: Whole Plant
  misc_feature: MA Experiment 20000436 PARAMETER Experiment Name: At_Drought_P Parameter: Treatment Value: Drought vs. No Drought
  misc_feature: MA Experiment ID: 20000437 Result: Up-regulated in Transcription
  misc_feature: MA Experiment 20000437 PARAMETER Experiment Name: At_Drought_P Parameter: Age (day) Value: 8
  misc_feature: MA Experiment 20000437 PARAMETER Experiment Name: At_Drought_P Parameter: Organism Value: A. thaliana
  misc_feature: MA Experiment 20000437 PARAMETER Experiment Name: At_Drought_P Parameter: Plant Line Value: WS
  misc_feature: MA Experiment 20000437 PARAMETER Experiment Name: At_Drought_P Parameter: Timepoint (hr) Value: 24
  misc_feature: MA Experiment 20000437 PARAMETER Experiment Name: At_Drought_P Parameter: Tissue Value: Whole Plant
  misc_feature: MA Experiment 20000437 PARAMETER Experiment Name: At_Drought_P Parameter: Treatment Value: Drought vs. No Drought
  misc_feature: MA Experiment ID: 20000438 Result: Up-regulated in Transcription
  misc_feature: MA Experiment 20000438 PARAMETER Experiment Name: At_Shoots__P Parameter: Age (day) Value: 14
  misc_feature: MA Experiment 20000438 PARAMETER Experiment Name: At_Shoots__P Parameter: Tissue Value: Shoots vs. Whole Plant
  misc_feature: MA Experiment ID: 20000439 Result: Up-regulated in Transcription
  misc_feature: MA Experiment 20000439 PARAMETER Experiment Name: At_Roots__P Parameter: Age (day) Value: 14 vs. 21
  misc_feature: MA Experiment 20000439 PARAMETER Experiment Name: At_Roots__P Parameter: Organism Value: A. thaliana
  misc_feature: MA Experiment 20000439 PARAMETER Experiment Name: At_Roots__P Parameter: Tissue Value: Roots vs. Whole Plant
  misc_feature: MA Experiment ID: 20000451 Result: Up-regulated in Transcription
  misc_feature: MA Experiment 20000451 PARAMETER Experiment Name: At_CS6879_Shoots-Roots_P Parameter: Age (day) Value: 14
  misc_feature: MA Experiment 20000451 PARAMETER Experiment Name: At_CS6879_Shoots-Roots_P Parameter: Organism Value: A. thaliana
  misc_feature: MA Experiment 20000451 PARAMETER Experiment Name: At_CS6879_Shoots-Roots_P Parameter: Plant Line Value: CS6879 vs. WS
  misc_feature: MA Experiment 20000451 PARAMETER Experiment Name: At_CS6879_Shoots-Roots_P Parameter: Tissue Value: Roots
  misc_feature: MA Experiment ID: 20000456 Result: Up-regulated in Transcription
  misc_feature: MA Experiment 20000456 PARAMETER Experiment Name: At_100uM_BA_P Parameter: Age (day) Value: 14
  misc_feature: MA Experiment 20000456 PARAMETER Experiment Name: At_100uM_BA_P Parameter: Organism Value: A. thaliana
  misc_feature: MA Experiment 20000456 PARAMETER Experiment Name: At_100uM_BA_P Parameter: Plant Line Value: WS
  misc_feature: MA Experiment 20000456 PARAMETER Experiment Name: At_100uM_BA_P Parameter: Timepoint (hr) Value: 6
  misc_feature: MA Experiment 20000456 PARAMETER Experiment Name: At_100uM_BA_P Parameter: Tissue Value: Aerial
  misc_feature: MA Experiment 20000456 PARAMETER Experiment Name: At_100uM_BA_P Parameter: Treatment Value: 100uM BA vs. No Treatment
  misc_feature: MA Experiment ID: 20000794 Result: Up-regulated in Transcription
  misc_feature: MA Experiment 20000794 PARAMETER Experiment Name: At_Petals_P Parameter: Age (day) Value: 23-25 days
  misc_feature: MA Experiment 20000794 PARAMETER Experiment Name: At_Petals_P Parameter: Plant Line Value: WS
  misc_feature: MA Experiment 20000794 PARAMETER Experiment Name: At_Petals_P Parameter: Tissue Value: Petals vs. Whole plant
  misc_feature: MA Experiment ID: 20001248 Result: Down-regulated in Transcription
  misc_feature: MA Experiment 20001248 PARAMETER Experiment Name: At_Far-red-induction_P Parameter: Age (day) Value: 7
  misc_feature: MA Experiment 20001248 PARAMETER Experiment Name: At_Far-red-induction_P Parameter: Light Value: Far-red vs. White
  misc_feature: MA Experiment 20001248 PARAMETER Experiment Name: At_Far-red-induction_P Parameter: Organism Value: A. thaliana
  misc_feature: MA Experiment 20001248 PARAMETER Experiment Name: At_Far-red-induction_P Parameter: Plant Line Value: Columbia
  misc_feature: MA Experiment 20001248 PARAMETER Experiment Name: At_Far-red-induction_P Parameter: Timepoint (hr) Value: 4
  misc_feature: MA Experiment 20001248 PARAMETER Experiment Name: At_Far-red-induction_P Parameter: Tissue Value: Whole Plant
  misc_feature: MA Experiment ID: 20001554 Result: Up-regulated in Transcription
  misc_feature: MA Experiment 20001554 PARAMETER Experiment Name: At_Drought_Soil_Dry_P Parameter: Age (day) Value: 21
  misc_feature: MA Experiment 20001554 PARAMETER Experiment Name: At_Drought_Soil_Dry_P Parameter: Organism Value: A. thaliana
  misc_feature: MA Experiment 20001554 PARAMETER Experiment Name: At_Drought_Soil_Dry_P Parameter: Plant Line Value: WS
  misc_feature: MA Experiment 20001554 PARAMETER Experiment Name: At_Drought_Soil_Dry_P Parameter: Post Timepoint (hr) Value: None
  misc_feature: MA Experiment 20001554 PARAMETER Experiment Name: At_Drought_Soil_Dry_P Parameter: Post-Treatment Value: None
  misc_feature: MA Experiment 20001554 PARAMETER Experiment Name: At_Drought_Soil_Dry_P Parameter: Timepoint (day) Value: 7
  misc_feature: MA Experiment 20001554 PARAMETER Experiment Name: At_Drought_Soil_Dry_P Parameter: Treatment Value: Drought vs. No Drought
  misc_feature: MA Experiment ID: 20001555 Result: Up-regulated in Transcription
  misc_feature: MA Experiment 20001555 PARAMETER Experiment Name: At_Drought_Soil_Dry_P Parameter: Age (day) Value: 24
  misc_feature: MA Experiment 20001555 PARAMETER Experiment Name: At_Drought_Soil_Dry_P Parameter: Organism Value: A. thaliana
  misc_feature: MA Experiment 20001555 PARAMETER Experiment Name: At_Drought_Soil_Dry_P Parameter: Plant Line Value: WS
  misc_feature: MA Experiment 20001555 PARAMETER Experiment Name: At_Drought_Soil_Dry_P Parameter: Post Timepoint (hr) Value: None
  misc_feature: MA Experiment 20001555 PARAMETER Experiment Name: At_Drought_Soil_Dry_P Parameter: Post-Treatment Value: None
  misc_feature: MA Experiment 20001555 PARAMETER Experiment Name: At_Drought_Soil_Dry_P Parameter: Timepoint (day) Value: 10
  misc_feature: MA Experiment 20001555 PARAMETER Experiment Name: At_Drought_Soil_Dry_P Parameter: Treatment Value: Drought vs. No Drought
  misc_feature: MA Experiment ID: 20001556 Result: Up-regulated in Transcription
  misc_feature: MA Experiment 20001556 PARAMETER Experiment Name: At_Drought_Soil_Dry_P Parameter: Age (day) Value: 26
  misc_feature: MA Experiment 20001556 PARAMETER Experiment Name: At_Drought_Soil_Dry_P Parameter: Organism Value: A. thaliana
  misc_feature: MA Experiment 20001556 PARAMETER Experiment Name: At_Drought_Soil_Dry_P Parameter: Plant Line Value: WS
  misc_feature: MA Experiment 20001556 PARAMETER Experiment Name: At_Drought_Soil_Dry_P Parameter: Post Timepoint (hr) Value: None
  misc_feature: MA Experiment 20001556 PARAMETER Experiment Name: At_Drought_Soil_Dry_P Parameter: Post-Treatment Value: None
  misc_feature: MA Experiment 20001556 PARAMETER Experiment Name: At_Drought_Soil_Dry_P Parameter: Timepoint (day) Value: 12
  misc_feature: MA Experiment 20001556 PARAMETER Experiment Name: At_Drought_Soil_Dry_P Parameter: Treatment Value: Drought vs. No Drought
  misc_feature: MA Experiment ID: 20001557 Result: Up-regulated in Transcription
  misc_feature: MA Experiment 20001557 PARAMETER Experiment Name: At_Drought_Soil_Dry_P Parameter: Age (day) Value: 27
  misc_feature: MA Experiment 20001557 PARAMETER Experiment Name: At_Drought_Soil_Dry_P Parameter: Organism Value: A. thaliana
  misc_feature: MA Experiment 20001557 PARAMETER Experiment Name: At_Drought_Soil_Dry_P Parameter: Plant Line Value: WS
  misc_feature: MA Experiment 20001557 PARAMETER Experiment Name: At_Drought_Soil_Dry_P Parameter: Post Timepoint (hr) Value: 3
  misc_feature: MA Experiment 20001557 PARAMETER Experiment Name: At_Drought_Soil_Dry_P Parameter: Post-Treatment Value: Re-Water vs. No Drought
  misc_feature: MA Experiment 20001557 PARAMETER Experiment Name: At_Drought_Soil_Dry_P Parameter: Timepoint (day) Value: 13
  misc_feature: MA Experiment 20001557 PARAMETER Experiment Name: At_Drought_Soil_Dry_P Parameter: Treatment Value: Drought vs. No Drought
  misc_feature: MA Experiment ID: 20001771 Result: Up-regulated in Transcription
  misc_feature: MA Experiment 20001771 PARAMETER Experiment Name: At_Far-red-enriched-adult_P Parameter: Age (day) Value: 28
  misc_feature: MA Experiment 20001771 PARAMETER Experiment Name: At_Far-red-enriched-adult_P Parameter: Light Value: Far-red enriched vs. White
  misc_feature: MA Experiment 20001771 PARAMETER Experiment Name: At_Far-red-enriched-adult_P Parameter: Organism Value: A. thaliana
  misc_feature: MA Experiment 20001771 PARAMETER Experiment Name: At_Far-red-enriched-adult_P Parameter: Plant Line Value: Columbia
  misc_feature: MA Experiment 20001771 PARAMETER Experiment Name: At_Far-red-enriched-adult_P Parameter: Timepoint (hr) Value: 16
  misc_feature: MA Experiment 20001771 PARAMETER Experiment Name: At_Far-red-enriched-adult_P Parameter: Tissue Value: Aerial
  misc_feature: MA Experiment ID: 20001904 Result: Up-regulated in Transcription
  misc_feature: MA Experiment 20001904 PARAMETER Experiment Name: At_Drought_Reproduction_P Parameter: Age (day) Value: 37
  misc_feature: MA Experiment 20001904 PARAMETER Experiment Name: At_Drought_Reproduction_P Parameter: Organism Value: A. thaliana
  misc_feature: MA Experiment 20001904 PARAMETER Experiment Name: At_Drought_Reproduction_P Parameter: Plant Line Value: WS
  misc_feature: MA Experiment 20001904 PARAMETER Experiment Name: At_Drought_Reproduction_P Parameter: Timepoint (day) Value: 7
  misc_feature: MA Experiment 20001904 PARAMETER Experiment Name: At_Drought_Reproduction_P Parameter: Tissue Value: Rosettes
  misc_feature: MA Experiment 20001904 PARAMETER Experiment Name: At_Drought_Reproduction_P Parameter: Treatment Value: Drought vs. No Drought
  misc_feature: MA Experiment ID: 20001905 Result: Up-regulated in Transcription
  misc_feature: MA Experiment 20001905 PARAMETER Experiment Name: At_Drought_Reproduction_P Parameter: Age (day) Value: 40
  misc_feature: MA Experiment 20001905 PARAMETER Experiment Name: At_Drought_Reproduction_P Parameter: Organism Value: A. thaliana
  misc_feature: MA Experiment 20001905 PARAMETER Experiment Name: At_Drought_Reproduction_P Parameter: Plant Line Value: WS
  misc_feature: MA Experiment 20001905 PARAMETER Experiment Name: At_Drought_Reproduction_P Parameter: Timepoint (day) Value: 10
  misc_feature: MA Experiment 20001905 PARAMETER Experiment Name: At_Drought_Reproduction_P Parameter: Tissue Value: Rosettes
  misc_feature: MA Experiment 20001905 PARAMETER Experiment Name: At_Drought_Reproduction_P Parameter: Treatment Value: Drought vs. No Drought
  misc_feature: MA Experiment ID: 20001906 Result: Up-regulated in Transcription
  misc_feature: MA Experiment 20001906 PARAMETER Experiment Name: At_Drought_Reproduction_P Parameter: Age (day) Value: 35
  misc_feature: MA Experiment 20001906 PARAMETER Experiment Name: At_Drought_Reproduction_P Parameter: Organism Value: A. thaliana
  misc_feature: MA Experiment 20001906 PARAMETER Experiment Name: At_Drought_Reproduction_P Parameter: Plant Line Value: WS
  misc_feature: MA Experiment 20001906 PARAMETER Experiment Name: At_Drought_Reproduction_P Parameter: Timepoint (day) Value: 5
  misc_feature: MA Experiment 20001906 PARAMETER Experiment Name: At_Drought_Reproduction_P Parameter: Tissue Value: Siliques
  misc_feature: MA Experiment 20001906 PARAMETER Experiment Name: At_Drought_Reproduction_P Parameter: Treatment Value: Drought vs. No Drought
  misc_feature: MA Experiment ID: 20001907 Result: Up-regulated in Transcription
  misc_feature: MA Experiment 20001907 PARAMETER Experiment Name: At_Drought_Reproduction_P Parameter: Age (day) Value: 37
  misc_feature: MA Experiment 20001907 PARAMETER Experiment Name: At_Drought_Reproduction_P Parameter: Organism Value: A. thaliana
  misc_feature: MA Experiment 20001907 PARAMETER Experiment Name: At_Drought_Reproduction_P Parameter: Plant Line Value: WS
  misc_feature: MA Experiment 20001907 PARAMETER Experiment Name: At_Drought_Reproduction_P Parameter: Timepoint (day) Value: 7
  misc_feature: MA Experiment 20001907 PARAMETER Experiment Name: At_Drought_Reproduction_P Parameter: Tissue Value: Siliques
  misc_feature: MA Experiment 20001907 PARAMETER Experiment Name: At_Drought_Reproduction_P Parameter: Treatment Value: Drought vs. No Drought
  misc_feature: MA Experiment ID: 20001908 Result: Up-regulated in Transcription
  misc_feature: MA Experiment 20001908 PARAMETER Experiment Name: At_Drought_Reproduction_P Parameter: Age (day) Value: 40
  misc_feature: MA Experiment 20001908 PARAMETER Experiment Name: At_Drought_Reproduction_P Parameter: Organism Value: A. thaliana
  misc_feature: MA Experiment 20001908 PARAMETER Experiment Name: At_Drought_Reproduction_P Parameter: Plant Line Value: WS
  misc_feature: MA Experiment 20001908 PARAMETER Experiment Name: At_Drought_Reproduction_P Parameter: Timepoint (day) Value: 10
  misc_feature: MA Experiment 20001908 PARAMETER Experiment Name: At_Drought_Reproduction_P Parameter: Tissue Value: Siliques
  misc_feature: MA Experiment 20001908 PARAMETER Experiment Name: At_Drought_Reproduction_P Parameter: Treatment Value: Drought vs. No Drought
  misc_feature: MA Experiment ID: 20001910 Result: Up-regulated in Transcription
  misc_feature: MA Experiment 20001910 PARAMETER Experiment Name: At_Drought_Reproduction_P Parameter: Age (day) Value: 37
  misc_feature: MA Experiment 20001910 PARAMETER Experiment Name: At_Drought_Reproduction_P Parameter: Organism Value: A. thaliana
  misc_feature: MA Experiment 20001910 PARAMETER Experiment Name: At_Drought_Reproduction_P Parameter: Plant Line Value: WS
  misc_feature: MA Experiment 20001910 PARAMETER Experiment Name: At_Drought_Reproduction_P Parameter: Timepoint (day) Value: 7
  misc_feature: MA Experiment 20001910 PARAMETER Experiment Name: At_Drought_Reproduction_P Parameter: Tissue Value: Flowers
  misc_feature: MA Experiment 20001910 PARAMETER Experiment Name: At_Drought_Reproduction_P Parameter: Treatment Value: Drought vs. No Drought
  misc_feature: MA Experiment ID: 20001911 Result: Up-regulated in Transcription
  misc_feature: MA Experiment 20001911 PARAMETER Experiment Name: At_Drought_Reproduction_P Parameter: Age (day) Value: 40
  misc_feature: MA Experiment 20001911 PARAMETER Experiment Name: At_Drought_Reproduction_P Parameter: Organism Value: A. thaliana
  misc_feature: MA Experiment 20001911 PARAMETER Experiment Name: At_Drought_Reproduction_P Parameter: Plant Line Value: WS
  misc_feature: MA Experiment 20001911 PARAMETER Experiment Name: At_Drought_Reproduction_P Parameter: Timepoint (day) Value: 10
  misc_feature: MA Experiment 20001911 PARAMETER Experiment Name: At_Drought_Reproduction_P Parameter: Tissue Value: Flowers
  misc_feature: MA Experiment 20001911 PARAMETER Experiment Name: At_Drought_Reproduction_P Parameter: Treatment Value: Drought vs. No Drought
atggctaagtcttgctatttcagaccagctcttcttcttctgttagttcttttggttcatgccgagtcacgcggtcggttcgagccaaagattcttatgccgacagaggaagctaacccggctgaccaagacgaagatggtgtcggtacaagatgggcggttctcgtcgctggttcttctggatatggaaactacagacaccaggctgacgtgtgtcacgcatatcaaatactaagaaaaggaggtttaaaggaagaaaacatagtcgttttgatgtatgatgatatcgcaaaccacccacttaatcctcgtccgggtactctcatcaaccatcctgacggtgacgatgtttacgccggagtccctaaggcactacacaacaattatagtgatagcgactgtagagacatttgctatggtaaaccaaactttatgtgtggacctttcattggtatcgctcctagatttcttatagccactagttgttttccctttttaatagtttgttcggttatttacgttttgaaatatctttttcaggactatactggtagtagcgttacggctgcaaacttctacgctgtactcctaggcgaccagaaggctgttaaaggtggaagcggtaaggtcatcgctagcaagcccaacgatcacattttcgtatattatgcggatcatggtggtcccggagttcttgggatgccaaatacgcctcacatatatgcagctgattttattgaaacgcttaagaagaagcatgcttccggaacatacaaagagatggttatatacgtagaagcgtgtgaaagtgggagtattttcgaagggataatgccaaaggacttgaacatttacgtaacaacggcttcaaatgcacaagagagtagttatggaacatattgtcctggcatgaatccgtcacccccatctgaatatatcacttgcttaggggatttatatagtgttgcttggatggaagatagtgagactcacaatttaaagaaagagaccataaagcaacaataccacacggtgaagatgaggacatcaaactacaatacctactcaggtggctctcatgtgatggaatacggtaacaatagtattaagtcggagaagctttatctttaccaagggtttgatccagccaccgttaatctcccactaaacgaattaccggtcaagtcaaaaataggagtcgttaaccaacgcgacgcggaccttctcttcctttggcatatgtatcggacatcggaagatgggtcaaggaagaaggatgacacattgaaggaattaactgagacaacaaggcataggaaacatttagatgcaagcgtcgaattgatagccacaattttgtttggtccgacgatgaatgttcttaacttggttagagaacccggtttgcctttggttgacgattgggaatgtcttaaatcgatggtacgtgtatttgaagagcattgtggatcactaacgcaatatgggatgaaacatatgcgagcgtttgcaaacgtttgtaacaacggtgtgtccaaagagctgatggaggaagcttctactgcggcatgcggtggttatagtgaggctcgctacacggtgcatccatcaatcttaggctatagcgcctga

SEQ ID NO: 85918 - protein, 543 aa, Arabidopsis thaliana
  peptide (1)..(543): Ceres Seq. ID no. 12684550
  misc_feature (10)..(123): Pfam Name: Peptidase C13 family Pfam Description: Peptidase C13 family
  misc_feature (1)..(543): Homolog of NCBI NO: 25344843 NR Description: protein F23N19.7 [imported] - Arabidopsis >gi|6630462|gb|AAF19550.1|AC007190_18 F23N19.7 [Arabidopsis
  misc_feature (180)..(543): Homolog of NCBI NO: 15221556 NR Description: beta-VPE; protein id: At1g62710.1, supported by gi_14194096, supported by cDNA: gi_16323335 [Arabidopsis
  misc_feature (1)..(123): Homolog of NCBI NO: 15221556 NR Description: beta-VPE; protein id: At1g62710.1, supported by gi_14194096, supported by cDNA: gi_16323335 [Arabidopsis
  misc_feature (180)..(543): Homolog of NCBI NO: 2129767 NR Description: vacuolar processing enzyme (EC 3.4.22.-) isozyme
  misc_feature (1)..(123): Homolog of NCBI NO: 2129767 NR Description: vacuolar processing enzyme (EC 3.4.22.-) isozyme
  misc_feature (180)..(543): Homolog of NCBI NO: 1351409 NR Description: Vacuolar processing enzyme precursor (VPE)
  misc_feature (27)..(123): Homolog of NCBI NO: 1351409 NR Description: Vacuolar processing enzyme precursor (VPE)
MAKSCYFRPALLLLLVLLVHAESRGRFEPKILMPTEEANPADQDEDGVGTRWAVLVAGSSGYGNYRHQADVCHAYQILRKGGLKEENIVVLMYDDIANHPLNPRPGTLINHPDGDDVYAGVPKALHNNYSDSDCRDICYGKPNFMCGPFIGIAPRFLIATSCFPFLIVCSVIYVLKYLFQDYTGSSVTAANFYAVLLGDQKAVKGGSGKVIASKPNDHIFVYYADHGGPGVLGMPNTPHIYAADFIETLKKKHASGTYKEMVIYVEACESGSIFEGIMPKDLNIYVTTASNAQESSYGTYCPGMNPSPPSEYITCLGDLYSVAWMEDSETHNLKKETIKQQYHTVKMRTSNYNTYSGGSHVMEYGNNSIKSEKLYLYQGFDPATVNLPLNELPVKSKIGVVNQRDADLLFLWHMYRTSEDGSRKKDDTLKELTETTRHRKHLDASVELIATILFGPTMNVLNLVREPGLPLVDDWECLKSMVRVFEEHCGSLTQYGMKHMRAFANVCNNGVSKELMEEASTAACGGYSEARYTVHPSILGYSA

SEQ ID NO: 85919 - protein, 511 aa, Arabidopsis thaliana
  peptide (1)..(511): Ceres Seq. ID no. 12684551
  misc_feature (1)..(91): Pfam Name: Peptidase C13 family Pfam Description: Peptidase C13 family
  misc_feature (1)..(511): Homolog of NCBI NO: 25344843 NR Description: protein F23N19.7 [imported] - Arabidopsis >gi|6630462|gb|AAF19550.1|AC007190_18 F23N19.7 [Arabidopsis
  misc_feature (148)..(511): Homolog of NCBI NO: 15221556 NR Description: beta-VPE; protein id: At1g62710.1, supported by gi_14194096, supported by cDNA: gi_16323335 [Arabidopsis
  misc_feature (1)..(91): Homolog of NCBI NO: 15221556 NR Description: beta-VPE; protein id: At1g62710.1, supported by gi_14194096, supported by cDNA: gi_16323335 [Arabidopsis
  misc_feature (148)..(511): Homolog of NCBI NO: 2129767 NR Description: vacuolar processing enzyme (EC 3.4.22.-) isozyme
  misc_feature (1)..(91): Homolog of NCBI NO: 2129767 NR Description: vacuolar processing enzyme (EC 3.4.22.-) isozyme
  misc_feature (148)..(511): Homolog of NCBI NO: 1351409 NR Description: Vacuolar processing enzyme precursor (VPE)
  misc_feature (1)..(91): Homolog of NCBI NO: 1351409 NR Description: Vacuolar processing enzyme precursor (VPE)
MPTEEANPADQDEDGVGTRWAVLVAGSSGYGNYRHQADVCHAYQILRKGGLKEENIVVLMYDDIANHPLNPRPGTLINHPDGDDVYAGVPKALHNNYSDSDCRDICYGKPNFMCGPFIGIAPRFLIATSCFPFLIVCSVIYVLKYLFQDYTGSSVTAANFYAVLLGDQKAVKGGSGKVIASKPNDHIFVYYADHGGPGVLGMPNTPHIYAADFIETLKKKHASGTYKEMVIYVEACESGSIFEGIMPKDLNIYVTTASNAQESSYGTYCPGMNPSPPSEYITCLGDLYSVAWMEDSETHNLKKETIKQQYHTVKMRTSNYNTYSGGSHVMEYGNNSIKSEKLYLYQGFDPATVNLPLNELPVKSKIGVVNQRDADLLFLWHMYRTSEDGSRKKDDTLKELTETTRHRKHLDASVELIATILFGPTMNVLNLVREPGLPLVDDWECLKSMVRVFEEHCGSLTQYGMKHMRAFANVCNNGVSKELMEEASTAACGGYSEARYTVHPSILGYSA

SEQ ID NO: 85920 - protein, 452 aa, Arabidopsis thaliana
  peptide (1)..(452): Ceres Seq. ID no. 12684552
  misc_feature (89)..(333): Pfam Name: Peptidase C13 family Pfam Description: Peptidase C13 family
  misc_feature (1)..(452): Homolog of NCBI NO: 25344843 NR Description: protein F23N19.7 [imported] - Arabidopsis >gi|6630462|gb|AAF19550.1|AC007190_18 F23N19.7 [Arabidopsis
  misc_feature (89)..(452): Homolog of NCBI NO: 15221556 NR Description: beta-VPE; protein id: At1g62710.1, supported by gi_14194096, supported by cDNA: gi_16323335 [Arabidopsis
  misc_feature (1)..(32): Homolog of NCBI NO: 15221556 NR Description: beta-VPE; protein id: At1g62710.1, supported by gi_14194096, supported by cDNA: gi_16323335 [Arabidopsis
  misc_feature (89)..(452): Homolog of NCBI NO: 2129767 NR Description: vacuolar processing enzyme (EC 3.4.22.-) isozyme
  misc_feature (1)..(32): Homolog of NCBI NO: 2129767 NR Description: vacuolar processing enzyme (EC 3.4.22.-) isozyme
  misc_feature (89)..(452): Homolog of NCBI NO: 1351409 NR Description: Vacuolar processing enzyme precursor (VPE)
  misc_feature (1)..(32): Homolog of NCBI NO: 1351409 NR Description: Vacuolar processing enzyme precursor (VPE)
MYDDIANHPLNPRPGTLINHPDGDDVYAGVPKALHNNYSDSDCRDICYGKPNFMCGPFIGIAPRFLIATSCFPFLIVCSVIYVLKYLFQDYTGSSVTAANFYAVLLGDQKAVKGGSGKVIASKPNDHIFVYYADHGGPGVLGMPNTPHIYAADFIETLKKKHASGTYKEMVIYVEACESGSIFEGIMPKDLNIYVTTASNAQESSYGTYCPGMNPSPPSEYITCLGDLYSVAWMEDSETHNLKKETIKQQYHTVKMRTSNYNTYSGGSHVMEYGNNSIKSEKLYLYQGFDPATVNLPLNELPVKSKIGVVNQRDADLLFLWHMYRTSEDGSRKKDDTLKELTETTRHRKHLDASVELIATILFGPTMNVLNLVREPGLPLVDDWECLKSMVRVFEEHCGSLTQYGMKHMRAFANVCNNGVSKELMEEASTAACGGYSEARYTVHPSILGYSA

SEQ ID NO: 85921 - DNA, 1272 bp, Arabidopsis thaliana
  misc_feature (1)..(1272): Ceres Seq. ID no. 12684583
  misc_feature: MA Experiment ID: 20000173 Result: Down-regulated in Transcription
  misc_feature: MA Experiment 20000173 PARAMETER Experiment Name: At_42deg_Heat_P Parameter: Age (day) Value: 14
  misc_feature: MA Experiment 20000173 PARAMETER Experiment Name: At_42deg_Heat_P Parameter: Organism Value: A. thaliana
  misc_feature: MA Experiment 20000173 PARAMETER Experiment Name: At_42deg_Heat_P Parameter: Plant Line Value: WS
  misc_feature: MA Experiment 20000173 PARAMETER Experiment Name: At_42deg_Heat_P Parameter: Temperature (deg C) Value: 42 vs. 22
  misc_feature: MA Experiment 20000173 PARAMETER Experiment Name: At_42deg_Heat_P Parameter: Timepoint (hr) Value: 6
  misc_feature: MA Experiment 20000173 PARAMETER Experiment Name: At_42deg_Heat_P Parameter: Tissue Value: Aerial
  misc_feature: MA Experiment ID: 20000179 Result: Up-regulated in Transcription
  misc_feature: MA Experiment 20000179 PARAMETER Experiment Name: At_Germinating_Seeds_P Parameter: Age (hr) Value: 6 vs. 0
  misc_feature: MA Experiment 20000179 PARAMETER Experiment Name: At_Germinating_Seeds_P Parameter: Tissue Value: Germinating Seeds
  misc_feature: MA Experiment ID: 20000180 Result: Up-regulated in Transcription
  misc_feature: MA Experiment 20000180 PARAMETER Experiment Name: At_Germinating_Seeds_P Parameter: Age (hr) Value: 24 vs. 0
  misc_feature: MA Experiment 20000180 PARAMETER Experiment Name: At_Germinating_Seeds_P Parameter: Tissue Value: Germinating Seeds
  misc_feature: MA Experiment ID: 20000185 Result: Down-regulated in Transcription
  misc_feature: MA Experiment 20000185 PARAMETER Experiment Name: At_Roots__P Parameter: Age (day) Value: 7 vs. 21
  misc_feature: MA Experiment 20000185 PARAMETER Experiment Name: At_Roots__P Parameter: Organism Value: A. thaliana
  misc_feature: MA Experiment 20000185 PARAMETER Experiment Name: At_Roots__P Parameter: Tissue Value: Roots vs. Whole Plant
  misc_feature: MA Experiment ID: 20000234 Result: Down-regulated in Transcription
  misc_feature: MA Experiment 20000234 PARAMETER Experiment Name: At_Siliques_P Parameter: Age (day) Value: 21
  misc_feature: MA Experiment 20000234 PARAMETER Experiment Name: At_Siliques_P Parameter: Organism Value: A. thaliana
  misc_feature: MA Experiment 20000234 PARAMETER Experiment Name: At_Siliques_P Parameter: Plant Line Value: WS
  misc_feature: MA Experiment 20000234 PARAMETER Experiment Name: At_Siliques_P Parameter: Tissue Value: Less Than 5mm Siliques vs. Whole Plant
  misc_feature: MA Experiment ID: 20000265 Result: Down-regulated in Transcription
  misc_feature: MA Experiment 20000265 PARAMETER Experiment Name: At_Open_Flower_P Parameter: Age (day) Value: 21
  misc_feature: MA Experiment 20000265 PARAMETER Experiment Name: At_Open_Flower_P Parameter: Plant Line Value: WS
  misc_feature: MA Experiment 20000265 PARAMETER Experiment Name: At_Open_Flower_P Parameter: Tissue Value: Closed Flower vs. Whole Plant
  misc_feature: MA Experiment ID: 20000286 Result: Down-regulated in Transcription
  misc_feature: MA Experiment 20000286 PARAMETER Experiment Name: At_Open_Flower_P Parameter: Age (day) Value: 21
  misc_feature: MA Experiment 20000286 PARAMETER Experiment Name: At_Open_Flower_P Parameter: Plant Line Value: WS
  misc_feature: MA Experiment 20000286 PARAMETER Experiment Name: At_Open_Flower_P Parameter: Tissue Value: Half Open vs. Whole Plant
  misc_feature: MA Experiment ID: 20000308 Result: Down-regulated in Transcription
  misc_feature: MA Experiment 20000308 PARAMETER Experiment Name: At_100mM_NaCl__P Parameter: Age (day) Value: 17
  misc_feature: MA Experiment 20000308 PARAMETER Experiment Name: At_100mM_NaCl__P Parameter: Organism Value: A. thaliana
  misc_feature: MA Experiment 20000308 PARAMETER Experiment Name: At_100mM_NaCl__P Parameter: Plant Line Value: WS
  misc_feature: MA Experiment 20000308 PARAMETER Experiment Name: At_100mM_NaCl__P Parameter: Timepoint (hr) Value: 72
  misc_feature: MA Experiment 20000308 PARAMETER Experiment Name: At_100mM_NaCl__P Parameter: Tissue Value: Whole Plant
  misc_feature: MA Experiment 20000308 PARAMETER Experiment Name: At_100mM_NaCl__P Parameter: Treatment Value: 100mM NaCl vs. No Treatment
  misc_feature: MA Experiment ID: 20000438 Result: Up-regulated in Transcription
  misc_feature: MA Experiment 20000438 PARAMETER Experiment Name: At_Shoots__P Parameter: Age (day) Value: 14
  misc_feature: MA Experiment 20000438 PARAMETER Experiment Name: At_Shoots__P Parameter: Tissue Value: Shoots vs. Whole Plant
  misc_feature: MA Experiment ID: 20000439 Result: Down-regulated in Transcription
  misc_feature: MA Experiment 20000439 PARAMETER Experiment Name: At_Roots__P Parameter: Age (day) Value: 14 vs. 21
  misc_feature: MA Experiment 20000439 PARAMETER Experiment Name: At_Roots__P Parameter: Organism Value: A. thaliana
  misc_feature: MA Experiment 20000439 PARAMETER Experiment Name: At_Roots__P Parameter: Tissue Value: Roots vs. Whole Plant
  misc_feature: MA Experiment ID: 20000441 Result: Up-regulated in Transcription
  misc_feature: MA Experiment 20000441 PARAMETER Experiment Name: At_1uM_BR-BRZ__P Parameter: Tissue Value: Shoot Apices
  misc_feature: MA Experiment 20000441 PARAMETER Experiment Name: At_1uM_BR-BRZ__P Parameter: Treatment Value: 1uM BR vs. No Treatment
  misc_feature: MA Experiment ID: 20000443 Result: Up-regulated in Transcription
  misc_feature: MA Experiment 20000443 PARAMETER Experiment Name: At_1uM_BR-BRZ__P Parameter: Tissue Value: Shoot Apices
  misc_feature: MA Experiment 20000443 PARAMETER Experiment Name: At_1uM_BR-BRZ__P Parameter: Treatment Value: 1uM BRZ vs. No Treatment
  misc_feature: MA Experiment ID: 20000578 Result: Down-regulated in Transcription
  misc_feature: MA Experiment 20000578 PARAMETER Experiment Name: At_CS3726__P Parameter: Organism Value: A. thaliana
  misc_feature: MA Experiment 20000578 PARAMETER Experiment Name: At_CS3726__P Parameter: Plant Line Value: CS3726
  misc_feature: MA Experiment 20000578 PARAMETER Experiment Name: At_CS3726__P Parameter: Tissue Value: Whole Plant
  misc_feature: MA Experiment ID: 20001247 Result: Up-regulated in Transcription
  misc_feature: MA Experiment 20001247 PARAMETER Experiment Name: At_Far-red-induction_P Parameter: Age (day) Value: 7
  misc_feature: MA Experiment 20001247 PARAMETER Experiment Name: At_Far-red-induction_P Parameter: Light Value: Far-red vs. White
  misc_feature: MA Experiment 20001247 PARAMETER Experiment Name: At_Far-red-induction_P Parameter: Organism Value: A. thaliana
  misc_feature: MA Experiment 20001247 PARAMETER Experiment Name: At_Far-red-induction_P Parameter: Plant Line Value: Columbia
  misc_feature: MA Experiment 20001247 PARAMETER Experiment Name: At_Far-red-induction_P Parameter: Timepoint (hr) Value: 1
  misc_feature: MA Experiment 20001247 PARAMETER Experiment Name: At_Far-red-induction_P Parameter: Tissue Value: Whole Plant
  misc_feature: MA Experiment ID: 20001450 Result: Up-regulated in Transcription
  misc_feature: MA Experiment 20001450 PARAMETER Experiment Name: At_Far-red-induction_P Parameter: Age (day) Value: 7
  misc_feature: MA Experiment 20001450 PARAMETER Experiment Name: At_Far-red-induction_P Parameter: Light Value: Far-red vs. White
  misc_feature: MA Experiment 20001450 PARAMETER Experiment Name: At_Far-red-induction_P Parameter: Organism Value: A. thaliana
  misc_feature: MA Experiment 20001450 PARAMETER Experiment Name: At_Far-red-induction_P Parameter: Plant Line Value: Columbia
  misc_feature: MA Experiment 20001450 PARAMETER Experiment Name: At_Far-red-induction_P Parameter: Timepoint (hr) Value: 8
  misc_feature: MA Experiment 20001450 PARAMETER Experiment Name: At_Far-red-induction_P Parameter: Tissue Value: Whole Plant
  misc_feature: MA Experiment ID: 20001560 Result: Down-regulated in Transcription
  misc_feature: MA Experiment 20001560 PARAMETER Experiment Name: At_Drought_Soil_Dry_P Parameter: Age (day) Value: 28
  misc_feature: MA Experiment 20001560 PARAMETER Experiment Name: At_Drought_Soil_Dry_P Parameter: Organism Value: A. thaliana
  misc_feature: MA Experiment 20001560 PARAMETER Experiment Name: At_Drought_Soil_Dry_P Parameter: Plant Line Value: WS
  misc_feature: MA Experiment 20001560 PARAMETER Experiment Name: At_Drought_Soil_Dry_P Parameter: Post Timepoint (hr) Value: None
  misc_feature: MA Experiment 20001560 PARAMETER Experiment Name: At_Drought_Soil_Dry_P Parameter: Post-Treatment Value: None
  misc_feature: MA Experiment 20001560 PARAMETER Experiment Name: At_Drought_Soil_Dry_P Parameter: Timepoint (day) Value: 14
  misc_feature: MA Experiment 20001560 PARAMETER Experiment Name: At_Drought_Soil_Dry_P Parameter: Treatment Value: Drought vs. No Drought
  misc_feature: MA Experiment ID: 20001757 Result: Up-regulated in Transcription
  misc_feature: MA Experiment 20001757 PARAMETER Experiment Name: At_50mM_NH4NO3_L-to-H_P Parameter: Timepoint (hr) Value: 6
  misc_feature: MA Experiment 20001757 PARAMETER Experiment Name: At_50mM_NH4NO3_L-to-H_P Parameter: Tissue Value: Leaf
  misc_feature: MA Experiment 20001757 PARAMETER Experiment Name: At_50mM_NH4NO3_L-to-H_P Parameter: Treatment Value: 50mM NH4NO3 vs 100mM Mannitol
  misc_feature: MA Experiment ID: 20001771 Result: Up-regulated in Transcription
  misc_feature: MA Experiment 20001771 PARAMETER Experiment Name: At_Far-red-enriched-adult_P Parameter: Age (day) Value: 28
  misc_feature: MA Experiment 20001771 PARAMETER Experiment Name: At_Far-red-enriched-adult_P Parameter: Light Value: Far-red enriched vs. White
  misc_feature: MA Experiment 20001771 PARAMETER Experiment Name: At_Far-red-enriched-adult_P Parameter: Organism Value: A. thaliana
  misc_feature: MA Experiment 20001771 PARAMETER Experiment Name: At_Far-red-enriched-adult_P Parameter: Plant Line Value: Columbia
  misc_feature: MA Experiment 20001771 PARAMETER Experiment Name: At_Far-red-enriched-adult_P Parameter: Timepoint (hr) Value: 16
  misc_feature: MA Experiment 20001771 PARAMETER Experiment Name: At_Far-red-enriched-adult_P Parameter: Tissue Value: Aerial
  misc_feature: MA Experiment ID: 20001904 Result: Down-regulated in Transcription
  misc_feature: MA Experiment 20001904 PARAMETER Experiment Name: At_Drought_Reproduction_P Parameter: Age (day) Value: 37
  misc_feature: MA Experiment 20001904 PARAMETER Experiment Name: At_Drought_Reproduction_P Parameter: Organism Value: A. thaliana
  misc_feature: MA Experiment 20001904 PARAMETER Experiment Name: At_Drought_Reproduction_P Parameter: Plant Line Value: WS
  misc_feature: MA Experiment 20001904 PARAMETER Experiment Name: At_Drought_Reproduction_P Parameter: Timepoint (day) Value: 7
  misc_feature: MA Experiment 20001904 PARAMETER Experiment Name: At_Drought_Reproduction_P Parameter: Tissue Value: Rosettes
  misc_feature: MA Experiment 20001904 PARAMETER Experiment Name: At_Drought_Reproduction_P Parameter: Treatment Value: Drought vs. No Drought
  misc_feature: MA Experiment ID: 20001905 Result: Down-regulated in Transcription
  misc_feature: MA Experiment 20001905 PARAMETER Experiment Name: At_Drought_Reproduction_P Parameter: Age (day) Value: 40
  misc_feature: MA Experiment 20001905 PARAMETER Experiment Name: At_Drought_Reproduction_P Parameter: Organism Value: A. thaliana
  misc_feature: MA Experiment 20001905 PARAMETER Experiment Name: At_Drought_Reproduction_P Parameter: Plant Line Value: WS
  misc_feature: MA Experiment 20001905 PARAMETER Experiment Name: At_Drought_Reproduction_P Parameter: Timepoint (day) Value: 10
  misc_feature: MA Experiment 20001905 PARAMETER Experiment Name: At_Drought_Reproduction_P Parameter: Tissue Value: Rosettes
  misc_feature: MA Experiment 20001905 PARAMETER Experiment Name: At_Drought_Reproduction_P Parameter: Treatment Value: Drought vs. No Drought
atggaacaagtgtttgctgattggaattttgaagataattttcacatgtccactaataaaagatcaatcagaccagaagatgaattagtggagctattgtggagagatggtcaagtggttttacaaagccaagctcgtagagaaccgtcagtccaagtccaaacccacaaacaagaaaccctaagaaaacccaacaatatttttcttgacaaccaagaaacagtacaaaagcctaactacgctgctctagatgatcaagaaaccgtctcctggatacaataccctccggatgacgtcatcgaccctttcgaatccgagttctcctctcatttcttctcttcgatcgatcacctcggaggtcctgagaagccacgaacgatcgaagagacagttaagcatgaggctcaagccatggctcctcctaagtttagatcctcggttataacagtcggaccgagtcattgcggcagcaaccagtcaacaaatattcatcaggccactacacttccggtttctatgagtgatagaagcaagaacgtcgaagaaagacttgacacttcgtcaggtggctcctccggttgcagctatggaaggaacaacaaagaaaccgttagtggaacaagtgtaaccattgaccgtaaaagaaaacatgttatggatgctgatcaagaatctgtgtctcaatcagatataggtttgacctcaaccgatgatcaaaccatgggtaacaaatcgagccaacggtcaggatctactcgaagaagccgtgcagctgaagttcataatctctcagaaaggaggaggagagatcggatcaatgaaagaatgaaagctcttcaagaactcatacctcactgcagcagaacagataaagcttcgatattggatgaagcaattgattacttaaaatcacttcaaatgcaactccaagtgatgtggatgggaagtggaatggcggcggcggcagcagcagcagcaagtccgatgatgtttcccggggtacaatcatctccatacattaatcagatggctatgcaaagtcagatgcaattgtctcaattcccggttatgaaccggtccgctccgcagaaccatcccggtttagtatgtcaaaacccggtacagttgcagctccaagcacagaaccaaatcttatcggagcagctcgctaggtacatgggcgggattccccagatgccgccggcgggaaatcaggtcagttgcagacggcatcgttttgaagaaagacaaatatatttatttaatatctga

SEQ ID NO: 85922 - protein, 423 aa, Arabidopsis thaliana
  peptide (1)..(423): Ceres Seq. ID no. 12684584
  misc_feature (257)..(306): Pfam Name: Helix-loop-helix DNA-binding domain Pfam Description: Helix-loop-helix DNA-binding domain
  misc_feature (1)..(406): Homolog of NCBI NO: 30694924 NR Description: bHLH protein family [Arabidopsis thaliana]
  misc_feature (1)..(405): Homolog of NCBI NO: 30694919 NR Description: bHLH protein family [Arabidopsis thaliana]
  misc_feature (1)..(405): Homolog of NCBI NO: 20127070 NR Description: putative bHLH transcription factor [Arabidopsis
  misc_feature (1)..(288): Homolog of NCBI NO: 19698849 NR Description: putative protein [Arabidopsis thaliana]
  misc_feature (8)..(402): Homolog of NCBI NO: 25408828 NR Description: hypothetical protein At2g43010 [imported] -
  misc_feature (8)..(413): Homolog of NCBI NO: 30689218 NR Description: transcription factor (BHLH9) -related
  misc_feature (8)..(402): Homolog of NCBI NO: 30689224 NR Description: transcription factor (BHLH9) -related
  misc_feature (8)..(266): Homolog of NCBI NO: 20197630 NR Description: expressed protein [Arabidopsis thaliana]
  misc_feature (8)..(266): Homolog of NCBI NO: 13430618 NR Description: unknown protein [Arabidopsis thaliana]
  misc_feature (110)..(366): Homolog of NCBI NO: 34899612 NR Description: putative phytochrome interacting factor 4 [Oryza
MEQVFADWNFEDNFHMSTNKRSIRPEDELVELLWRDGQVVLQSQARREPSVQVQTHKQETLRKPNNIFLDNQETVQKPNYAALDDQETVSWIQYPPDDVIDPFESEFSSHFFSSIDHLGGPEKPRTIEETVKHEAQAMAPPKFRSSVITVGPSHCGSNQSTNIHQATTLPVSMSDRSKNVEERLDTSSGGSSGCSYGRNNKETVSGTSVTIDRKRKHVMDADQESVSQSDIGLTSTDDQTMGNKSSQRSGSTRRSRAAEVHNLSERRRRDRINERMKALQELIPHCSRTDKASILDEAIDYLKSLQMQLQVMWMGSGMAAAAAAAASPMMFPGVQSSPYINQMAMQSQMQLSQFPVMNRSAPQNHPGLVCQNPVQLQLQAQNQILSEQLARYMGGIPQMPPAGNQVSCRRHRFEERQIYLFNI

SEQ ID NO: 85923 - protein, 408 aa, Arabidopsis thaliana
  peptide (1)..(408): Ceres Seq. ID no. 12684585
  misc_feature (242)..(291): Pfam Name: Helix-loop-helix DNA-binding domain Pfam Description: Helix-loop-helix DNA-binding domain
  misc_feature (1)..(391): Homolog of NCBI NO: 30694924 NR Description: bHLH protein family [Arabidopsis thaliana]
  misc_feature (1)..(390): Homolog of NCBI NO: 30694919 NR Description: bHLH protein family [Arabidopsis thaliana]
  misc_feature (1)..(390): Homolog of NCBI NO: 20127070 NR Description: putative bHLH transcription factor [Arabidopsis
  misc_feature (1)..(273): Homolog of NCBI NO: 19698849 NR Description: putative protein [Arabidopsis thaliana]
  misc_feature (1)..(387): Homolog of NCBI NO: 25408828 NR Description: hypothetical protein At2g43010 [imported] -
  misc_feature (1)..(398): Homolog of NCBI NO: 30689218 NR Description: transcription factor (BHLH9) -related
  misc_feature (1)..(387): Homolog of NCBI NO: 30689224 NR Description: transcription factor (BHLH9) -related
  misc_feature (1)..(251): Homolog of NCBI NO: 20197630 NR Description: expressed protein [Arabidopsis thaliana]
  misc_feature (1)..(251): Homolog of NCBI NO: 13430618 NR Description: unknown protein [Arabidopsis thaliana]
  misc_feature (95)..(351): Homolog of NCBI NO: 34899612 NR Description: putative phytochrome interacting factor 4 [Oryza
MSTNKRSIRPEDELVELLWRDGQVVLQSQARREPSVQVQTHKQETLRKPNNIFLDNQETVQKPNYAALDDQETVSWIQYPPDDVIDPFESEFSSHFFSSIDHLGGPEKPRTIEETVKHEAQAMAPPKFRSSVITVGPSHCGSNQSTNIHQATTLPVSMSDRSKNVEERLDTSSGGSSGCSYGRNNKETVSGTSVTIDRKRKHVMDADQESVSQSDIGLTSTDDQTMGNKSSQRSGSTRRSRAAEVHNLSERRRRDRINERMKALQELIPHCSRTDKASILDEAIDYLKSLQMQLQVMWMGSGMAAAAAAAASPMMFPGVQSSPYINQMAMQSQMQLSQFPVMNRSAPQNHPGLVCQNPVQLQLQAQNQILSEQLARYMGGIPQMPPAGNQVSCRRHRFEERQIYLFNI

SEQ ID NO: 85924 - protein, 286 aa, Arabidopsis thaliana
  peptide (1)..(286): Ceres Seq. ID no. 12684586
  misc_feature (120)..(169): Pfam Name: Helix-loop-helix DNA-binding domain Pfam Description: Helix-loop-helix DNA-binding domain
  misc_feature (1)..(269): Homolog of NCBI NO: 30694924 NR Description: bHLH protein family [Arabidopsis thaliana]
  misc_feature (1)..(268): Homolog of NCBI NO: 30694919 NR Description: bHLH protein family [Arabidopsis thaliana]
  misc_feature (1)..(268): Homolog of NCBI NO: 20127070 NR Description: putative bHLH transcription factor [Arabidopsis
  misc_feature (1)..(151): Homolog of NCBI NO: 19698849 NR Description: putative protein [Arabidopsis thaliana]
  misc_feature (1)..(265): Homolog of NCBI NO: 25408828 NR Description: hypothetical protein At2g43010 [imported] -
  misc_feature (1)..(276): Homolog of NCBI NO: 30689218 NR Description: transcription factor (BHLH9) -related
  misc_feature (1)..(265): Homolog of NCBI NO: 30689224 NR Description: transcription factor (BHLH9) -related
  misc_feature (1)..(129): Homolog of NCBI NO: 20197630 NR Description: expressed protein [Arabidopsis thaliana]
  misc_feature (1)..(129): Homolog of NCBI NO: 13430618 NR Description: unknown protein [Arabidopsis thaliana]
  misc_feature (1)..(229): Homolog of NCBI NO: 34899612 NR Description: putative phytochrome interacting factor 4 [Oryza
MAPPKFRSSVITVGPSHCGSNQSTNIHQATTLPVSMSDRSKNVEERLDTSSGGSSGCSYGRNNKETVSGTSVTIDRKRKHVMDADQESVSQSDIGLTSTDDQTMGNKSSQRSGSTRRSRAAEVHNLSERRRRDRINERMKALQELIPHCSRTDKASILDEAIDYLKSLQMQLQVMWMGSGMAAAAAAAASPMMFPGVQSSPYINQMAMQSQMQLSQFPVMNRSAPQNHPGLVCQNPVQLQLQAQNQILSEQLARYMGGIPQMPPAGNQVSCRRHRFEERQIYLFNI

SEQ ID NO: 85925 - DNA, 2766 bp, Arabidopsis thaliana
  misc_feature (1)..(2766): Ceres Seq. ID no. 12684612
  misc_feature: MA Experiment ID: 20000264 Result: Up-regulated in Transcription
  misc_feature: MA Experiment 20000264 PARAMETER Experiment Name: At_Open_Flower_P Parameter: Age (day) Value: 21
  misc_feature: MA Experiment 20000264 PARAMETER Experiment Name: At_Open_Flower_P Parameter: Plant Line Value: WS
  misc_feature: MA Experiment 20000264 PARAMETER Experiment Name: At_Open_Flower_P Parameter: Tissue Value: Open Flower vs. Whole Plant
  misc_feature: MA Experiment ID: 20000286 Result: Up-regulated in Transcription
  misc_feature: MA Experiment 20000286 PARAMETER Experiment Name: At_Open_Flower_P Parameter: Age (day) Value: 21
  misc_feature: MA Experiment 20000286 PARAMETER Experiment Name: At_Open_Flower_P Parameter: Plant Line Value: WS
  misc_feature: MA Experiment 20000286 PARAMETER Experiment Name: At_Open_Flower_P Parameter: Tissue Value: Half Open vs. Whole Plant
  misc_feature: MA Experiment ID: 20000439 Result: Up-regulated in Transcription
  misc_feature: MA Experiment 20000439 PARAMETER Experiment Name: At_Roots__P Parameter: Age (day) Value: 14 vs. 21
  misc_feature: MA Experiment 20000439 PARAMETER Experiment Name: At_Roots__P Parameter: Organism Value: A. thaliana
  misc_feature: MA Experiment 20000439 PARAMETER Experiment Name: At_Roots__P Parameter: Tissue Value: Roots vs. Whole Plant
  misc_feature: MA Experiment ID: 20000794 Result: Up-regulated in Transcription
  misc_feature: MA Experiment 20000794 PARAMETER Experiment Name: At_Petals_P Parameter: Age (day) Value: 23-25 days
  misc_feature: MA Experiment 20000794 PARAMETER Experiment Name: At_Petals_P Parameter: Plant Line Value: WS
  misc_feature: MA Experiment 20000794 PARAMETER Experiment Name: At_Petals_P Parameter: Tissue Value: Petals vs. Whole plant
atgaagaaagcatttggtcaaactgtcagagacctcaagagaggggtcaacaagaaagtgcttaaagtacctggaatagaacagaaggttctagatgctaccagcaatgagtcctggggtccgcatggatcacttcttgcggacattgcacatgcttcgagaaattaccatgaataccagattactatgggagtgttatggaaacgtcttagtgactctggaaaaaattggcggcatgtctataaggcattgacagtcttggagtacatggtaggccatggatcagaacgtgtcatagaagaggttaaagaacatgcatatcaaattacgacattatctggttttcagtatattgattccagcggtaaagatcaaggtagcaatgtcaggaagaaggcgcagagccttgtggctttggttaatgacaaagaaagaataacggaggtcagagagaaggctgctgctaacagagataagtatcataactcaatgcataggccgtcaggaggatatggggacaaatatgattacgaaggccgctatggagacagagatgaagggcgaagtagttatgggaaagagagagaatatggttacagggatgatgatagaaatagtcgtgatggcgatcgttattctagagactctgaagaccgatatggaagagatggtaacacggatgacgaataccgtggaaggagcagaagtgttgataattacaatggatcaagaggtaggagctcggacagggaacggcctattgaggatgatggccaatcctcatcgcgggatagtggtgcgccagctgatgatcattctcaagatgggagaggggggctagagagaaagttctctgaacaaaatattggtgctgctccacctagttatgaagaagctgtgagtgaatcacggagccctgtatacagtgaaagggatggtggagagaccccacaagttgctcctccaggagctgctgcttctcctcttgctgaaaacatcagcgtggacaacaaagctgctgattttgttaatgaatcatctcctcagcaagttgaggcttttgatgaatttgatccacgaggttcagtttcagcagcatgtgcacctacagctggtgcttcggttcctgcacctatcccaccaacagtggtttctacgcctgccccgcctgcctcaattaatgcagaaatggatttgcttggctctctttcagatgtattttcaccaaatcccttggctattgtaacatctgattccacttctgttgaaaccaatggacaagcaaacactggtttagctccatcgttttctacttctcagtcatctactcagccttttgatgatccatttggtgactctcctttcaaagccatcacttctgctgacactgagacaagccaacatcagagttttggagttccttttcagccaacaccaccaacttcaaatcctaacaatgaacataactttggttttggggaagcattttcagctgttaccgattctgaacctggcgttcaaaatatgcaagctccaccgaacttatccgtctttcctcaagagcagtttgatacatcgcagagcgaaatcgatattcttgccggcattctcccaccatctggaccgccagtttctctgtctccacaaccagattccactatgccaacatcccaatttcatcccaatggtaactcctatgaaagctatcatcatcaagccgcgcctacagatctaaacatgcaaggacaaacaccgtttggtcaagcttcacaacaatttaacatggtttcacattcacaaaatcatcatgaaggtatgcaattcaacaatggggatatgcaccaacctggttctaccccctcatcaagctcgcaaactccttaccctactacgcccaatgcaccaagtggtcagtttgatggtggaaattttatgacacaacaaccttatggtgtgataccgcaagttcatggcgtcccttcccatataccacagcgaactcaatctggacctgttgcagcgcacgggaatagtaacaatgttgttggggatatgttttcaccagctggactaagttccttggagacatcagcatcgcaaccatctctcacacctttaacaggagcaattgaaattgttccccaaaatcagaagaagtttgagccaaaatcaacaatttgggctgatacattaagtagagggctagttaacttcaacatttctggaccgaaaacaaatccattggcggatataggagttgacttcgaggcaatcaacaggaaagagaaacggctagagaaaccaactatcacacaacaacaagtaacatcaactatcaacatggggaaagccatgggatctggtactggcttaggtcgcgctggtgcaggtgctatgagacctccaacaaattcaatggtaggctcaagcatgcccacgggcatgaatgttggtggctatggaggcatgaaccaacaccaacccataggcatgaaccaaaaccatcccatgggcatgaaccaaaacctttccatgggaatgaaccagaactatcccatgggaatgaaccaaaactatccaatgggaatgggcatgaacatgaacatgggcgggtatggacaagggtatccgatgcaaccacaacaaggaatgggcatggctcctcctggtgcaccacaaggcatgaccggtgcctataatccaatgatgggtcaaggcggttacaaccctcagcagcagcaaccatatggtggaggttaccggtaa

SEQ ID NO: 85926 - protein, 921 aa, Arabidopsis thaliana
  peptide (1)..(921): Ceres Seq. ID no. 12684613
  misc_feature (23)..(146): Pfam Name: ENTH domain Pfam Description: ENTH domain
  misc_feature (1)..(907): Homolog of NCBI NO: 30689266 NR Description: clathrin binding protein (epsin) -related
  misc_feature (1)..(907): Homolog of NCBI NO: 15215854 NR Description: At2g43170/F14B2.11 [Arabidopsis thaliana]
  misc_feature (346)..(921): Homolog of NCBI NO: 11357285 NR Description: epsin-like protein - Arabidopsis thaliana
  misc_feature (346)..(921): Homolog of NCBI NO: 18411135 NR Description: epsin-like protein; protein id: At3g59290.1,
  misc_feature (388)..(912): Homolog of NCBI NO: 25408842 NR Description: hypothetical protein At2g43170 [imported] - thaliana >gi|3763926|gb|AAC64306.1| unknown protein [Arabidopsis
  misc_feature (1)..(263): Homolog of NCBI NO: 25408841 NR Description: probable clathrin binding protein (epsin) - Arabidopsis thaliana >gi|3763925|gb|AAC64305.1| putative
  misc_feature (1)..(733): Homolog of NCBI NO: 15451572 NR Description: Putative epsin [Oryza sativa]
  misc_feature (64)..(921): Homolog of NCBI NO: 30689266 NR Description: clathrin binding protein (epsin) -related
  misc_feature (64)..(921): Homolog of NCBI NO: 15215854 NR Description: At2g43170/F14B2.11 [Arabidopsis thaliana]
  misc_feature (123)..(921): Homolog of NCBI NO: 15451572 NR Description: Putative epsin [Oryza sativa]
MKKAFGQTVRDLKRGVNKKVLKVPGIEQKVLDATSNESWGPHGSLLADIAHASRNYHEYQITMGVLWKRLSDSGKNWRHVYKALTVLEYMVGHGSERVIEEVKEHAYQITTLSGFQYIDSSGKDQGSNVRKKAQSLVALVNDKERITEVREKAAANRDKYHNSMHRPSGGYGDKYDYEGRYGDRDEGRSSYGKEREYGYRDDDRNSRDGDRYSRDSEDRYGRDGNTDDEYRGRSRSVDNYNGSRGRSSDRERPIEDDGQSSSRDSGAPADDHSQDGRGGLERKFSEQNIGAAPPSYEEAVSESRSPVYSERDGGETPQVAPPGAAASPLAENISVDNKAADFVNESSPQQVEAFDEFDPRGSVSAACAPTAGASVPAPIPPTVVSTPAPPASINAEMDLLGSLSDVFSPNPLAIVTSDSTSVETNGQANTGLAPSFSTSQSSTQPFDDPFGDSPFKAITSADTETSQHQSFGVPFQPTPPTSNPNNEHNFGFGEAFSAVTDSEPGVQNMQAPPNLSVFPQEQFDTSQSEIDILAGILPPSGPPVSLSPQPDSTMPTSQFHPNGNSYESYHHQAAPTDLNMQGQTPFGQASQQFNMVSHSQNHHEGMQFNNGDMHQPGSTPSSSSQTPYPTTPNAPSGQFDGGNFMTQQPYGVIPQVHGVPSHIPQRTQSGPVAAHGNSNNVVGDMFSPAGLSSLETSASQPSLTPLTGAIEIVPQNQKKFEPKSTIWADTLSRGLVNFNISGPKTNPLADIGVDFEAINRKEKRLEKPTITQQQVTSTINMGKAMGSGTGLGRAGAGAMRPPTNSMVGSSMPTGMNVGGYGGMNQHQPIGMNQNHPMGMNQNLSMGMNQNYPMGMNQNYPMGMGMNMNMGGYGQGYPMQPQQGMGMAPPGAPQGMTGAYNPMMGQGGYNPQQQQPYGGGYR

SEQ ID NO: 85927 - protein, 859 aa, Arabidopsis thaliana
  peptide (1)..(859): Ceres Seq. ID no. 12684614
  misc_feature (1)..(84): Pfam Name: ENTH domain Pfam Description: ENTH domain
  misc_feature (1)..(845): Homolog of NCBI NO: 30689266 NR Description: clathrin binding protein (epsin) -related
  misc_feature (1)..(845): Homolog of NCBI NO: 15215854 NR Description: At2g43170/F14B2.11 [Arabidopsis thaliana]
  misc_feature (284)..(859): Homolog of NCBI NO: 11357285 NR Description: epsin-like protein - Arabidopsis thaliana
  misc_feature (284)..(859): Homolog of NCBI NO: 18411135 NR Description: epsin-like protein; protein id: At3g59290.1,
  misc_feature (326)..(850): Homolog of NCBI NO: 25408842 NR Description: hypothetical protein At2g43170 [imported] - thaliana >gi|3763926|gb|AAC64306.1| unknown protein [Arabidopsis
  misc_feature (1)..(201): Homolog of NCBI NO: 25408841 NR Description: probable clathrin binding protein (epsin) - Arabidopsis thaliana >gi|3763925|gb|AAC64305.1| putative
  misc_feature (1)..(671): Homolog of NCBI NO: 15451572 NR Description: Putative epsin [Oryza sativa]
  misc_feature (2)..(859): Homolog of NCBI NO: 30689266 NR Description: clathrin binding protein (epsin) -related
  misc_feature (2)..(859): Homolog of NCBI NO: 15215854 NR Description: At2g43170/F14B2.11 [Arabidopsis thaliana]
  misc_feature (61)..(859): Homolog of NCBI NO: 15451572 NR Description: Putative epsin [Oryza sativa]
MGVLWKRLSDSGKNWRHVYKALTVLEYMVGHGSERVIEEVKEHAYQITTLSGFQYIDSSGKDQGSNVRKKAQSLVALVNDKERITEVREKAAANRDKYHNSMHRPSGGYGDKYDYEGRYGDRDEGRSSYGKEREYGYRDDDRNSRDGDRYSRDSEDRYGRDGNTDDEYRGRSRSVDNYNGSRGRSSDRERPIEDDGQSSSRDSGAPADDHSQDGRGGLERKFSEQNIGAAPPSYEEAVSESRSPVYSERDGGETPQVAPPGAAASPLAENISVDNKAADFVNESSPQQVEAFDEFDPRGSVSAACAPTAGASVPAPIPPTVVSTPAPPASINAEMDLLGSLSDVFSPNPLAIVTSDSTSVETNGQANTGLAPSFSTSQSSTQPFDDPFGDSPFKAITSADTETSQHQSFGVPFQPTPPTSNPNNEHNFGFGEAFSAVTDSEPGVQNMQAPPNLSVFPQEQFDTSQSEIDILAGILPPSGPPVSLSPQPDSTMPTSQFHPNGNSYESYHHQAAPTDLNMQGQTPFGQASQQFNMVSHSQNHHEGMQFNNGDMHQPGSTPSSSSQTPYPTTPNAPSGQFDGGNFMTQQPYGVIPQVHGVPSHIPQRTQSGPVAAHGNSNNVVGDMFSPAGLSSLETSASQPSLTPLTGAIEIVPQNQKKFEPKSTIWADTLSRGLVNFNISGPKTNPLADIGVDFEAINRKEKRLEKPTITQQQVTSTINMGKAMGSGTGLGRAGAGAMRPPTNSMVGSSMPTGMNVGGYGGMNQHQPIGMNQNHPMGMNQNLSMGMNQNYPMGMNQNYPMGMGMNMNMGGYGQGYPMQPQQGMGMAPPGAPQGMTGAYNPMMGQGGYNPQQQQPYGGGYR

SEQ ID NO: 85928 - protein, 832 aa, Arabidopsis thaliana
  peptide (1)..(832): Ceres Seq. ID no. 12684615
  misc_feature (1)..(57): Pfam Name: ENTH domain Pfam Description: ENTH domain
  misc_feature (1)..(818): Homolog of NCBI NO: 30689266 NR Description: clathrin binding protein (epsin) -related
  misc_feature (1)..(818): Homolog of NCBI NO: 15215854 NR Description: At2g43170/F14B2.11 [Arabidopsis thaliana]
  misc_feature (257)..(832): Homolog of NCBI NO: 11357285 NR Description: epsin-like protein - Arabidopsis thaliana
  misc_feature (257)..(832): Homolog of NCBI NO: 18411135 NR Description: epsin-like protein; protein id: At3g59290.1,
  misc_feature (299)..(823): Homolog of NCBI NO: 25408842 NR Description: hypothetical protein At2g43170 [imported] - thaliana >gi|3763926|gb|AAC64306.1| unknown protein [Arabidopsis
  misc_feature (1)..(174): Homolog of NCBI NO: 25408841 NR Description: probable clathrin binding protein (epsin) - Arabidopsis thaliana >gi|3763925|gb|AAC64305.1| putative
  misc_feature (1)..(644): Homolog of NCBI NO: 15451572 NR Description: Putative epsin [Oryza sativa]
  misc_feature (1)..(832): Homolog of NCBI NO: 30689266 NR Description: clathrin binding protein (epsin) -related
  misc_feature (1)..(832): Homolog of NCBI NO: 15215854 NR Description: At2g43170/F14B2.11 [Arabidopsis thaliana]
  misc_feature (34)..(832): Homolog of NCBI NO: 15451572 NR Description: Putative epsin [Oryza sativa]
MVGHGSERVIEEVKEHAYQITTLSGFQYIDSSGKDQGSNVRKKAQSLVALVNDKERITEVREKAAANRDKYHNSMHRPSGGYGDKYDYEGRYGDRDEGRSSYGKEREYGYRDDDRNSRDGDRYSRDSEDRYGRDGNTDDEYRGRSRSVDNYNGSRGRSSDRERPIEDDGQSSSRDSGAPADDHSQDGRGGLERKFSEQNIGAAPPSYEEAVSESRSPVYSERDGGETPQVAPPGAAASPLAENISVDNKAADFVNESSPQQVEAFDEFDPRGSVSAACAPTAGASVPAPIPPTVVSTPAPPASINAEMDLLGSLSDVFSPNPLAIVTSDSTSVETNGQANTGLAPSFSTSQSSTQPFDDPFGDSPFKAITSADTETSQHQSFGVPFQPTPPTSNPNNEHNFGFGEAFSAVTDSEPGVQNMQAPPNLSVFPQEQFDTSQSEIDILAGILPPSGPPVSLSPQPDSTMPTSQFHPNGNSYESYHHQAAPTDLNMQGQTPFGQASQQFNMVSHSQNHHEGMQFNNGDMHQPGSTPSSSSQTPYPTTPNAPSGQFDGGNFMTQQPYGVIPQVHGVPSHIPQRTQSGPVAAHGNSNNVVGDMFSPAGLSSLETSASQPSLTPLTGAIEIVPQNQKKFEPKSTIWADTLSRGLVNFNISGPKTNPLADIGVDFEAINRKEKRLEKPTITQQQVTSTINMGKAMGSGTGLGRAGAGAMRPPTNSMVGSSMPTGMNVGGYGGMNQHQPIGMNQNHPMGMNQNLSMGMNQNYPMGMNQNYPMGMGMNMNMGGYGQGYPMQPQQGMGMAPPGAPQGMTGAYNPMMGQGGYNPQQQQPYGGGYR

SEQ ID NO: 85929 - DNA, 1101 bp, Arabidopsis thaliana
  misc_feature (1)..(1101): Ceres Seq. ID no. 12684624
  misc_feature: MA Experiment ID: 108434 Result: Down-regulated in Transcription
  misc_feature: MA Experiment 108434 PARAMETER Experiment Name: At_Root_Tips_cDNA_P Parameter: Tissue Value: Root Tips
  misc_feature: MA Experiment ID: 108435 Result: Down-regulated in Transcription
  misc_feature: MA Experiment 108435 PARAMETER Experiment Name: At_stm_Mutants_cDNA_P Parameter: Plant Line Value: wt Landsburg vs stm
  misc_feature: MA Experiment 108435 PARAMETER Experiment Name: At_stm_Mutants_cDNA_P Parameter: Tissue Value: Shoot Apical Meristem Region
  misc_feature: MA Experiment ID: 108488 Result: Down-regulated in Transcription
  misc_feature: MA Experiment ID: 108573 Result: Up-regulated in Transcription
  misc_feature: MA Experiment 108573 PARAMETER Experiment Name: At_Drought_cDNA_P Parameter: Timepoint (hr) Value: 6
  misc_feature: MA Experiment 108573 PARAMETER Experiment Name: At_Drought_cDNA_P Parameter: Tissue Value: Aerial
  misc_feature: MA Experiment 108573 PARAMETER Experiment Name: At_Drought_cDNA_P Parameter: Treatment Value: Drought vs. No Drought
  misc_feature: MA Experiment ID: 108574 Result: Up-regulated in Transcription
  misc_feature: MA Experiment 108574 PARAMETER Experiment Name: At_Wounding__cDNA_P Parameter: Timepoint (hr) Value: 1
  misc_feature: MA Experiment 108574 PARAMETER Experiment Name: At_Wounding__cDNA_P Parameter: Tissue Value: Aerial
  misc_feature: MA Experiment 108574 PARAMETER Experiment Name: At_Wounding__cDNA_P Parameter: Treatment Value: Wounding vs. No Wounding
  misc_feature: MA Experiment ID: 108577 Result: Down-regulated in Transcription
  misc_feature: MA Experiment 108577 PARAMETER Experiment Name: At_42deg_Heat_cDNA_P Parameter: Temperature (deg C) Value: 42 vs. 22
  misc_feature: MA Experiment 108577 PARAMETER Experiment Name: At_42deg_Heat_cDNA_P Parameter: Timepoint (hr) Value: 6
  misc_feature: MA Experiment 108577 PARAMETER Experiment Name: At_42deg_Heat_cDNA_P Parameter: Tissue Value: Aerial
  misc_feature: MA Experiment ID: 108579 Result: Up-regulated in Transcription
  misc_feature: MA Experiment 108579 PARAMETER Experiment Name: At_4deg_Cold_cDNA_P Parameter: Temperature (deg C) Value: 4 vs. 22
  misc_feature: MA Experiment 108579 PARAMETER Experiment Name: At_4deg_Cold_cDNA_P Parameter: Timepoint (hr) Value: 6
  misc_feature: MA Experiment 108579 PARAMETER Experiment Name: At_4deg_Cold_cDNA_P Parameter: Tissue Value: Aerial
  misc_feature: MA Experiment ID: 108594 Result: Up-regulated in Transcription
  misc_feature: MA Experiment 108594 PARAMETER Experiment Name: At_Ler-rhl_Root_cDNA_P Parameter: Plant Line Value: null
  misc_feature: MA Experiment ID: 108595 Result: Down-regulated in Transcription
  misc_feature: MA Experiment 108595 PARAMETER Experiment Name: At_Ler-pi_Ovule_cDNA_P Parameter: Plant Line Value: null
  misc_feature: MA Experiment ID: 20000069 Result: Up-regulated in Transcription
  misc_feature: MA Experiment 20000069 PARAMETER Experiment Name: At_100uM_ABA_Mutants_cDNA_P Parameter: Plant Line Value: CS23
  misc_feature: MA Experiment 20000069 PARAMETER Experiment Name: At_100uM_ABA_Mutants_cDNA_P Parameter: Timepoint (hr) Value: 6
  misc_feature: MA Experiment 20000069 PARAMETER Experiment Name: At_100uM_ABA_Mutants_cDNA_P Parameter: Tissue Value: Aerial
  misc_feature: MA Experiment 20000069 PARAMETER Experiment Name: At_100uM_ABA_Mutants_cDNA_P Parameter: Treatment Value: 100uM ABA vs. No Treatment
  misc_feature: MA Experiment ID: 20000070 Result: Up-regulated in Transcription
  misc_feature: MA Experiment 20000070 PARAMETER Experiment Name: At_100uM_ABA_Mutants_cDNA_P Parameter: Plant Line Value: CS24
  misc_feature: MA Experiment 20000070 PARAMETER Experiment Name: At_100uM_ABA_Mutants_cDNA_P Parameter: Timepoint (hr) Value: 6
  misc_feature: MA Experiment 20000070 PARAMETER Experiment Name: At_100uM_ABA_Mutants_cDNA_P Parameter: Tissue Value: Aerial
  misc_feature: MA Experiment 20000070 PARAMETER Experiment Name: At_100uM_ABA_Mutants_cDNA_P Parameter: Treatment Value: 100uM ABA vs. No Treatment
  misc_feature: MA Experiment ID: 20000071 Result: Up-regulated in Transcription
  misc_feature: MA Experiment 20000071 PARAMETER Experiment Name: At_100uM_ABA_Mutants_cDNA_P Parameter: Plant Line Value: CS8104
  misc_feature: MA Experiment 20000071 PARAMETER Experiment Name: At_100uM_ABA_Mutants_cDNA_P Parameter: Timepoint (hr) Value: 6
  misc_feature: MA Experiment 20000071 PARAMETER Experiment Name: At_100uM_ABA_Mutants_cDNA_P Parameter: Tissue Value: Aerial
  misc_feature: MA Experiment 20000071 PARAMETER Experiment Name: At_100uM_ABA_Mutants_cDNA_P Parameter: Treatment Value: 100uM ABA vs. No Treatment
  misc_feature: MA Experiment ID: 20000072 Result: Up-regulated in Transcription
  misc_feature: MA Experiment 20000072 PARAMETER Experiment Name: At_100uM_ABA_Mutants_cDNA_P Parameter: Plant Line Value: CS8105
  misc_feature: MA Experiment 20000072 PARAMETER Experiment Name: At_100uM_ABA_Mutants_cDNA_P Parameter: Timepoint (hr) Value: 6
  misc_feature: MA Experiment 20000072 PARAMETER Experiment Name: At_100uM_ABA_Mutants_cDNA_P Parameter: Tissue Value: Aerial
  misc_feature: MA Experiment 20000072 PARAMETER Experiment Name: At_100uM_ABA_Mutants_cDNA_P Parameter: Treatment Value: 100uM ABA vs. No Treatment
  misc_feature: MA Experiment ID: 20000086 Result: Up-regulated in Transcription
  misc_feature: MA Experiment 20000086 PARAMETER Experiment Name: At_100uM_ABA_Mutants_cDNA_P Parameter: Plant Line Value: CS22
  misc_feature: MA Experiment 20000086 PARAMETER Experiment Name: At_100uM_ABA_Mutants_cDNA_P Parameter: Timepoint (hr) Value: 6
  misc_feature: MA Experiment 20000086 PARAMETER Experiment Name: At_100uM_ABA_Mutants_cDNA_P Parameter: Tissue Value: Aerial
  misc_feature: MA Experiment 20000086 PARAMETER Experiment Name: At_100uM_ABA_Mutants_cDNA_P Parameter: Treatment Value: 100uM ABA vs. No Treatment
  misc_feature: MA Experiment ID: 20000087 Result: Up-regulated in Transcription
  misc_feature: MA Experiment 20000087 PARAMETER Experiment Name: At_100uM_ABA_Mutants_cDNA_P Parameter: Plant Line Value: WS
  misc_feature: MA Experiment 20000087 PARAMETER Experiment Name: At_100uM_ABA_Mutants_cDNA_P Parameter: Timepoint (hr) Value: 6
  misc_feature: MA Experiment 20000087 PARAMETER Experiment Name: At_100uM_ABA_Mutants_cDNA_P Parameter: Tissue Value: Aerial
  misc_feature: MA Experiment 20000087 PARAMETER Experiment Name: At_100uM_ABA_Mutants_cDNA_P Parameter: Treatment Value: 100uM ABA vs. No Treatment
  misc_feature: MA Experiment ID: 20000088 Result: Up-regulated in Transcription
  misc_feature: MA Experiment 20000088 PARAMETER Experiment Name: At_100uM_ABA_Mutants_cDNA_P Parameter: Plant Line Value: Landsberg
  misc_feature: MA Experiment 20000088 PARAMETER Experiment Name: At_100uM_ABA_Mutants_cDNA_P Parameter: Timepoint (hr) Value: 6
  misc_feature: MA Experiment 20000088 PARAMETER Experiment Name: At_100uM_ABA_Mutants_cDNA_P Parameter: Tissue Value: Aerial
  misc_feature: MA Experiment 20000088 PARAMETER Experiment Name: At_100uM_ABA_Mutants_cDNA_P Parameter: Treatment Value: 100uM ABA vs. No Treatment
  misc_feature: MA Experiment ID: 20000090 Result: Up-regulated in Transcription
  misc_feature: MA Experiment ID: 20000112 Result: Up-regulated in Transcription
  misc_feature: MA Experiment 20000112 PARAMETER Experiment Name: At_42deg_Heat_cDNA_P Parameter: Temperature (deg C) Value: 42 vs. 22
  misc_feature: MA Experiment 20000112 PARAMETER Experiment Name: At_42deg_Heat_cDNA_P Parameter: Timepoint (hr) Value: 2
  misc_feature: MA Experiment 20000112 PARAMETER Experiment Name: At_42deg_Heat_cDNA_P Parameter: Tissue Value: Aerial
  misc_feature: MA Experiment ID: 20000117 Result: Up-regulated in Transcription
  misc_feature: MA Experiment 20000117 PARAMETER Experiment Name: At_100uM_ABA_Mutants_cDNA_P Parameter: Plant Line Value: Columbia
  misc_feature: MA Experiment 20000117 PARAMETER Experiment Name: At_100uM_ABA_Mutants_cDNA_P Parameter: Timepoint (hr) Value: 6
  misc_feature: MA Experiment 20000117 PARAMETER Experiment Name: At_100uM_ABA_Mutants_cDNA_P Parameter: Tissue Value: Aerial
  misc_feature: MA Experiment 20000117 PARAMETER Experiment Name: At_100uM_ABA_Mutants_cDNA_P Parameter: Treatment Value: 100uM ABA vs. No Treatment
  misc_feature: MA Experiment ID: 20000144 Result: Up-regulated in Transcription
  misc_feature: MA Experiment 20000144 PARAMETER Experiment Name: At_42deg_Heat_cDNA_P Parameter: Temperature (deg C) Value: 42 vs. 22
  misc_feature: MA Experiment 20000144 PARAMETER Experiment Name: At_42deg_Heat_cDNA_P Parameter: Timepoint (hr) Value: 1
  misc_feature: MA Experiment 20000144 PARAMETER Experiment Name: At_42deg_Heat_cDNA_P Parameter: Tissue Value: Aerial
atgcgtaggtggttgtgctgtgcttgccacgttgaagaaccttaccattcttctgaaaatgaacacctcagaagccctaagcaccacaatgattttgggcatcacactagaaaaccacaggcggctgtgaagcctgatgctttgaaggagcctccatctattgatgtgcctgcattgtcattggatgagttgaaagaaaagaccgataactttggatcaaagtcattgattggtgaaggatcttacggcagagcctattatgcaaccttgaaagatggaaaggctgtcgcggtgaagaagcttgacaatgcagcggaacctgaatcaaatgttgagttcttgactcaggtctctagggtttccaagctgaagcacgataattttgttgagctcttcggttattgtgttgaagggaatttccgcattcttgcgtatgagtttgctactatgggatctttacatgacatcttacacgggaggaaaggagtccaaggagcacaaccaggtcctacgcttgactggatccaacgggtcagaatagcagttgatgcagctagaggacttgagtatttgcatgagaaagttcaacctgcagtaatacacagagatattcgatctagcaatgtgcttctctttgaagattttaaagccaagatcgctgattttaatctatcgaaccaatctcctgatatggctgctcgtcttcattctaccagagttttgggaaccttcggttaccacgcaccagagtatgcgatgactggtcaactgacacagaagagtgatgtttatagttttggtgtggtgcttttggagctcttgactggtaggaaacccgtcgatcatacgatgcctcgtggtcaacaaagtcttgttacttgggctactccaaggctaagtgaagacaaagtgaagcaatgtgttgatccaaaactaaagggagaatatcctcctaaagctgttgcaaagctcgctgcagtagcagcattgtgtgtgcaatatgaatcagagtttaggccaaacatgagcattgtggtaaaagctcttcaaccattgttgaggtcatcaacagcagcagctgtaccagtccaggaagcctga

SEQ ID NO: 85930 - protein, 366 aa, Arabidopsis thaliana; identical to SEQ ID NO: 77587
  peptide (1)..(366): Ceres Seq. ID no. 12684625
  misc_feature (1)..(366): Homolog of NCBI NO: 11259776 NR Description: protein kinase-like protein - Arabidopsis thaliana
  misc_feature (1)..(366): Homolog of NCBI NO: 30694970 NR Description: serine/threonine protein kinase, putative
  misc_feature (1)..(366): Homolog of NCBI NO: 30694972 NR Description: serine/threonine protein kinase, putative
  misc_feature (1)..(365): Homolog of NCBI NO: 18406188 NR Description: putative protein kinase; protein id: At2g43230.1, by cDNA: gi_15450905 [Arabidopsis thaliana] putative protein kinase [Arabidopsis thaliana]
  misc_feature (1)..(365): Homolog of NCBI NO: 25287594 NR Description: probable protein kinase [imported] - Arabidopsis

SEQ ID NO: 85931 - protein, 217 aa, Arabidopsis thaliana; identical to SEQ ID NO: 22807
  peptide (1)..(217): Ceres Seq. ID no. 12684626
  misc_feature (1)..(217): Homolog of NCBI NO: 11259776 NR Description: protein kinase-like protein - Arabidopsis thaliana
  misc_feature (1)..(217): Homolog of NCBI NO: 30694970 NR Description: serine/threonine protein kinase, putative
  misc_feature (1)..(217): Homolog of NCBI NO: 30694972 NR Description: serine/threonine protein kinase, putative
  misc_feature (1)..(216): Homolog of NCBI NO: 18406188 NR Description: putative protein kinase; protein id: At2g43230.1, by cDNA: gi_15450905 [Arabidopsis thaliana] putative protein kinase [Arabidopsis thaliana]
  misc_feature (1)..(216): Homolog of NCBI NO: 25287594 NR Description: probable protein kinase [imported] - Arabidopsis

SEQ ID NO: 85932 - DNA, 690 bp, Arabidopsis thaliana
  misc_feature (1)..(690): Ceres Seq. ID no. 12684677
  misc_feature: MA Experiment ID: 20000180 Result: Up-regulated in Transcription
  misc_feature: MA Experiment 20000180 PARAMETER Experiment Name: At_Germinating_Seeds_P Parameter: Age (hr) Value: 24 vs. 0
  misc_feature: MA Experiment 20000180 PARAMETER Experiment Name: At_Germinating_Seeds_P Parameter: Tissue Value: Germinating Seeds
  misc_feature: MA Experiment ID: 20000495 Result: Up-regulated in Transcription
  misc_feature: MA Experiment 20000495 PARAMETER Experiment Name: At_Guard_Cells_P Parameter: Harvest Date Value: 8/2/2002
  misc_feature: MA Experiment 20000495 PARAMETER Experiment Name: At_Guard_Cells_P Parameter: Organism Value: A. thaliana
  misc_feature: MA Experiment 20000495 PARAMETER Experiment Name: At_Guard_Cells_P Parameter: Tissue Value: Guard Cells vs. Leaves
  misc_feature: MA Experiment ID: 20000496 Result: Up-regulated in Transcription
  misc_feature: MA Experiment 20000496 PARAMETER Experiment Name: At_Guard_Cells_P Parameter: Harvest Date Value: 7/19/2002
  misc_feature: MA Experiment 20000496 PARAMETER Experiment Name: At_Guard_Cells_P Parameter: Organism Value: Canola
  misc_feature: MA Experiment 20000496 PARAMETER Experiment Name: At_Guard_Cells_P Parameter: Tissue Value: Guard Cells vs. Leaves
  misc_feature: MA Experiment ID: 20001451 Result: Up-regulated in Transcription
  misc_feature: MA Experiment 20001451 PARAMETER Experiment Name: At_Far-red-induction_P Parameter: Age (day) Value: 7
  misc_feature: MA Experiment 20001451 PARAMETER Experiment Name: At_Far-red-induction_P Parameter: Light Value: Far-red vs. White
  misc_feature: MA Experiment 20001451 PARAMETER Experiment Name: At_Far-red-induction_P Parameter: Organism Value: A. thaliana
  misc_feature: MA Experiment 20001451 PARAMETER Experiment Name: At_Far-red-induction_P Parameter: Plant Line Value: Columbia
  misc_feature: MA Experiment 20001451 PARAMETER Experiment Name: At_Far-red-induction_P Parameter: Timepoint (hr) Value: 24
  misc_feature: MA Experiment 20001451 PARAMETER Experiment Name: At_Far-red-induction_P Parameter: Tissue Value: Whole Plant
atgaaaagaatctccatcttcttctctatctcttggctatctctctctctaaactattcactcacacagtcattcttcgtcttcttctgtttcatgcaagattcaaaggcctcacctgcaagaaaaccttggtaccagagagctatggcggttgccagattcgcaacgaattggagaacaatccctaaatcatcatcacaacaacaaccagagaattttcgtccgtctcgaaaccctagcgtcaacagcaagtcatccaatcataaccaaatttatcaccagctgagaaaatgctcgtctctcaaggtagctgcgaattctttcactagggtttgcctctgcgctccgattggtccatacgacgacgtttttcggattcacgtcccgccgagaagaagttcaagctatcctccgtcgaagcctcttcctatggagacggcagtggcggtggcgacggcgaggatgagtgtggattcagggaggaggatatttagagggaagtcgttgagggaaaacgcgttgatgaggagattcgtggtggcggaagaagaagcgataatggagaatagaaagagagatcaaatggagattgtgaggaagagaaatcagatgaggaggaagaagaagcttggacctagtcctcttagtcgtatggttatcgctgaagatcaagaagtttgtcttctttga

SEQ ID NO: 85933 - protein, 229 aa, Arabidopsis thaliana
  peptide (1)..(229): Ceres Seq. ID no. 12684678
  misc_feature (1)..(229): Homolog of NCBI NO: 30695040 NR Description: expressed protein [Arabidopsis thaliana]
  misc_feature (30)..(229): Homolog of NCBI NO: 11288883 NR Description: hypothetical protein T16L24.230 - Arabidopsis >gi|6996304|emb|CAB75465.1| putative protein [Arabidopsis
  misc_feature (38)..(224): Homolog of NCBI NO: 21740779 NR Description: OSJNBa0067K08.20 [Oryza sativa (japonica
  misc_feature (134)..(224): Homolog of NCBI NO: 34905624 NR Description: hypothetical protein [Oryza sativa (japonica group)] >gi|23307550|dbj|BAC16686.1| hypothetical protein [Oryza
MKRISIFFSISWLSLSLNYSLTQSFFVFFCFMQDSKASPARKPWYQRAMAVARFATNWRTIPKSSSQQQPENFRPSRNPSVNSKSSNHNQIYHQLRKCSSLKVAANSFTRVCLCAPIGPYDDVFRIHVPPRRSSSYPPSKPLPMETAVAVATARMSVDSGRRIFRGKSLRENALMRRFVVAEEEAIMENRKRDQMEIVRKRNQMRRKKKLGPSPLSRMVIAEDQEVCLL

SEQ ID NO: 85934 - protein, 198 aa, Arabidopsis thaliana
  peptide (1)..(198): Ceres Seq. ID no. 12684679
  misc_feature (1)..(198): Homolog of NCBI NO: 30695040 NR Description: expressed protein [Arabidopsis thaliana]
  misc_feature (1)..(198): Homolog of NCBI NO: 11288883 NR Description: hypothetical protein T16L24.230 - Arabidopsis >gi|6996304|emb|CAB75465.1| putative protein [Arabidopsis
  misc_feature (7)..(193): Homolog of NCBI NO: 21740779 NR Description: OSJNBa0067K08.20 [Oryza sativa (japonica
  misc_feature (103)..(193): Homolog of NCBI NO: 34905624 NR Description: hypothetical protein [Oryza sativa (japonica group)] >gi|23307550|dbj|BAC16686.1| hypothetical protein [Oryza
MQDSKASPARKPWYQRAMAVARFATNWRTIPKSSSQQQPENFRPSRNPSVNSKSSNHNQIYHQLRKCSSLKVAANSFTRVCLCAPIGPYDDVFRIHVPPRRSSSYPPSKPLPMETAVAVATARMSVDSGRRIFRGKSLRENALMRRFVVAEEEAIMENRKRDQMEIVRKRNQMRRKKKLGPSPLSRMVIAEDQEVCLL

SEQ ID NO: 85935 - protein, 181 aa, Arabidopsis thaliana; identical to SEQ ID NO: 70852
  peptide (1)..(181): Ceres Seq. ID no. 12684680
  misc_feature (1)..(181): Homolog of NCBI NO: 30695040 NR Description: expressed protein [Arabidopsis thaliana]
  misc_feature (1)..(181): Homolog of NCBI NO: 11288883 NR Description: hypothetical protein T16L24.230 - Arabidopsis >gi|6996304|emb|CAB75465.1| putative protein [Arabidopsis
  misc_feature (1)..(176): Homolog of NCBI NO: 21740779 NR Description: OSJNBa0067K08.20 [Oryza sativa (japonica
  misc_feature (86)..(176): Homolog of NCBI NO: 34905624 NR Description: hypothetical protein [Oryza sativa (japonica group)] >gi|23307550|dbj|BAC16686.1| hypothetical protein [Oryza

SEQ ID NO: 85936 - DNA, 1699 bp, Arabidopsis thaliana
  misc_feature (1)..(1699): Ceres Seq. ID no. 12684720
  misc_feature: MA Experiment ID: 108434 Result: Up-regulated in Transcription
  misc_feature: MA Experiment 108434 PARAMETER Experiment Name: At_Root_Tips_cDNA_P Parameter: Tissue Value: Root Tips
  misc_feature: MA Experiment ID: 108461 Result: Up-regulated in Transcription
  misc_feature: MA Experiment 108461 PARAMETER Experiment Name: At_Germinating_Seeds_cDNA_P Parameter: Age (day) Value: 1 vs. 0
  misc_feature: MA Experiment 108461 PARAMETER Experiment Name: At_Germinating_Seeds_cDNA_P Parameter: Tissue Value: Germinating Seeds
  misc_feature: MA Experiment ID: 108463 Result: Up-regulated in Transcription
  misc_feature: MA Experiment 108463 PARAMETER Experiment Name: At_Germinating_Seeds_cDNA_P Parameter: Age (day) Value: 3 vs. 0
  misc_feature: MA Experiment 108463 PARAMETER Experiment Name: At_Germinating_Seeds_cDNA_P Parameter: Tissue Value: Germinating Seeds
  misc_feature: MA Experiment ID: 108464 Result: Up-regulated in Transcription
  misc_feature: MA Experiment 108464 PARAMETER Experiment Name: At_Germinating_Seeds_cDNA_P Parameter: Age (day) Value: 4 vs. 0
  misc_feature: MA Experiment 108464 PARAMETER Experiment Name: At_Germinating_Seeds_cDNA_P Parameter: Tissue Value: Germinating Seeds
  misc_feature: MA Experiment ID: 108569 Result: Up-regulated in Transcription
  misc_feature: MA Experiment 108569 PARAMETER Experiment Name: At_0.001%_MeJA__cDNA_P Parameter: Timepoint (hr) Value: 6
  misc_feature: MA Experiment 108569 PARAMETER Experiment Name: At_0.001%_MeJA__cDNA_P Parameter: Tissue Value: Aerial
  misc_feature: MA Experiment 108569 PARAMETER Experiment Name: At_0.001%_MeJA__cDNA_P Parameter: Treatment Value: 0.001% MeJA vs. No Treatment
  misc_feature: MA Experiment ID: 108573 Result: Up-regulated in Transcription
  misc_feature: MA Experiment 108573 PARAMETER Experiment Name: At_Drought_cDNA_P Parameter: Timepoint (hr) Value: 6
  misc_feature: MA Experiment 108573 PARAMETER Experiment Name: At_Drought_cDNA_P Parameter: Tissue Value: Aerial
  misc_feature: MA Experiment 108573 PARAMETER Experiment Name: At_Drought_cDNA_P Parameter: Treatment Value: Drought vs. No Drought
  misc_feature: MA Experiment ID: 108595 Result: Down-regulated in Transcription
  misc_feature: MA Experiment 108595 PARAMETER Experiment Name: At_Ler-pi_Ovule_cDNA_P Parameter: Plant Line Value: null
  misc_feature: MA Experiment ID: 20000087 Result: Down-regulated in Transcription
  misc_feature: MA Experiment 20000087 PARAMETER Experiment Name: At_100uM_ABA_Mutants_cDNA_P Parameter: Plant Line Value: WS
  misc_feature: MA Experiment 20000087 PARAMETER Experiment Name: At_100uM_ABA_Mutants_cDNA_P Parameter: Timepoint (hr) Value: 6
  misc_feature: MA Experiment 20000087 PARAMETER Experiment Name: At_100uM_ABA_Mutants_cDNA_P Parameter: Tissue Value: Aerial
  misc_feature: MA Experiment 20000087 PARAMETER Experiment Name: At_100uM_ABA_Mutants_cDNA_P Parameter: Treatment Value: 100uM ABA vs. No Treatment
  misc_feature: MA Experiment ID: 20000113 Result: Down-regulated in Transcription
  misc_feature: MA Experiment 20000113 PARAMETER Experiment Name: At_42deg_Heat_cDNA_P Parameter: Temperature (deg C) Value: 42 vs. 22
  misc_feature: MA Experiment 20000113 PARAMETER Experiment Name: At_42deg_Heat_cDNA_P Parameter: Timepoint (hr) Value: 8
  misc_feature: MA Experiment 20000113 PARAMETER Experiment Name: At_42deg_Heat_cDNA_P Parameter: Tissue Value: Aerial
  misc_feature: MA Experiment ID: 20000306 Result: Up-regulated in Transcription
  misc_feature: MA Experiment 20000306 PARAMETER Experiment Name: At_Germinating_Seeds_Sub_P Parameter: Age (hr) Value: 6 vs. 0
  misc_feature: MA Experiment 20000306 PARAMETER Experiment Name: At_Germinating_Seeds_Sub_P Parameter: Organism Value: A. thaliana
  misc_feature: MA Experiment 20000306 PARAMETER Experiment Name: At_Germinating_Seeds_Sub_P Parameter: Plant Line Value: WS
  misc_feature: MA Experiment 20000306 PARAMETER Experiment Name: At_Germinating_Seeds_Sub_P Parameter: Tissue Value: Germinating Seeds
  misc_feature: MA Experiment ID: 20000307 Result: Up-regulated in Transcription
  misc_feature: MA Experiment 20000307 PARAMETER Experiment Name: At_Germinating_Seeds_Sub_P Parameter: Age (hr) Value: 24 vs. 0
  misc_feature: MA Experiment 20000307 PARAMETER Experiment Name: At_Germinating_Seeds_Sub_P Parameter: Organism Value: A. thaliana
  misc_feature: MA Experiment 20000307 PARAMETER Experiment Name: At_Germinating_Seeds_Sub_P Parameter: Plant Line Value: WS
  misc_feature: MA Experiment 20000307 PARAMETER Experiment Name: At_Germinating_Seeds_Sub_P Parameter: Tissue Value: Germinating Seeds
aaaaaatttattagccattcgagaaacaaggcatctctatttttttgcttcttctaatagacttcttcgtcactgatctcccacgacgatctcccaaactcatttctctacgttcatcgatctctctctttctcgtttgctctacgaaaatcagccatggatgaagagtacgaggttattgttctcggcaccggtctcaaggagtgtatcctcagcggtctcctttccgtcgatggtgtcaaggtgcttcacatggacaggaatgactactatggtggagaatcaacttcccttaatctcaatcagctttggaagaagttcaggggagaagagaaggctcctgagcatttaggcgctagccgggattacaatgttgacatgatgcctaagtttatgatgggaaatggcaagcttgttcgtacccttattcatacagatgttacaaagtatttgtccttcaaagctgttgatggaagctatgttttcgtcaaaggaaaggttcaaaaggtgccagctactcctatggaggccctgaaatcttctctcatgggcatatttgagaaacgtcgagccggcaagtttttcagttttgttcaagaatacgatgagaaggacccaaaaacacacgatggaatggatttgaccagagttacaacaaaggaactgattgcgaaatatggtcttgatggcaacactattgactttattggtcacgcagtggcacttcacacgaatgaccaacatctcgaccaacccgcctttgatactgtaatgagaatgaagctctatgcggaatctcttgcacgtttccaaggaacatctccatatatttatcctctctatgggttgggagaactaccccaggcatttgcacgacttagtgctgtctatggtggcacatatatgttgaacaaacctgagtgcaaggtagagtttgacgagggaggtaaggttattggtgtaacatctgagggagagactgctaaatgcaaaaagattgtgtgtgacccttcatacctgccgaacaaggttaggaagattggcagggttgctcgggccatcgccattatgagccacccgattccgaacaccaatgattctcactcagtgcaggtcatcataccccagaaacagttggcccgcaaatcggatatgtatgtcttctgttgttcgtactcccacaacgttgctcccaagggaaaattcattgcatttgtgtctacagatgcagagactgataaccctcaaaccgaactaaagcctggaactgatcttttgggtcctgttgatgagatattcttcgacatgtatgatagatacgagcctgtcaacgagccagagttggacaactgctttatttcaacgagctatgatgctacaacacactttgagacaactgttgcggatgtgttgaacatgtataccctaatcaccggaaagcaactggacctaagtgttgacctgagtgccgcaagtgctgcagaggaatgaagaatcatcaccagatcgctccctctctagttgattttctaaaagcttgttttgctcatttctctgtttccgactcttgctttcgtgttcttttttggtttgaactttgaatacaaaatcagaatgatccttcatgttttagaaactaacaaccatgtgtctccgtttgatgttggattcctcggttaaagacttataaatgctcttt

SEQ ID NO: 85937 - protein, 444 aa, Arabidopsis thaliana; identical to SEQ ID NO: 26953
  peptide (1)..(444): Ceres Seq. ID no. 12684721
  misc_feature (1)..(438): Pfam Name: GDP dissociation inhibitor Pfam Description: GDP dissociation inhibitor
  misc_feature (1)..(444): Homolog of NCBI NO: 15232210 NR Description: Rab GDP dissociation inhibitor; protein id: supported by cDNA: gi_19698844, supported by cDNA: gi_2446980
  misc_feature (1)..(444): Homolog of NCBI NO: 15224814 NR Description: GDP dissociation inhibitor; protein id: supported by cDNA: 29536., supported by cDNA: gi_13605640, by cDNA: gi_15215777, supported by cDNA: gi_1655423, supported by
  misc_feature (1)..(444): Homolog of NCBI NO: 1550740 NR Description: GDP-associated inhibitor [Arabidopsis thaliana]
  misc_feature (1)..(444): Homolog of NCBI NO: 17473582 NR Description: GDP dissociation inhibitor [Arabidopsis thaliana]
  misc_feature (1)..(444): Homolog of NCBI NO: 21592535 NR Description: GDP dissociation inhibitor [Arabidopsis thaliana]
  misc_feature (1)..(444): Homolog of NCBI NO: 3175990 NR Description: GDP dissociation inhibitor [Cicer arietinum]
  misc_feature (1)..(444): Homolog of NCBI NO: 7489133 NR Description: GDP dissociation inhibitor - common tobacco
  misc_feature (1)..(444): Homolog of NCBI NO: 7489478 NR Description: GDP dissociation inhibitor protein - rice
  misc_feature (1)..(444): Homolog of NCBI NO: 7489479 NR Description: GDP dissociation inhibitor protein - rice
  misc_feature (1)..(444): Homolog of NCBI NO: 15242440 NR Description: GDP dissociation inhibitor; protein id:

SEQ ID NO: 85938 - protein, 412 aa, Arabidopsis thaliana; identical to SEQ ID NO: 26954
  peptide (1)..(412): Ceres Seq. ID no. 12684722
  misc_feature (1)..(406): Pfam Name: GDP dissociation inhibitor Pfam Description: GDP dissociation inhibitor
  misc_feature (1)..(412): Homolog of NCBI NO: 15232210 NR Description: Rab GDP dissociation inhibitor; protein id: supported by cDNA: gi_19698844, supported by cDNA: gi_2446980
  misc_feature (1)..(412): Homolog of NCBI NO: 15224814 NR Description: GDP dissociation inhibitor; protein id: supported by cDNA: 29536., supported by cDNA: gi_13605640, by cDNA: gi_15215777, supported by cDNA: gi_1655423, supported by
  misc_feature (1)..(412): Homolog of NCBI NO: 1550740 NR Description: GDP-associated inhibitor [Arabidopsis thaliana]
  misc_feature (1)..(412): Homolog of NCBI NO: 17473582 NR Description: GDP dissociation inhibitor [Arabidopsis thaliana]
  misc_feature (1)..(412): Homolog of NCBI NO: 21592535 NR Description: GDP dissociation inhibitor [Arabidopsis thaliana]
  misc_feature (1)..(412): Homolog of NCBI NO: 3175990 NR Description: GDP dissociation inhibitor [Cicer arietinum]
  misc_feature (1)..(412): Homolog of NCBI NO: 7489133 NR Description: GDP dissociation inhibitor - common tobacco
  misc_feature (1)..(412): Homolog of NCBI NO: 7489478 NR Description: GDP dissociation inhibitor protein - rice
  misc_feature (1)..(412): Homolog of NCBI NO: 7489479 NR Description: GDP dissociation inhibitor protein - rice
  misc_feature (1)..(412): Homolog of NCBI NO: 15242440 NR Description: GDP dissociation inhibitor; protein id:

SEQ ID NO: 85939 - protein, 370 aa, Arabidopsis thaliana; identical to SEQ ID NO: 26955
  peptide (1)..(370): Ceres Seq. ID no. 12684723
  misc_feature (1)..(364): Pfam Name: GDP dissociation inhibitor Pfam Description: GDP dissociation inhibitor
  misc_feature (1)..(370): Homolog of NCBI NO: 15232210 NR Description: Rab GDP dissociation inhibitor; protein id: supported by cDNA: gi_19698844, supported by cDNA: gi_2446980
  misc_feature (1)..(370): Homolog of NCBI NO: 15224814 NR Description: GDP dissociation inhibitor; protein id: supported by cDNA: 29536., supported by cDNA: gi_13605640, by cDNA: gi_15215777, supported by cDNA: gi_1655423, supported by
  misc_feature (1)..(370): Homolog of NCBI NO: 1550740 NR Description: GDP-associated inhibitor [Arabidopsis thaliana]
  misc_feature (1)..(370): Homolog of NCBI NO: 17473582 NR Description: GDP dissociation inhibitor [Arabidopsis thaliana]
  misc_feature (1)..(370): Homolog of NCBI NO: 21592535 NR Description: GDP dissociation inhibitor [Arabidopsis thaliana]
  misc_feature (1)..(370): Homolog of NCBI NO: 3175990 NR Description: GDP dissociation inhibitor [Cicer arietinum]
  misc_feature (1)..(370): Homolog of NCBI NO: 7489133 NR Description: GDP dissociation inhibitor - common tobacco
  misc_feature (1)..(370): Homolog of NCBI NO: 7489478 NR Description: GDP dissociation inhibitor protein - rice
  misc_feature (1)..(370): Homolog of NCBI NO: 7489479 NR Description: GDP dissociation inhibitor protein - rice
  misc_feature (1)..(370): Homolog of NCBI NO: 15242440 NR Description: GDP dissociation inhibitor; protein id:

SEQ ID NO: 85940 - DNA, 1074 bp, Arabidopsis thaliana
  misc_feature (1)..(1074): Ceres Seq. ID no. 12684753
  misc_feature: MA Experiment ID: 20000166 Result: Down-regulated in Transcription
  misc_feature: MA Experiment 20000166 PARAMETER Experiment Name: At_100uM_ABA_P Parameter: Age (day) Value: 14
  misc_feature: MA Experiment 20000166 PARAMETER Experiment Name: At_100uM_ABA_P Parameter: Organism Value: A. thaliana
  misc_feature: MA Experiment 20000166 PARAMETER Experiment Name: At_100uM_ABA_P Parameter: Plant Line Value: WS
  misc_feature: MA Experiment 20000166 PARAMETER Experiment Name: At_100uM_ABA_P Parameter: Timepoint (hr) Value: 1
  misc_feature: MA Experiment 20000166 PARAMETER Experiment Name: At_100uM_ABA_P Parameter: Tissue Value: Aerial
  misc_feature: MA Experiment 20000166 PARAMETER Experiment Name: At_100uM_ABA_P Parameter: Treatment Value: 100uM ABA vs. No Treatment
  misc_feature: MA Experiment ID: 20000169 Result: Down-regulated in Transcription
  misc_feature: MA Experiment 20000169 PARAMETER Experiment Name: At_100uM_ABA_P Parameter: Age (day) Value: 14
  misc_feature: MA Experiment 20000169 PARAMETER Experiment Name: At_100uM_ABA_P Parameter: Organism Value: A. thaliana
  misc_feature: MA Experiment 20000169 PARAMETER Experiment Name: At_100uM_ABA_P Parameter: Plant Line Value: WS
  misc_feature: MA Experiment 20000169 PARAMETER Experiment Name: At_100uM_ABA_P Parameter: Timepoint (hr) Value: 6
  misc_feature: MA Experiment 20000169 PARAMETER Experiment Name: At_100uM_ABA_P Parameter: Tissue Value: Aerial
  misc_feature: MA Experiment 20000169 PARAMETER Experiment Name: At_100uM_ABA_P Parameter: Treatment Value: 100uM ABA vs. No Treatment
  misc_feature: MA Experiment ID: 20000171 Result: Down-regulated in Transcription
  misc_feature: MA Experiment 20000171 PARAMETER Experiment Name: At_42deg_Heat_P Parameter: Age (day) Value: 14
  misc_feature: MA Experiment 20000171 PARAMETER Experiment Name: At_42deg_Heat_P Parameter: Organism Value: A. thaliana
  misc_feature: MA Experiment 20000171 PARAMETER Experiment Name: At_42deg_Heat_P Parameter: Plant Line Value: WS
  misc_feature: MA Experiment 20000171 PARAMETER Experiment Name: At_42deg_Heat_P Parameter: Temperature (deg C) Value: 42 vs. 22
  misc_feature: MA Experiment 20000171 PARAMETER Experiment Name: At_42deg_Heat_P Parameter: Timepoint (hr) Value: 1
  misc_feature: MA Experiment 20000171 PARAMETER Experiment Name: At_42deg_Heat_P Parameter: Tissue Value: Aerial
  misc_feature: MA Experiment ID: 20000173 Result: Down-regulated in Transcription
  misc_feature: MA Experiment 20000173 PARAMETER Experiment Name: At_42deg_Heat_P Parameter: Age (day) Value: 14
  misc_feature: MA Experiment 20000173 PARAMETER Experiment Name: At_42deg_Heat_P Parameter: Organism Value: A. thaliana
  misc_feature: MA Experiment 20000173 PARAMETER Experiment Name: At_42deg_Heat_P Parameter: Plant Line Value: WS
  misc_feature: MA Experiment 20000173 PARAMETER Experiment Name: At_42deg_Heat_P Parameter: Temperature (deg C) Value: 42 vs. 22
  misc_feature: MA Experiment 20000173 PARAMETER Experiment Name: At_42deg_Heat_P Parameter: Timepoint (hr) Value: 6
  misc_feature: MA Experiment 20000173 PARAMETER Experiment Name: At_42deg_Heat_P Parameter: Tissue Value: Aerial
  misc_feature: MA Experiment ID: 20000184 Result: Down-regulated in Transcription
  misc_feature: MA Experiment 20000184 PARAMETER Experiment Name: At_Shoots__P Parameter: Age (day) Value: 7
  misc_feature: MA Experiment 20000184 PARAMETER Experiment Name: At_Shoots__P Parameter: Tissue Value: Shoots vs. Whole Plant
  misc_feature: MA Experiment ID: 20000234 Result: Down-regulated in Transcription
  misc_feature: MA Experiment 20000234 PARAMETER Experiment Name: At_Siliques_P Parameter: Age (day) Value: 21
  misc_feature: MA Experiment 20000234 PARAMETER Experiment Name: At_Siliques_P Parameter: Organism Value: A. thaliana
  misc_feature: MA Experiment 20000234 PARAMETER Experiment Name: At_Siliques_P Parameter: Plant Line Value: WS
  misc_feature: MA Experiment 20000234 PARAMETER Experiment Name: At_Siliques_P Parameter: Tissue Value: Less Than 5mm Siliques vs. Whole Plant
  misc_feature: MA Experiment ID: 20000438 Result: Down-regulated in Transcription
  misc_feature: MA Experiment 20000438 PARAMETER Experiment Name: At_Shoots__P Parameter: Age (day) Value: 14
  misc_feature: MA Experiment 20000438 PARAMETER Experiment Name: At_Shoots__P Parameter: Tissue Value: Shoots vs. Whole Plant
  misc_feature: MA Experiment ID: 20000443 Result: Up-regulated in Transcription
  misc_feature: MA Experiment 20000443 PARAMETER Experiment Name: At_1uM_BR-BRZ__P Parameter: Tissue Value: Shoot Apices
  misc_feature: MA Experiment 20000443 PARAMETER Experiment Name: At_1uM_BR-BRZ__P Parameter: Treatment Value: 1uM BRZ vs. No Treatment
  misc_feature: MA Experiment ID: 20000453 Result: Down-regulated in Transcription
  misc_feature: MA Experiment 20000453 PARAMETER Experiment Name: At_100uM_ABA_P Parameter: Age (day) Value: 15
  misc_feature: MA Experiment 20000453 PARAMETER Experiment Name: At_100uM_ABA_P Parameter: Organism Value: A. thaliana
  misc_feature: MA Experiment 20000453 PARAMETER Experiment Name: At_100uM_ABA_P Parameter: Plant Line Value: WS
  misc_feature: MA Experiment 20000453 PARAMETER Experiment Name: At_100uM_ABA_P Parameter: Timepoint (hr) Value: 24
  misc_feature: MA Experiment 20000453 PARAMETER Experiment Name: At_100uM_ABA_P Parameter: Tissue Value: Aerial
  misc_feature: MA Experiment 20000453 PARAMETER Experiment Name: At_100uM_ABA_P Parameter: Treatment Value: 100uM ABA vs. No Treatment
  misc_feature: MA Experiment ID: 20001248 Result: Up-regulated in Transcription
  misc_feature: MA Experiment 20001248 PARAMETER Experiment Name: At_Far-red-induction_P Parameter: Age (day) Value: 7
  misc_feature: MA Experiment 20001248 PARAMETER Experiment Name: At_Far-red-induction_P Parameter: Light Value: Far-red vs. White
  misc_feature: MA Experiment 20001248 PARAMETER Experiment Name: At_Far-red-induction_P Parameter: Organism Value: A. thaliana
  misc_feature: MA Experiment 20001248 PARAMETER Experiment Name: At_Far-red-induction_P Parameter: Plant Line Value: Columbia
  misc_feature: MA Experiment 20001248 PARAMETER Experiment Name: At_Far-red-induction_P Parameter: Timepoint (hr) Value: 4
  misc_feature: MA Experiment 20001248 PARAMETER Experiment Name: At_Far-red-induction_P Parameter: Tissue Value: Whole Plant
  misc_feature: MA Experiment ID: 20001450 Result: Up-regulated in Transcription
  misc_feature: MA Experiment 20001450 PARAMETER Experiment Name: At_Far-red-induction_P Parameter: Age (day) Value: 7
  misc_feature: MA Experiment 20001450 PARAMETER Experiment Name: At_Far-red-induction_P Parameter: Light Value: Far-red vs. White
  misc_feature: MA Experiment 20001450 PARAMETER Experiment Name: At_Far-red-induction_P Parameter: Organism Value: A. thaliana
  misc_feature: MA Experiment 20001450 PARAMETER Experiment Name: At_Far-red-induction_P Parameter: Plant Line Value: Columbia
  misc_feature: MA Experiment 20001450 PARAMETER Experiment Name: At_Far-red-induction_P Parameter: Timepoint (hr) Value: 8
  misc_feature: MA Experiment 20001450 PARAMETER Experiment Name: At_Far-red-induction_P Parameter: Tissue Value: Whole Plant
  misc_feature: MA Experiment ID: 20001554 Result: Down-regulated in Transcription
  misc_feature: MA Experiment 20001554 PARAMETER Experiment Name: At_Drought_Soil_Dry_P Parameter: Age (day) Value: 21
  misc_feature: MA Experiment 20001554 PARAMETER Experiment Name: At_Drought_Soil_Dry_P Parameter: Organism Value: A. thaliana
  misc_feature: MA Experiment 20001554 PARAMETER Experiment Name: At_Drought_Soil_Dry_P Parameter: Plant Line Value: WS
  misc_feature: MA Experiment 20001554 PARAMETER Experiment Name: At_Drought_Soil_Dry_P Parameter: Post Timepoint (hr) Value: None
  misc_feature: MA Experiment 20001554 PARAMETER Experiment Name: At_Drought_Soil_Dry_P Parameter: Post-Treatment Value: None
  misc_feature: MA Experiment 20001554 PARAMETER Experiment Name: At_Drought_Soil_Dry_P Parameter: Timepoint (day) Value: 7
  misc_feature: MA Experiment 20001554 PARAMETER Experiment Name: At_Drought_Soil_Dry_P Parameter: Treatment Value: Drought vs. No Drought
  misc_feature: MA Experiment ID: 20001555 Result: Down-regulated in Transcription
  misc_feature: MA Experiment 20001555 PARAMETER Experiment Name: At_Drought_Soil_Dry_P Parameter: Age (day) Value: 24
  misc_feature: MA Experiment 20001555 PARAMETER Experiment Name: At_Drought_Soil_Dry_P Parameter: Organism Value: A. thaliana
  misc_feature: MA Experiment 20001555 PARAMETER Experiment Name: At_Drought_Soil_Dry_P Parameter: Plant Line Value: WS
  misc_feature: MA Experiment 20001555 PARAMETER Experiment Name: At_Drought_Soil_Dry_P Parameter: Post Timepoint (hr) Value: None
  misc_feature: MA Experiment 20001555 PARAMETER Experiment Name: At_Drought_Soil_Dry_P Parameter: Post-Treatment Value: None
  misc_feature: MA Experiment 20001555 PARAMETER Experiment Name: At_Drought_Soil_Dry_P Parameter: Timepoint (day) Value: 10
  misc_feature: MA Experiment 20001555 PARAMETER Experiment Name: At_Drought_Soil_Dry_P Parameter: Treatment Value: Drought vs. No Drought
  misc_feature: MA Experiment ID: 20001556 Result: Down-regulated in Transcription
  misc_feature: MA Experiment 20001556 PARAMETER Experiment Name: At_Drought_Soil_Dry_P Parameter: Age (day) Value: 26
  misc_feature: MA Experiment 20001556 PARAMETER Experiment Name: At_Drought_Soil_Dry_P Parameter: Organism Value: A. thaliana
  misc_feature: MA Experiment 20001556 PARAMETER Experiment Name: At_Drought_Soil_Dry_P Parameter: Plant Line Value: WS
  misc_feature: MA Experiment 20001556 PARAMETER Experiment Name: At_Drought_Soil_Dry_P Parameter: Post Timepoint (hr) Value: None
  misc_feature: MA Experiment 20001556 PARAMETER Experiment Name: At_Drought_Soil_Dry_P Parameter: Post-Treatment Value: None
  misc_feature: MA Experiment 20001556 PARAMETER Experiment Name: At_Drought_Soil_Dry_P Parameter: Timepoint (day) Value: 12
  misc_feature: MA Experiment 20001556 PARAMETER Experiment Name: At_Drought_Soil_Dry_P Parameter: Treatment Value: Drought vs. No Drought
  misc_feature: MA Experiment ID: 20001558 Result: Up-regulated in Transcription
  misc_feature: MA Experiment 20001558 PARAMETER Experiment Name: At_Drought_Soil_Dry_P Parameter: Age (day) Value: 27
  misc_feature: MA Experiment 20001558 PARAMETER Experiment Name: At_Drought_Soil_Dry_P Parameter: Organism Value: A. thaliana
  misc_feature: MA Experiment 20001558 PARAMETER Experiment Name: At_Drought_Soil_Dry_P Parameter: Plant Line Value: WS
  misc_feature: MA Experiment 20001558 PARAMETER Experiment Name: At_Drought_Soil_Dry_P Parameter: Post Timepoint (hr) Value: 6
  misc_feature: MA Experiment 20001558 PARAMETER Experiment Name: At_Drought_Soil_Dry_P Parameter: Post-Treatment Value: Re-Water vs. No Drought
  misc_feature: MA Experiment 20001558 PARAMETER Experiment Name: At_Drought_Soil_Dry_P Parameter: Timepoint (day) Value: 13
  misc_feature: MA Experiment 20001558 PARAMETER Experiment Name: At_Drought_Soil_Dry_P Parameter: Treatment Value: Drought vs. No Drought
atggaggaaacaaataagagtgtggttaatgattactttaccagtgctatggaacttacagagtcaggtgaccctcacgtgcctacccgttacattcttccaccttcacaacgaccaatgctcggtccaagcattggcaccagtaccatcaatcttcctgtcattgatctctccttcttacacgatcctttgcttagactatgtgtcatccatgagattgaattggcctgcaagggatttggtttctttcaggttataaaccatggaatatcatcagcagtggtgaaagatgcacaagattcagctacaaggttctttgacttacctgccgatgagaagatgcatctggtttctgataattttcaggagccagtaaggtatggtaccagcataaaccattcaacagacagagttcattactggagagatttcataaaacattactcccatcctctctcaaactggatcaatttgtggccttccaatcctccctgctacaaggaaaaggtggggaaatacgcagaagcaacgcatgttttacataagcaactaattgaagctatctcagaaagtctaggactggagaaaaattacttacaggaagaaatagaagaaggctcacaagtcatggcggtaaactgctatccagcttgtcctgaacccgagattgccttgggaatgccaccacactcggactatggctcgctgacaatcttactccagagtagcgaagggctgcagataaaggactgcaacaacaactgggtttgtgtgccgtatattgaaggagctctgatagtccagttgggagatcaggtagaagtgatgagcaatggcatatacaagagtgtggttcatcgtgtaacagtgaacaaagattacaagcggctctcttttgcaagtcttcacagtctacctatgcacaagaaaataagtccagcaactcagctcgtcaatgaaaataaaccagctgcatatggagaattcagcttcaacgattttcttgattatatatccagaaacgatattacacagaaaagattcattgatacactcagaaagaaaaacctctga

SEQ ID NO: 85941 - protein, 357 aa, Arabidopsis thaliana
  peptide (1)..(357): Ceres Seq. ID no. 12684754
  misc_feature (206)..(305): Pfam Name: 2OG-Fe(II) oxygenase superfamily Pfam Description: 2OG-Fe(II) oxygenase superfamily
  misc_feature (167)..(357): Homolog of NCBI NO: 15232291 NR Description: SRG1 - like protein; protein id: At3g60290.1
  misc_feature (1)..(126): Homolog of NCBI NO: 15232291 NR Description: SRG1 - like protein; protein id: At3g60290.1
  misc_feature (1)..(356): Homolog of NCBI NO: 30689834 NR Description: flavonol synthase family [Arabidopsis thaliana]
  misc_feature (7)..(356): Homolog of NCBI NO: 7433240 NR Description: probable flavonol synthase [imported] - thaliana >gi|20197022|gb|AAM14878.1| putative flavonol synthase
  misc_feature (85)..(356): Homolog of NCBI NO: 15240797 NR Description: putative protein; protein id: At5g07480.1
  misc_feature (80)..(354): Homolog of NCBI NO: 15228020 NR Description: putative giberellin beta-hydroxylase; protein id: [Arabidopsis thaliana] >gi|25285698|pir||E84783 probable
  misc_feature (27)..(353): Homolog of NCBI NO: 37536444 NR Description: unknown protein [Oryza sativa (japonica
  misc_feature (26)..(336): Homolog of NCBI NO: 15235124 NR Description: putative flavanone 3-beta-hydroxylase; protein At4g10490.1 [Arabidopsis thaliana] >gi|7433238|pir||T04184
  misc_feature (19)..(353): Homolog of NCBI NO: 38345873 NR Description: OSJNBa0064M23.15 [Oryza sativa (japonica
  misc_feature (27)..(353): Homolog of NCBI NO: 38345872 NR Description: OSJNBa0064M23.14 [Oryza sativa (japonica
MEETNKSVVNDYFTSAMELTESGDPHVPTRYILPPSQRPMLGPSIGTSTINLPVIDLSFLHDPLLRLCVIHEIELACKGFGFFQVINHGISSAVVKDAQDSATRFFDLPADEKMHLVSDNFQEPVRYGTSINHSTDRVHYWRDFIKHYSHPLSNWINLWPSNPPCYKEKVGKYAEATHVLHKQLIEAISESLGLEKNYLQEEIEEGSQVMAVNCYPACPEPEIALGMPPHSDYGSLTILLQSSEGLQIKDCNNNWVCVPYIEGALIVQLGDQVEVMSNGIYKSVVHRVTVNKDYKRLSFASLHSLPMHKKISPATQLVNENKPAAYGEFSFNDFLDYISRNDITQKRFIDTLRKKNL

SEQ ID NO: 85942 - protein, 341 aa, Arabidopsis thaliana
  peptide (1)..(341): Ceres Seq. ID no. 12684755
  misc_feature (190)..(289): Pfam Name: 2OG-Fe(II) oxygenase superfamily Pfam Description: 2OG-Fe(II) oxygenase superfamily
  misc_feature (151)..(341): Homolog of NCBI NO: 15232291 NR Description: SRG1 - like protein; protein id: At3g60290.1
  misc_feature (1)..(110): Homolog of NCBI NO: 15232291 NR Description: SRG1 - like protein; protein id: At3g60290.1
  misc_feature (1)..(340): Homolog of NCBI NO: 30689834 NR Description: flavonol synthase family [Arabidopsis thaliana]
  misc_feature (1)..(340): Homolog of NCBI NO: 7433240 NR Description: probable flavonol synthase [imported] - thaliana >gi|20197022|gb|AAM14878.1| putative flavonol synthase
  misc_feature (69)..(340): Homolog of NCBI NO: 15240797 NR Description: putative protein; protein id: At5g07480.1
  misc_feature (64)..(338): Homolog of NCBI NO: 15228020 NR Description: putative giberellin beta-hydroxylase; protein id: [Arabidopsis thaliana] >gi|25285698|pir||E84783 probable
  misc_feature (11)..(337): Homolog of NCBI NO: 37536444 NR Description: unknown protein [Oryza sativa (japonica
  misc_feature (10)..(320): Homolog of NCBI NO: 15235124 NR Description: putative flavanone 3-beta-hydroxylase; protein At4g10490.1 [Arabidopsis thaliana] >gi|7433238|pir||T04184
  misc_feature (3)..(337): Homolog of NCBI NO: 38345873 NR Description: OSJNBa0064M23.15 [Oryza sativa (japonica
  misc_feature (11)..(337): Homolog of NCBI NO: 38345872 NR Description: OSJNBa0064M23.14 [Oryza sativa (japonica
MELTESGDPHVPTRYILPPSQRPMLGPSIGTSTINLPVIDLSFLHDPLLRLCVIHEIELACKGFGFFQVINHGISSAVVKDAQDSATRFFDLPADEKMHLVSDNFQEPVRYGTSINHSTDRVHYWRDFIKHYSHPLSNWINLWPSNPPCYKEKVGKYAEATHVLHKQLIEAISESLGLEKNYLQEEIEEGSQVMAVNCYPACPEPEIALGMPPHSDYGSLTILLQSSEGLQIKDCNNNWVCVPYIEGALIVQLGDQVEVMSNGIYKSVVHRVTVNKDYKRLSFASLHSLPMHKKISPATQLVNENKPAAYGEFSFNDFLDYISRNDITQKRFIDTLRKKNL

SEQ ID NO: 85943 - protein, 318 aa, Arabidopsis thaliana
  peptide (1)..(318): Ceres Seq. ID no. 12684756
  misc_feature (167)..(266): Pfam Name: 2OG-Fe(II) oxygenase superfamily Pfam Description: 2OG-Fe(II) oxygenase superfamily
  misc_feature (128)..(318): Homolog of NCBI NO: 15232291 NR Description: SRG1 - like protein; protein id: At3g60290.1
  misc_feature (1)..(87): Homolog of NCBI NO: 15232291 NR Description: SRG1 - like protein; protein id: At3g60290.1
  misc_feature (1)..(317): Homolog of NCBI NO: 30689834 NR Description: flavonol synthase family [Arabidopsis thaliana]
  misc_feature (1)..(317): Homolog of NCBI NO: 7433240 NR Description: probable flavonol synthase [imported] - thaliana >gi|20197022|gb|AAM14878.1| putative flavonol synthase
  misc_feature (46)..(317): Homolog of NCBI NO: 15240797 NR Description: putative protein; protein id: At5g07480.1
  misc_feature (41)..(315): Homolog of NCBI NO: 15228020 NR Description: putative giberellin beta-hydroxylase; protein id: [Arabidopsis thaliana] >gi|25285698|pir||E84783 probable
  misc_feature (1)..(314): Homolog of NCBI NO: 37536444 NR Description: unknown protein [Oryza sativa (japonica
  misc_feature (1)..(297): Homolog of NCBI NO: 15235124 NR Description: putative flavanone 3-beta-hydroxylase; protein At4g10490.1 [Arabidopsis thaliana] >gi|7433238|pir||T04184
  misc_feature (1)..(314): Homolog of NCBI NO: 38345873 NR Description: OSJNBa0064M23.15 [Oryza sativa (japonica
  misc_feature (1)..(314): Homolog of NCBI NO: 38345872 NR Description: OSJNBa0064M23.14 [Oryza sativa (japonica
MLGPSIGTSTINLPVIDLSFLHDPLLRLCVIHEIELACKGFGFFQVINHGISSAVVKDAQDSATRFFDLPADEKMHLVSDNFQEPVRYGTSINHSTDRVHYWRDFIKHYSHPLSNWINLWPSNPPCYKEKVGKYAEATHVLHKQLIEAISESLGLEKNYLQEEIEEGSQVMAVNCYPACPEPEIALGMPPHSDYGSLTILLQSSEGLQIKDCNNNWVCVPYIEGALIVQLGDQVEVMSNGIYKSVVHRVTVNKDYKRLSFASLHSLPMHKKISPATQLVNENKPAAYGEFSFNDFLDYISRNDITQKRFIDTLRKKNL

SEQ ID NO: 85944 - DNA, 1254 bp, Arabidopsis thaliana
  misc_feature (1)..(1254): Ceres Seq. ID no. 12684761
  misc_feature: MA Experiment ID: 108585 Result: Up-regulated in Transcription
  misc_feature: MA Experiment 108585 PARAMETER Experiment Name: At_5mM_NaNP_cDNA_P Parameter: Timepoint (hr) Value: 6
  misc_feature: MA Experiment 108585 PARAMETER Experiment Name: At_5mM_NaNP_cDNA_P Parameter: Tissue Value: Aerial
  misc_feature: MA Experiment 108585 PARAMETER Experiment Name: At_5mM_NaNP_cDNA_P Parameter: Treatment Value: null
  misc_feature: MA Experiment ID: 108668 Result: Up-regulated in Transcription
  misc_feature: MA Experiment 108668 PARAMETER Experiment Name: At_2mM_SA_cDNA_P Parameter: Plant Line Value: WS
  misc_feature: MA Experiment 108668 PARAMETER Experiment Name: At_2mM_SA_cDNA_P Parameter: Timepoint (hr) Value: 6
  misc_feature: MA Experiment 108668 PARAMETER Experiment Name: At_2mM_SA_cDNA_P Parameter: Treatment Value: 2mM SA vs. No Treatment
  misc_feature: MA Experiment ID: 20000112 Result: Up-regulated in Transcription
  misc_feature: MA Experiment 20000112 PARAMETER Experiment Name: At_42deg_Heat_cDNA_P Parameter: Temperature (deg C) Value: 42 vs. 22
  misc_feature: MA Experiment 20000112 PARAMETER Experiment Name: At_42deg_Heat_cDNA_P Parameter: Timepoint (hr) Value: 2
  misc_feature: MA Experiment 20000112 PARAMETER Experiment Name: At_42deg_Heat_cDNA_P Parameter: Tissue Value: Aerial
  misc_feature: MA Experiment ID: 20000144 Result: Up-regulated in Transcription
  misc_feature: MA Experiment 20000144 PARAMETER Experiment Name: At_42deg_Heat_cDNA_P Parameter: Temperature (deg C) Value: 42 vs. 22
  misc_feature: MA Experiment 20000144 PARAMETER Experiment Name: At_42deg_Heat_cDNA_P Parameter: Timepoint (hr) Value: 1
  misc_feature: MA Experiment 20000144 PARAMETER Experiment Name: At_42deg_Heat_cDNA_P Parameter: Tissue Value: Aerial
  misc_feature: MA Experiment ID: 20000182 Result: Up-regulated in Transcription
  misc_feature: MA Experiment 20000182 PARAMETER Experiment Name: At_2mM_SA_P Parameter: Age (day) Value: 14
  misc_feature: MA Experiment 20000182 PARAMETER Experiment Name: At_2mM_SA_P Parameter: Organism Value: A. thaliana
  misc_feature: MA Experiment 20000182 PARAMETER Experiment Name: At_2mM_SA_P Parameter: Plant Line Value: WS
  misc_feature: MA Experiment 20000182 PARAMETER Experiment Name: At_2mM_SA_P Parameter: Timepoint (hr) Value: 6
  misc_feature: MA Experiment 20000182 PARAMETER Experiment Name: At_2mM_SA_P Parameter: Tissue Value: Aerial
  misc_feature: MA Experiment 20000182 PARAMETER Experiment Name: At_2mM_SA_P Parameter: Treatment Value: 2mM SA vs. No Treatment
  misc_feature: MA Experiment ID: 20000235 Result: Down-regulated in Transcription
  misc_feature: MA Experiment 20000235 PARAMETER Experiment Name: At_Siliques_P Parameter: Age (day) Value: 21
  misc_feature: MA Experiment 20000235 PARAMETER Experiment Name: At_Siliques_P Parameter: Organism Value: A. thaliana
  misc_feature: MA Experiment 20000235 PARAMETER Experiment Name: At_Siliques_P Parameter: Plant Line Value: WS
  misc_feature: MA Experiment 20000235 PARAMETER Experiment Name: At_Siliques_P Parameter: Tissue Value: 5-10mm Siliques vs. Whole Plant
  misc_feature: MA Experiment ID: 20000264 Result: Down-regulated in Transcription
  misc_feature: MA Experiment 20000264 PARAMETER Experiment Name: At_Open_Flower_P Parameter: Age (day) Value: 21
  misc_feature: MA Experiment 20000264 PARAMETER Experiment Name: At_Open_Flower_P Parameter: Plant Line Value: WS
  misc_feature: MA Experiment 20000264 PARAMETER Experiment Name: At_Open_Flower_P Parameter: Tissue Value: Open Flower vs. Whole Plant
  misc_feature: MA Experiment ID: 20000286 Result: Down-regulated in Transcription
  misc_feature: MA Experiment 20000286 PARAMETER Experiment Name: At_Open_Flower_P Parameter: Age (day) Value: 21
  misc_feature: MA Experiment 20000286 PARAMETER Experiment Name: At_Open_Flower_P Parameter: Plant Line Value: WS
  misc_feature: MA Experiment 20000286 PARAMETER Experiment Name: At_Open_Flower_P Parameter: Tissue Value: Half Open vs. Whole Plant
  misc_feature: MA Experiment ID: 20000438 Result: Down-regulated in Transcription
  misc_feature: MA Experiment 20000438 PARAMETER Experiment Name: At_Shoots__P Parameter: Age (day) Value: 14
  misc_feature: MA Experiment 20000438 PARAMETER Experiment Name: At_Shoots__P Parameter: Tissue Value: Shoots vs. Whole Plant
  misc_feature: MA Experiment ID: 20000439 Result: Down-regulated in Transcription
  misc_feature: MA Experiment 20000439 PARAMETER Experiment Name: At_Roots__P Parameter: Age (day) Value: 14 vs. 21
  misc_feature: MA Experiment 20000439 PARAMETER Experiment Name: At_Roots__P Parameter: Organism Value: A. thaliana
  misc_feature: MA Experiment 20000439 PARAMETER Experiment Name: At_Roots__P Parameter: Tissue Value: Roots vs. Whole Plant
  misc_feature: MA Experiment ID: 20001247 Result: Up-regulated in Transcription
  misc_feature: MA Experiment 20001247 PARAMETER Experiment Name: At_Far-red-induction_P Parameter: Age (day) Value: 7
  misc_feature: MA Experiment 20001247 PARAMETER Experiment Name: At_Far-red-induction_P Parameter: Light Value: Far-red vs. White
  misc_feature: MA Experiment 20001247 PARAMETER Experiment Name: At_Far-red-induction_P Parameter: Organism Value: A. thaliana
  misc_feature: MA Experiment 20001247 PARAMETER Experiment Name: At_Far-red-induction_P Parameter: Plant Line Value: Columbia
  misc_feature: MA Experiment 20001247 PARAMETER Experiment Name: At_Far-red-induction_P Parameter: Timepoint (hr) Value: 1
  misc_feature: MA Experiment 20001247 PARAMETER Experiment Name: At_Far-red-induction_P Parameter: Tissue Value: Whole Plant
  misc_feature: MA Experiment ID: 20001248 Result: Up-regulated in Transcription
  misc_feature: MA Experiment 20001248 PARAMETER Experiment Name: At_Far-red-induction_P Parameter: Age (day) Value: 7
  misc_feature: MA Experiment 20001248 PARAMETER Experiment Name: At_Far-red-induction_P Parameter: Light Value: Far-red vs. White
  misc_feature: MA Experiment 20001248 PARAMETER Experiment Name: At_Far-red-induction_P Parameter: Organism Value: A. thaliana
  misc_feature: MA Experiment 20001248 PARAMETER Experiment Name: At_Far-red-induction_P Parameter: Plant Line Value: Columbia
  misc_feature: MA Experiment 20001248 PARAMETER Experiment Name: At_Far-red-induction_P Parameter: Timepoint (hr) Value: 4
  misc_feature: MA Experiment 20001248 PARAMETER Experiment Name: At_Far-red-induction_P Parameter: Tissue Value: Whole Plant
aaacccaaagaaagaaaaaaaagaagagaaacggccgaatcttcataaattccgccatctgttaagctcaatcgccgcctaaactccggcgactctctcgaagatatttggtgattgaggtgactcggaagagagtgagagagagagatggatgatagaggaggatcgttcgtagcagtgagaaggatttcacaaggtctagaacgaggaagtgtttatcattcttcttctgctgaggttgtagctggatcggcagcgtggttaggccgtggcctttcctgtgtttgtgttcagggtagagacggtgaccctcgtccttcatttgatctaacgcctgctcaggaggaatgcctgcagaggttgcaaagccgcattgatgttgcttatgacagctcaatacctcagcatcaggaagctctaaaggatctttggaaacttgcatttcctgaagaagagctacacggaattgtatctgatcagtggaaggaaatgggttggcagggaaaagatccatcgacagattttaggggtggtggttttatttctctcgaaaacttgttgtacttcgctaggaaattcccgaaatctttccacggccttctgcggaaacaggttggcgatcgttctgtgtgggaatacccctttgctgttgctggcatcaatataacattcatgctcatccagatgcttgaccttgaagcagtgaaaccacgaagtattgttggggaaacatttctaagattcctttcggtgaacgagtctgcgtttgaccttctttattgcattgccttcaagctaatggatcagcaatggctatccatgcgtgcttcatacatggagtttaacactgtgatgaaatcaacaaggcggcaactggagagagagattatgattgaagacattacaagtctcgaagatttgccatcatacagtcttctcagtcaatagcaaatagcttaccaaaaactactttgtaagtagaaagatctaacagctcagaaaccctatatcaaagctaaaacaacagcagagcaagtaagcaagcaaaaaagaagacaaggtttctctctctctcgctcttcactccatcttcctcgatattagtgttggttccatgaaatttgggttgttatttctatgaaaccagggtcagattttgtttcttatggggtcagattttctaacttgtggtgcttgtaaaacgttgttggttagttggtgttttgggctaataaatcatttggttacatttcc

SEQ ID NO: 85945 - protein, 266 aa, Arabidopsis thaliana; identical to SEQ ID NO: 39196
  peptide (1)..(266): Ceres Seq. ID no. 12684762
  misc_feature (85)..(246): Pfam Name: Protein of unknown function, DUF609 Pfam Description: Protein of unknown function, DUF609
  misc_feature (1)..(266): Homolog of NCBI NO: 18411543 NR Description: putative protein; protein id: At3g60260.1, by cDNA: 104796., supported by cDNA: gi_17473881, supported by gi_20148670 [Arabidopsis thaliana] >gi|17473882|gb|AAL38361.1|
  misc_feature (1)..(266): Homolog of NCBI NO: 11288393 NR Description: hypothetical protein F27H5.50 - Arabidopsis >gi|7576202|emb|CAB87863.1| putative protein [Arabidopsis
  misc_feature (1)..(266): Homolog of NCBI NO: 18406626 NR Description: expressed protein; protein id: At2g44770.1, by cDNA: 36996., supported by cDNA: gi_15810013, supported by gi_17981658 [Arabidopsis thaliana] >gi|20197031|gb|AAC27479.2|
  misc_feature (1)..(266): Homolog of NCBI NO: 15810014 NR Description: At2g44770/F16B22.26 [Arabidopsis thaliana]
  misc_feature (1)..(266): Homolog of NCBI NO: 7485547 NR Description: hypothetical protein At2g44770 [imported] -
  misc_feature (1)..(266): Homolog of NCBI NO: 14140119 NR Description: putative protein [Oryza sativa]
  misc_feature (1)..(266): Homolog of NCBI NO: 38345956 NR Description: OSJNBb0038F03.14 [Oryza sativa (japonica
  misc_feature (33)..(265): Homolog of NCBI NO: 18408759 NR Description: hypothetical protein; protein id: At1g67400.1 thaliana] >gi|9828622|gb|AAG00245.1|AC002130_10 F1N21.22
  misc_feature (28)..(266): Homolog of NCBI NO: 15218859 NR Description: hypothetical protein; protein id: At1g03620.1
  misc_feature (29)..(264): Homolog of NCBI NO: 18396599 NR Description: expressed protein; protein id: At3g03610.1, by cDNA: 28199., supported by cDNA: gi_18377968 [Arabidopsis >gi|18377969|gb|AAL67127.1| unknown protein [Arabidopsis

SEQ ID NO: 85946 - protein, 152 aa, Arabidopsis thaliana; identical to SEQ ID NO: 39197
  peptide (1)..(152): Ceres Seq. ID no. 12684763
  misc_feature (1)..(132): Pfam Name: Protein of unknown function, DUF609 Pfam Description: Protein of unknown function, DUF609
  misc_feature (1)..(152): Homolog of NCBI NO: 18411543 NR Description: putative protein; protein id: At3g60260.1, by cDNA: 104796., supported by cDNA: gi_17473881, supported by gi_20148670 [Arabidopsis thaliana] >gi|17473882|gb|AAL38361.1|
  misc_feature (1)..(152): Homolog of NCBI NO: 11288393 NR Description: hypothetical protein F27H5.50 - Arabidopsis >gi|7576202|emb|CAB87863.1| putative protein [Arabidopsis
  misc_feature (1)..(152): Homolog of NCBI NO: 18406626 NR Description: expressed protein; protein id: At2g44770.1, by cDNA: 36996., supported by cDNA: gi_15810013, supported by gi_17981658 [Arabidopsis thaliana] >gi|20197031|gb|AAC27479.2|
  misc_feature (1)..(152): Homolog of NCBI NO: 15810014 NR Description: At2g44770/F16B22.26 [Arabidopsis thaliana]
  misc_feature (1)..(152): Homolog of NCBI NO: 7485547 NR Description: hypothetical protein At2g44770 [imported] -
  misc_feature (1)..(152): Homolog of NCBI NO: 14140119 NR Description: putative protein [Oryza sativa]
  misc_feature (1)..(152): Homolog of NCBI NO: 38345956 NR Description: OSJNBb0038F03.14 [Oryza sativa (japonica
  misc_feature (1)..(151): Homolog of NCBI NO: 18408759 NR Description: hypothetical protein; protein id: At1g67400.1 thaliana] >gi|9828622|gb|AAG00245.1|AC002130_10 F1N21.22
  misc_feature (1)..(152): Homolog of NCBI NO: 15218859 NR Description: hypothetical protein; protein id: At1g03620.1
  misc_feature (1)..(150): Homolog of NCBI NO: 18396599 NR Description: expressed protein; protein id: At3g03610.1, by cDNA: 28199., supported by cDNA: gi_18377968 [Arabidopsis >gi|18377969|gb|AAL67127.1| unknown protein [Arabidopsis

SEQ ID NO: 85947 - DNA, 1344 bp, Arabidopsis thaliana
  misc_feature (1)..(1344): Ceres Seq. ID no. 12684787
  misc_feature: MA Experiment ID: 20000173 Result: Down-regulated in Transcription
  misc_feature: MA Experiment 20000173 PARAMETER Experiment Name: At_42deg_Heat_P Parameter: Age (day) Value: 14
  misc_feature: MA Experiment 20000173 PARAMETER Experiment Name: At_42deg_Heat_P Parameter: Organism Value: A. thaliana
  misc_feature: MA Experiment 20000173 PARAMETER Experiment Name: At_42deg_Heat_P Parameter: Plant Line Value: WS
  misc_feature: MA Experiment 20000173 PARAMETER Experiment Name: At_42deg_Heat_P Parameter: Temperature (deg C) Value: 42 vs. 22
  misc_feature: MA Experiment 20000173 PARAMETER Experiment Name: At_42deg_Heat_P Parameter: Timepoint (hr) Value: 6
  misc_feature: MA Experiment 20000173 PARAMETER Experiment Name: At_42deg_Heat_P Parameter: Tissue Value: Aerial
  misc_feature: MA Experiment ID: 20000179 Result: Down-regulated in Transcription
  misc_feature: MA Experiment 20000179 PARAMETER Experiment Name: At_Germinating_Seeds_P Parameter: Age (hr) Value: 6 vs. 0
  misc_feature: MA Experiment 20000179 PARAMETER Experiment Name: At_Germinating_Seeds_P Parameter: Tissue Value: Germinating Seeds
  misc_feature: MA Experiment ID: 20000184 Result: Down-regulated in Transcription
  misc_feature: MA Experiment 20000184 PARAMETER Experiment Name: At_Shoots__P Parameter: Age (day) Value: 7
  misc_feature: MA Experiment 20000184 PARAMETER Experiment Name: At_Shoots__P Parameter: Tissue Value: Shoots vs. Whole Plant
  misc_feature: MA Experiment ID: 20000227 Result: Up-regulated in Transcription
  misc_feature: MA Experiment 20000227 PARAMETER Experiment Name: At_Root-Tips-vs-Tops_P Parameter: Tissue Value: Root Tips vs. Root Tops
atggaggggagattggctaatatgtggaggttgactgttaacgaaagtaaattcgtggaaactgcgttgcaatctgagctcagagtagatggtcgtggcctttatgattatcgcaagcttactattaagtttggcaaagaatatggtagctcggaagttcaacttggtcagactcatgtaatgggtttcgtgactgctcagttggtacaaccttacaaagacagacctaatgaagggtctctctcgatcttcacggaattttctccaatggctgatccgtcttttgagcctggtcgtcctggcgaatctgcagtggagttgggacgcattatcgatcgtggtctaagagaaagccgtgcagtagatacagagtcactctgcgttctagctggaaagatggtttggtctgttcgcattgaccttcatatcttggacaatggagggaacttagttgatgctgcaaatattgctgctttagcagctctcatgacatttaggagacccgactgcactgtaggaggagagaatggtcaagaagtgatcatacatccactagaggaaagggaaccacttccattgataatacatcatctcccaatagccttcacgtttggattttttaataaaggcaacattgtggtgatggacccaacttatgttgaagaagcagttatgtgtgggagaatgactgtgacagttaatgccaatggcgatatatgcgcaatccaaaaaccgggggaagaaggcgtgaaccagagtgtaatccttcattgcctgcgtcttgcttcttcaagagctgctgcaacaacaaagatcattagagaagaagttgaagcatataactgtgagagaagcttacagaaggtgaagcgacatcccactttggctaaatctgaagtttctggacctactgtagctgtgaaggaggaacataggaagtcctcagatcaggaaagagctgcagagatatctcgagaacatgttgaaagactaaagctctctacggaggaagtaagaagcagtaaggaagaagaagctgccaatttcaaaggcggtccctcaaattggtatagtcttgaatgtttcactctctgggacccttactcagaagctatggatgttgattcactgaaagtttctcttgcttcaagaggggatcccgttactaagtcatcgagcacgaagaaaatgaacggctctggaaatgcgcagaaggttggtgttgagatttcagttgaggaagtaaccggagaattagggaagaaggatacaaaacacaaggatggagaaatgacacttaaagatgctgtcaaacctaaaaagaagcggaaaaacaaaagctga

SEQ ID NO: 85948 - protein, 447 aa, Arabidopsis thaliana
  peptide (1)..(447): Ceres Seq. ID no. 12684788
  misc_feature (36)..(168): Pfam Name: 3' exoribonuclease family, domain 1 Pfam Description: 3' exoribonuclease family, domain 1
  misc_feature (1)..(447): Homolog of NCBI NO: 15232342 NR Description: nucleolar autoantigen - like protein; protein id:
  misc_feature (1)..(307): Homolog of NCBI NO: 18399822 NR Description: expressed protein; protein id: At3g12990.1, by cDNA: 104182. [Arabidopsis thaliana]
  misc_feature (1)..(307): Homolog of NCBI NO: 21536581 NR Description: nucleolar autoantigen-like protein [Arabidopsis
  misc_feature (15)..(427): Homolog of NCBI NO: 9506981 NR Description: polymyositis/scleroderma autoantigen 1 [Mus >gi|14285679|sp|Q9JHI7|RR45_MOUSE Exosome complex exonuclease (Polymyositis/scleroderma autoantigen 1) (Autoantigen PM/Scl 1)
  misc_feature (15)..(444): Homolog of NCBI NO: 28172864 NR Description: polymyositis/scleroderma autoantigen 1 [Homo
  misc_feature (15)..(326): Homolog of NCBI NO: 12847890 NR Description: unnamed protein product [Mus musculus]
  misc_feature (12)..(278): Homolog of NCBI NO: 19075183 NR Description: putative exosome 3'-5' exoribonuclease complex;
  misc_feature (15)..(326): Homolog of NCBI NO: 34856829 NR Description: similar to polymyositis scleroderma overlap
  misc_feature (15)..(326): Homolog of NCBI NO: 28172868 NR Description: polymyositis/scleroderma autoantigen 1 [Homo
  misc_feature (28)..(444): Homolog of NCBI NO: 14285675 NR Description: Exosome complex exonuclease RRP45 autoantigen 1) (Autoantigen PM/Scl 1) (Polymyositis/scleroderma
MEGRLANMWRLTVNESKFVETALQSELRVDGRGLYDYRKLTIKFGKEYGSSEVQLGQTHVMGFVTAQLVQPYKDRPNEGSLSIFTEFSPMADPSFEPGRPGESAVELGRIIDRGLRESRAVDTESLCVLAGKMVWSVRIDLHILDNGGNLVDAANIAALAALMTFRRPDCTVGGENGQEVIIHPLEEREPLPLIIHHLPIAFTFGFFNKGNIVVMDPTYVEEAVMCGRMTVTVNANGDICAIQKPGEEGVNQSVILHCLRLASSRAAATTKIIREEVEAYNCERSLQKVKRHPTLAKSEVSGPTVAVKEEHRKSSDQERAAEISREHVERLKLSTEEVRSSKEEEAANFKGGPSNWYSLECFTLWDPYSEAMDVDSLKVSLASRGDPVTKSSSTKKMNGSGNAQKVGVEISVEEVTGELGKKDTKHKDGEMTLKDAVKPKKKRKNKS

SEQ ID NO: 85949 - protein, 440 aa, Arabidopsis thaliana
  peptide (1)..(440): Ceres Seq. ID no. 12684789
  misc_feature (29)..(161): Pfam Name: 3' exoribonuclease family, domain 1 Pfam Description: 3' exoribonuclease family, domain 1
  misc_feature (1)..(440): Homolog of NCBI NO: 15232342 NR Description: nucleolar autoantigen - like protein; protein id:
  misc_feature (1)..(300): Homolog of NCBI NO: 18399822 NR Description: expressed protein; protein id: At3g12990.1, by cDNA: 104182. [Arabidopsis thaliana]
  misc_feature (1)..(300): Homolog of NCBI NO: 21536581 NR Description: nucleolar autoantigen-like protein [Arabidopsis
  misc_feature (8)..(420): Homolog of NCBI NO: 9506981 NR Description: polymyositis/scleroderma autoantigen 1 [Mus >gi|14285679|sp|Q9JHI7|RR45_MOUSE Exosome complex exonuclease (Polymyositis/scleroderma autoantigen 1) (Autoantigen PM/Scl 1)
  misc_feature (8)..(437): Homolog of NCBI NO: 28172864 NR Description: polymyositis/scleroderma autoantigen 1 [Homo
  misc_feature (8)..(319): Homolog of NCBI NO: 12847890 NR Description: unnamed protein product [Mus musculus]
  misc_feature (5)..(271): Homolog of NCBI NO: 19075183 NR Description: putative exosome 3'-5' exoribonuclease complex;
  misc_feature (8)..(319): Homolog of NCBI NO: 34856829 NR Description: similar to polymyositis scleroderma overlap
  misc_feature (8)..(319): Homolog of NCBI NO: 28172868 NR Description: polymyositis/scleroderma autoantigen 1 [Homo
  misc_feature (21)..(437): Homolog of NCBI NO: 14285675 NR Description: Exosome complex exonuclease RRP45 autoantigen 1) (Autoantigen PM/Scl 1) (Polymyositis/scleroderma
MWRLTVNESKFVETALQSELRVDGRGLYDYRKLTIKFGKEYGSSEVQLGQTHVMGFVTAQLVQPYKDRPNEGSLSIFTEFSPMADPSFEPGRPGESAVELGRIIDRGLRESRAVDTESLCVLAGKMVWSVRIDLHILDNGGNLVDAANIAALAALMTFRRPDCTVGGENGQEVIIHPLEEREPLPLIIHHLPIAFTFGFFNKGNIVVMDPTYVEEAVMCGRMTVTVNANGDICAIQKPGEEGVNQSVILHCLRLASSRAAATTKIIREEVEAYNCERSLQKVKRHPTLAKSEVSGPTVAVKEEHRKSSDQERAAEISREHVERLKLSTEEVRSSKEEEAANFKGGPSNWYSLECFTLWDPYSEAMDVDSLKVSLASRGDPVTKSSSTKKMNGSGNAQKVGVEISVEEVTGELGKKDTKHKDGEMTLKDAVKPKKKRKNKS

SEQ ID NO: 85950 - protein, 387 aa, Arabidopsis thaliana
  peptide (1)..(387): Ceres Seq. ID no. 12684790
  misc_feature (1)..(108): Pfam Name: 3' exoribonuclease family, domain 1 Pfam Description: 3' exoribonuclease family, domain 1
  misc_feature (1)..(387): Homolog of NCBI NO: 15232342 NR Description: nucleolar autoantigen - like protein; protein id:
  misc_feature (1)..(247): Homolog of NCBI NO: 18399822 NR Description: expressed protein; protein id: At3g12990.1, by cDNA: 104182. [Arabidopsis thaliana]
  misc_feature (1)..(247): Homolog of NCBI NO: 21536581 NR Description: nucleolar autoantigen-like protein [Arabidopsis
  misc_feature (1)..(367): Homolog of NCBI NO: 9506981 NR Description: polymyositis/scleroderma autoantigen 1 [Mus >gi|14285679|sp|Q9JHI7|RR45_MOUSE Exosome complex exonuclease (Polymyositis/scleroderma autoantigen 1) (Autoantigen PM/Scl 1)
  misc_feature (1)..(384): Homolog of NCBI NO: 28172864 NR Description: polymyositis/scleroderma autoantigen 1 [Homo
  misc_feature (1)..(266): Homolog of NCBI NO: 12847890 NR Description: unnamed protein product [Mus musculus]
  misc_feature (1)..(218): Homolog of NCBI NO: 19075183 NR Description: putative exosome 3'-5' exoribonuclease complex;
  misc_feature (1)..(266): Homolog of NCBI NO: 34856829 NR Description: similar to polymyositis scleroderma overlap
  misc_feature (1)..(266): Homolog of NCBI NO: 28172868 NR Description: polymyositis/scleroderma autoantigen 1 [Homo
  misc_feature (1)..(384): Homolog of NCBI NO: 14285675 NR Description: Exosome complex exonuclease RRP45 autoantigen 1) (Autoantigen PM/Scl 1) (Polymyositis/scleroderma
MGFVTAQLVQPYKDRPNEGSLSIFTEFSPMADPSFEPGRPGESAVELGRIIDRGLRESRAVDTESLCVLAGKMVWSVRIDLHILDNGGNLVDAANIAALAALMTFRRPDCTVGGENGQEVIIHPLEEREPLPLIIHHLPIAFTFGFFNKGNIVVMDPTYVEEAVMCGRMTVTVNANGDICAIQKPGEEGVNQSVILHCLRLASSRAAATTKIIREEVEAYNCERSLQKVKRHPTLAKSEVSGPTVAVKEEHRKSSDQERAAEISREHVERLKLSTEEVRSSKEEEAANFKGGPSNWYSLECFTLWDPYSEAMDVDSLKVSLASRGDPVTKSSSTKKMNGSGNAQKVGVEISVEEVTGELGKKDTKHKDGEMTLKDAVKPKKKRKNKS

SEQ ID NO: 85951 - DNA, 1281 bp, Arabidopsis thaliana
  misc_feature (1)..(1281): Ceres Seq. ID no. 12684791
  misc_feature: MA Experiment ID: 20000179 Result: Up-regulated in Transcription
  misc_feature: MA Experiment 20000179 PARAMETER Experiment Name: At_Germinating_Seeds_P Parameter: Age (hr) Value: 6 vs. 0
  misc_feature: MA Experiment 20000179 PARAMETER Experiment Name: At_Germinating_Seeds_P Parameter: Tissue Value: Germinating Seeds
  misc_feature: MA Experiment ID: 20000180 Result: Up-regulated in Transcription
  misc_feature: MA Experiment 20000180 PARAMETER Experiment Name: At_Germinating_Seeds_P Parameter: Age (hr) Value: 24 vs. 0
  misc_feature: MA Experiment 20000180 PARAMETER Experiment Name: At_Germinating_Seeds_P Parameter: Tissue Value: Germinating Seeds
  misc_feature: MA Experiment ID: 20001451 Result: Up-regulated in Transcription
  misc_feature: MA Experiment 20001451 PARAMETER Experiment Name: At_Far-red-induction_P Parameter: Age (day) Value: 7
  misc_feature: MA Experiment 20001451 PARAMETER Experiment Name: At_Far-red-induction_P Parameter: Light Value: Far-red vs. White
  misc_feature: MA Experiment 20001451 PARAMETER Experiment Name: At_Far-red-induction_P Parameter: Organism Value: A. thaliana
  misc_feature: MA Experiment 20001451 PARAMETER Experiment Name: At_Far-red-induction_P Parameter: Plant Line Value: Columbia
  misc_feature: MA Experiment 20001451 PARAMETER Experiment Name: At_Far-red-induction_P Parameter: Timepoint (hr) Value: 24
  misc_feature: MA Experiment 20001451 PARAMETER Experiment Name: At_Far-red-induction_P Parameter: Tissue Value: Whole Plant
atgcataacgcgaagggattgttgggacgaatcgttcgagataagctatggagatttggttatcggaggagcttgtgctcgcttaaattgacttccgaggatcttgattaccaggttctcgttgaaggaagtggttgttcccgtactgcgattctcaatagaccacctgctctcaatgcactcaccactcacatgggatataggttgcagaaactttataagaattgggaagaagatccaaatattgggtttgtgatgatgaaggggagtggaagggcattttgtgctggtggtgatattgtgtctctctaccatttaagaacgagaggtagcccggatgctattagggagtttttctcgagtttgtatagttttatatacttgctaggcacatatctaaagccacatgtggcaattcttaacggtgttactatgggaggcggaactggagtttcgatacctgggacatttcgtgtagctactgatagaactatttttgctacccctgaaacaatcatcggttttcatcctgatgctggtgcttcttttaacctctcccacttacctggtcgcttaggggagtatctgggtctgactgggttaaagctcagtggggcagaaatgttggcatgtggccttgctacacattatattagaagtgaggaggttcctgtaatggaagaacagctcaagaagctgctcactgatgatccttctgttgttgagtcatgcttagaaaaatgtgcagaagttgcccatccggaaaagactggtgttattcgtaggatcgatttacttgaaaaatgctttagccatgacacagtagaagaaattattgattctttggtaagtttctttacgaatgattctgcgagtatgaccatctcggtcactagaagtaacagtgttttgggtcaccaggaaatcgaggctagtagaagaaaagatacatggtgcattacgactctacgtagacttaaagaaagctcaccgttatctttgaaggtggcattgagatctatccgggaaggaagattacaaacacttgaccaatgcttaatccgagagtacagaatgtcgctacaaggattaatcgggccaatgtccggcaatttttgtgagggagtacgagctcgattgatagacaaggatgaagcaccaaagtgggatccaccgagcttggagaaagtatcagaggacatggttgatgattacttctgtgccttgactcccacggaacctgatcttgaccttcctgtcaaactcagagaaagcatttag

SEQ ID NO: 85952 - protein, 426 aa, Arabidopsis thaliana
  peptide (1)..(426): Ceres Seq. ID no. 12684792
  misc_feature (51)..(217): Pfam Name: Enoyl-CoA hydratase/isomerase family Pfam Description: Enoyl-CoA hydratase/isomerase family
  misc_feature (1)..(426): Homolog of NCBI NO: 30695218 NR Description: enoyl-CoA hydratase/isomerase family [Arabidopsis
  misc_feature (165)..(426): Homolog of NCBI NO: 11357284 NR Description: enoyl-CoA-hydratase-like protein - Arabidopsis
  misc_feature (64)..(182): Homolog of NCBI NO: 11357284 NR Description: enoyl-CoA-hydratase-like protein - Arabidopsis
  misc_feature (1)..(65): Homolog of NCBI NO: 11357284 NR Description: enoyl-CoA-hydratase-like protein - Arabidopsis
  misc_feature (23)..(282): Homolog of NCBI NO: 37536724 NR Description: putative enoyl-CoA-hydratase [Oryza sativa
  misc_feature (296)..(425): Homolog of NCBI NO: 37536724 NR Description: putative enoyl-CoA-hydratase [Oryza sativa
  misc_feature (1)..(282): Homolog of NCBI NO: 22329062 NR Description: enoyl-CoA hydratase - like protein; protein id: supported by cDNA: gi_19424018, supported by cDNA: gi_21281144
  misc_feature (303)..(424): Homolog of NCBI NO: 22329062 NR Description: enoyl-CoA hydratase - like protein; protein id: supported by cDNA: gi_19424018, supported by cDNA: gi_21281144
  misc_feature (38)..(302): Homolog of NCBI NO: 15239206 NR Description: 3-hydroxyisobutyryl-coenzyme A hydrolase; protein
  misc_feature (303)..(419): Homolog of NCBI NO: 15239206 NR Description: 3-hydroxyisobutyryl-coenzyme A hydrolase; protein
MHNAKGLLGRIVRDKLWRFGYRRSLCSLKLTSEDLDYQVLVEGSGCSRTAILNRPPALNALTTHMGYRLQKLYKNWEEDPNIGFVMMKGSGRAFCAGGDIVSLYHLRTRGSPDAIREFFSSLYSFIYLLGTYLKPHVAILNGVTMGGGTGVSIPGTFRVATDRTIFATPETIIGFHPDAGASFNLSHLPGRLGEYLGLTGLKLSGAEMLACGLATHYIRSEEVPVMEEQLKKLLTDDPSVVESCLEKCAEVAHPEKTGVIRRIDLLEKCFSHDTVEEIIDSLVSFFTNDSASMTISVTRSNSVLGHQEIEASRRKDTWCITTLRRLKESSPLSLKVALRSIREGRLQTLDQCLIREYRMSLQGLIGPMSGNFCEGVRARLIDKDEAPKWDPPSLEKVSEDMVDDYFCALTPTEPDLDLPVKLRESI

SEQ ID NO: 85953 - protein, 362 aa, Arabidopsis thaliana
  peptide (1)..(362): Ceres Seq. ID no. 12684793
  misc_feature (1)..(153): Pfam Name: Enoyl-CoA hydratase/isomerase family Pfam Description: Enoyl-CoA hydratase/isomerase family
  misc_feature (1)..(362): Homolog of NCBI NO: 30695218 NR Description: enoyl-CoA hydratase/isomerase family [Arabidopsis
  misc_feature (101)..(362): Homolog of NCBI NO: 11357284 NR Description: enoyl-CoA-hydratase-like protein - Arabidopsis
  misc_feature (1)..(118): Homolog of NCBI NO: 11357284 NR Description: enoyl-CoA-hydratase-like protein - Arabidopsis
  misc_feature (1)..(218): Homolog of NCBI NO: 37536724 NR Description: putative enoyl-CoA-hydratase [Oryza sativa
  misc_feature (232)..(361): Homolog of NCBI NO: 37536724 NR Description: putative enoyl-CoA-hydratase [Oryza sativa
  misc_feature (1)..(218): Homolog of NCBI NO: 22329062 NR Description: enoyl-CoA hydratase - like protein; protein id: supported by cDNA: gi_19424018, supported by cDNA: gi_21281144
  misc_feature (239)..(360): Homolog of NCBI NO: 22329062 NR Description: enoyl-CoA hydratase - like protein; protein id: supported by cDNA: gi_19424018, supported by cDNA: gi_21281144
  misc_feature (1)..(238): Homolog of NCBI NO: 15239206 NR Description: 3-hydroxyisobutyryl-coenzyme A hydrolase; protein
  misc_feature (239)..(355): Homolog of NCBI NO: 15239206 NR Description: 3-hydroxyisobutyryl-coenzyme A hydrolase; protein
  misc_feature (1)..(236): Homolog of NCBI NO: 15224549 NR Description: 3-hydroxyisobutyryl-coenzyme A hydrolase; protein
MGYRLQKLYKNWEEDPNIGFVMMKGSGRAFCAGGDIVSLYHLRTRGSPDAIREFFSSLYSFIYLLGTYLKPHVAILNGVTMGGGTGVSIPGTFRVATDRTIFATPETIIGFHPDAGASFNLSHLPGRLGEYLGLTGLKLSGAEMLACGLATHYIRSEEVPVMEEQLKKLLTDDPSVVESCLEKCAEVAHPEKTGVIRRIDLLEKCFSHDTVEEIIDSLVSFFTNDSASMTISVTRSNSVLGHQEIEASRRKDTWCITTLRRLKESSPLSLKVALRSIREGRLQTLDQCLIREYRMSLQGLIGPMSGNFCEGVRARLIDKDEAPKWDPPSLEKVSEDMVDDYFCALTPTEPDLDLPVKLRESI

SEQ ID NO: 85954 - protein, 341 aa, Arabidopsis thaliana
  peptide (1)..(341): Ceres Seq. ID no. 12684794
  misc_feature (1)..(132): Pfam Name: Enoyl-CoA hydratase/isomerase family Pfam Description: Enoyl-CoA hydratase/isomerase family
  misc_feature (1)..(341): Homolog of NCBI NO: 30695218 NR Description: enoyl-CoA hydratase/isomerase family [Arabidopsis
  misc_feature (80)..(341): Homolog of NCBI NO: 11357284 NR Description: enoyl-CoA-hydratase-like protein - Arabidopsis
  misc_feature (1)..(97): Homolog of NCBI NO: 11357284 NR Description: enoyl-CoA-hydratase-like protein - Arabidopsis
  misc_feature (1)..(197): Homolog of NCBI NO: 37536724 NR Description: putative enoyl-CoA-hydratase [Oryza sativa
  misc_feature (211)..(340): Homolog of NCBI NO: 37536724 NR Description: putative enoyl-CoA-hydratase [Oryza sativa
  misc_feature (1)..(197): Homolog of NCBI NO: 22329062 NR Description: enoyl-CoA hydratase - like protein; protein id: supported by cDNA: gi_19424018, supported by cDNA: gi_21281144
  misc_feature (218)..(339): Homolog of NCBI NO: 22329062 NR Description: enoyl-CoA hydratase - like protein; protein id: supported by cDNA: gi_19424018, supported by cDNA: gi_21281144
  misc_feature (1)..(217): Homolog of NCBI NO: 15239206 NR Description: 3-hydroxyisobutyryl-coenzyme A hydrolase; protein
  misc_feature (218)..(334): Homolog of NCBI NO: 15239206 NR Description: 3-hydroxyisobutyryl-coenzyme A hydrolase; protein
  misc_feature (1)..(215): Homolog of NCBI NO: 15224549 NR Description: 3-hydroxyisobutyryl-coenzyme A hydrolase; protein
MMKGSGRAFCAGGDIVSLYHLRTRGSPDAIREFFSSLYSFIYLLGTYLKPHVAILNGVTMGGGTGVSIPGTFRVATDRTIFATPETIIGFHPDAGASFNLSHLPGRLGEYLGLTGLKLSGAEMLACGLATHYIRSEEVPVMEEQLKKLLTDDPSVVESCLEKCAEVAHPEKTGVIRRIDLLEKCFSHDTVEEIIDSLVSFFTNDSASMTISVTRSNSVLGHQEIEASRRKDTWCITTLRRLKESSPLSLKVALRSIREGRLQTLDQCLIREYRMSLQGLIGPMSGNFCEGVRARLIDKDEAPKWDPPSLEKVSEDMVDDYFCALTPTEPDLDLPVKLRESI

SEQ ID NO: 85955 - DNA, 1890 bp, Arabidopsis thaliana
  misc_feature (1)..(1890): Ceres Seq. ID no. 12684844
  misc_feature: MA Experiment ID: 20000437 Result: Down-regulated in Transcription
  misc_feature: MA Experiment 20000437 PARAMETER Experiment Name: At_Drought_P Parameter: Age (day) Value: 8
  misc_feature: MA Experiment 20000437 PARAMETER Experiment Name: At_Drought_P Parameter: Organism Value: A. thaliana
  misc_feature: MA Experiment 20000437 PARAMETER Experiment Name: At_Drought_P Parameter: Plant Line Value: WS
  misc_feature: MA Experiment 20000437 PARAMETER Experiment Name: At_Drought_P Parameter: Timepoint (hr) Value: 24
  misc_feature: MA Experiment 20000437 PARAMETER Experiment Name: At_Drought_P Parameter: Tissue Value: Whole Plant
  misc_feature: MA Experiment 20000437 PARAMETER Experiment Name: At_Drought_P Parameter: Treatment Value: Drought vs. No Drought
  misc_feature: MA Experiment ID: 20000439 Result: Up-regulated in Transcription
  misc_feature: MA Experiment 20000439 PARAMETER Experiment Name: At_Roots__P Parameter: Age (day) Value: 14 vs. 21
  misc_feature: MA Experiment 20000439 PARAMETER Experiment Name: At_Roots__P Parameter: Organism Value: A. thaliana
  misc_feature: MA Experiment 20000439 PARAMETER Experiment Name: At_Roots__P Parameter: Tissue Value: Roots vs. Whole Plant
  misc_feature: MA Experiment ID: 20000495 Result: Up-regulated in Transcription
  misc_feature: MA Experiment 20000495 PARAMETER Experiment Name: At_Guard_Cells_P Parameter: Harvest Date Value: 8/2/2002
  misc_feature: MA Experiment 20000495 PARAMETER Experiment Name: At_Guard_Cells_P Parameter: Organism Value: A. thaliana
  misc_feature: MA Experiment 20000495 PARAMETER Experiment Name: At_Guard_Cells_P Parameter: Tissue Value: Guard Cells vs. Leaves
  misc_feature: MA Experiment ID: 20001450 Result: Down-regulated in Transcription
  misc_feature: MA Experiment 20001450 PARAMETER Experiment Name: At_Far-red-induction_P Parameter: Age (day) Value: 7
  misc_feature: MA Experiment 20001450 PARAMETER Experiment Name: At_Far-red-induction_P Parameter: Light Value: Far-red vs. White
  misc_feature: MA Experiment 20001450 PARAMETER Experiment Name: At_Far-red-induction_P Parameter: Organism Value: A. thaliana
  misc_feature: MA Experiment 20001450 PARAMETER Experiment Name: At_Far-red-induction_P Parameter: Plant Line Value: Columbia
  misc_feature: MA Experiment 20001450 PARAMETER Experiment Name: At_Far-red-induction_P Parameter: Timepoint (hr) Value: 8
  misc_feature: MA Experiment 20001450 PARAMETER Experiment Name: At_Far-red-induction_P Parameter: Tissue Value: Whole Plant
atgggagagactgaggatgaaaaagatgcttctttggctgatatcgagaaggagtgtctctcggtttataagcgaaaggtcgaggaggctagtcggggtaaagcgaatttgctgaaagaaatcgctgttggcagagcagaaattgcagctattggctcttctatgggtggacaagagattcattctaacagcaggttaggagaaaacttgaaagaggagcttgagaatgttaatgtgcaattggatggactgcgcaaaaggaaagctgagagaatgattcggtttaatgaagttatcgatcagttactgaagttgtcactgcaacttggaaatccaacagattatctgaagaagtttgctgctgaagagaccgatctttcgcttcagaggttggaggaattgcgtagccagttgggtgagctccaaaatgaaaagagcaaaagattggaagaggtagagtgtttgctgaaaacgcttaactcgttgtgctcggttcttggtgaagatttcaaaggcatgataagagggatacattcatctctggttgattccaacactagggatgtgagcagaagtactcttgataagttggatatgatgattgtgaatttacgagaggccaagttacagcgaatgcagaaggttcaagatcttgcagtgtccttgttggagctctggaatctgctggacacgcctgcggaagagcaaaagatatttcacaatgtcacatgtagcatcgctttgactgagtctgaaataactgaggccaacatactttctgttgcttccattaaacgcgttgaggatgaagtcattaggcttagcaagatcaaaataactaagatcaaagaggtgatactgaggaagaggcttgagcttgaggaaatatcaaggaagatgcacatggccaccgaagttcttaaatcagaaaacttttcagttgaagctatagaatctggtgtcaaggatcctgagcagttgttagagcaaattgattccgagattgcaaaggtcaaagaggaagcttcaagcaggaaggagattcttgaaaaagtggagaaatggatgtcagcttgtgaagaagagtcttggctggaagagtacaatcgggatgataaccggtacaacgctggaagaggagctcatcttacattgaagcgtgcagaaaaagcccgtttacttgtcaataaacttcctgggatggtggaagctttgaccgccaaagtcactgcttgggagaatgaaagaggaaatgaattcttatatgatggggtccgagtcttatcgatgcttggtcagtacaagactgtatgggaagagaaagagcatgaaaaacagagacagagagatatgaagaaacttcatggacaactcataacagagcaagaagctctttatgggtctaaaccaagcccaaataaaagcggaaagaaaccactgagaacaccagtaaatgctgccatgaacagaaaactctcccttggtggtgccatgcttcatcaaagcttaaagcatgagaaggcaacactcaatagcaaaaggacgaagtactatgaccagaacgctactagtagaagagattcagctcttccaactctttcaggaaaagctgcgagatctccaatgcttaggaagcctctttcacctgtcacttccaatatcttgaattccccagaagatcatcacaaggatgcttacacaacaaaggagagaatcttgacacctaaaaccaacgaagaaaagaaaagagctgttccaacaactcctgcagcttcagtcgctatgacagaggcaacaacgccgttcactcctgctgtggagaagagaatggatgaggaagacgttattgttgagtattcgtttgaagaggttagggccggtttttgctaa

SEQ ID NO: 85956 - protein, 629 aa, Arabidopsis thaliana
  peptide (1)..(629): Ceres Seq. ID no. 12684845
  misc_feature (7)..(612): Pfam Name: Microtubule associated protein (MAP65/ASE1 family) Pfam Description: Microtubule associated protein (MAP65/ASE1
  misc_feature (1)..(612): Homolog of NCBI NO: 15232967 NR Description: putative protein; protein id: At3g60840.1
  misc_feature (1)..(589): Homolog of NCBI NO: 15242132 NR Description: putative protein; protein id: At5g51600.1 thaliana] >gi|9758202|dbj|BAB08676.1|
  misc_feature (1)..(485): Homolog of NCBI NO: 15241762 NR Description: cytokinesis regulating protein - like; protein
  misc_feature (1)..(502): Homolog of NCBI NO: 11558252 NR Description: microtubule-associated protein MAP65-1a
  misc_feature (1)..(514): Homolog of NCBI NO: 11558256 NR Description: microtubule-associated protein MAP65-1c
  misc_feature (1)..(479): Homolog of NCBI NO: 25410943 NR Description: hypothetical protein At2g01910 [imported] - thaliana >gi|4522009|gb|AAD21782.1| unknown protein [Arabidopsis
  misc_feature (1)..(514): Homolog of NCBI NO: 11558254 NR Description: microtubule-associated protein MAP65-1b
  misc_feature (1)..(537): Homolog of NCBI NO: 15240485 NR Description: putative protein; protein id: At5g55230.1 thaliana] >gi|9758120|dbj|BAB08592.1| similarity to unknown protein [Arabidopsis thaliana]
  misc_feature (1)..(502): Homolog of NCBI NO: 28200790 NR Description: 65kD microtubule associated protein [Daucus
  misc_feature (1)..(531): Homolog of NCBI NO: 18416818 NR Description: putative protein; protein id: At4g26760.1, by cDNA: 151418., supported by cDNA: gi_18377611 [Arabidopsis
MGETEDEKDASLADIEKECLSVYKRKVEEASRGKANLLKEIAVGRAEIAAIGSSMGGQEIHSNSRLGENLKEELENVNVQLDGLRKRKAERMIRFNEVIDQLLKLSLQLGNPTDYLKKFAAEETDLSLQRLEELRSQLGELQNEKSKRLEEVECLLKTLNSLCSVLGEDFKGMIRGIHSSLVDSNTRDVSRSTLDKLDMMIVNLREAKLQRMQKVQDLAVSLLELWNLLDTPAEEQKIFHNVTCSIALTESEITEANILSVASIKRVEDEVIRLSKIKITKIKEVILRKRLELEEISRKMHMATEVLKSENFSVEAIESGVKDPEQLLEQIDSEIAKVKEEASSRKEILEKVEKWMSACEEESWLEEYNRDDNRYNAGRGAHLTLKRAEKARLLVNKLPGMVEALTAKVTAWENERGNEFLYDGVRVLSMLGQYKTVWEEKEHEKQRQRDMKKLHGQLITEQEALYGSKPSPNKSGKKPLRTPVNAAMNRKLSLGGAMLHQSLKHEKATLNSKRTKYYDQNATSRRDSALPTLSGKAARSPMLRKPLSPVTSNILNSPEDHHKDAYTTKERILTPKTNEEKKRAVPTTPAASVAMTEATTPFTPAVEKRMDEEDVIVEYSFEEVRAGFC

SEQ ID NO: 85957 - protein, 575 aa, Arabidopsis thaliana
  peptide (1)..(575): Ceres Seq. ID no. 12684846
  misc_feature (1)..(558): Pfam Name: Microtubule associated protein (MAP65/ASE1 family) Pfam Description: Microtubule associated protein (MAP65/ASE1
  misc_feature (1)..(558): Homolog of NCBI NO: 15232967 NR Description: putative protein; protein id: At3g60840.1
  misc_feature (1)..(535): Homolog of NCBI NO: 15242132 NR Description: putative protein; protein id: At5g51600.1 thaliana] >gi|9758202|dbj|BAB08676.1|
  misc_feature (1)..(431): Homolog of NCBI NO: 15241762 NR Description: cytokinesis regulating protein - like; protein
  misc_feature (1)..(448): Homolog of NCBI NO: 11558252 NR Description: microtubule-associated protein MAP65-1a
  misc_feature (1)..(460): Homolog of NCBI NO: 11558256 NR Description: microtubule-associated protein MAP65-1c
  misc_feature (1)..(425): Homolog of NCBI NO: 25410943 NR Description: hypothetical protein At2g01910 [imported] - thaliana >gi|4522009|gb|AAD21782.1| unknown protein [Arabidopsis
  misc_feature (1)..(460): Homolog of NCBI NO: 11558254 NR Description: microtubule-associated protein MAP65-1b
  misc_feature (1)..(483): Homolog of NCBI NO: 15240485 NR Description: putative protein; protein id: At5g55230.1 thaliana] >gi|9758120|dbj|BAB08592.1| similarity to unknown protein [Arabidopsis thaliana]
  misc_feature (1)..(448): Homolog of NCBI NO: 28200790 NR Description: 65kD microtubule associated protein [Daucus
  misc_feature (1)..(477): Homolog of NCBI NO: 18416818 NR Description: putative protein; protein id: At4g26760.1, by cDNA: 151418., supported by cDNA: gi_18377611 [Arabidopsis
MGGQEIHSNSRLGENLKEELENVNVQLDGLRKRKAERMIRFNEVIDQLLKLSLQLGNPTDYLKKFAAEETDLSLQRLEELRSQLGELQNEKSKRLEEVECLLKTLNSLCSVLGEDFKGMIRGIHSSLVDSNTRDVSRSTLDKLDMMIVNLREAKLQRMQKVQDLAVSLLELWNLLDTPAEEQKIFHNVTCSIALTESEITEANILSVASIKRVEDEVIRLSKIKITKIKEVILRKRLELEEISRKMHMATEVLKSENFSVEAIESGVKDPEQLLEQIDSEIAKVKEEASSRKEILEKVEKWMSACEEESWLEEYNRDDNRYNAGRGAHLTLKRAEKARLLVNKLPGMVEALTAKVTAWENERGNEFLYDGVRVLSMLGQYKTVWEEKEHEKQRQRDMKKLHGQLITEQEALYGSKPSPNKSGKKPLRTPVNAAMNRKLSLGGAMLHQSLKHEKATLNSKRTKYYDQNATSRRDSALPTLSGKAARSPMLRKPLSPVTSNILNSPEDHHKDAYTTKERILTPKTNEEKKRAVPTTPAASVAMTEATTPFTPAVEKRMDEEDVIVEYSFEEVRAGFC

SEQ ID NO: 85958 - protein, 538 aa, Arabidopsis thaliana
  peptide (1)..(538): Ceres Seq. ID no. 12684847
  misc_feature (1)..(521): Pfam Name: Microtubule associated protein (MAP65/ASE1 family) Pfam Description: Microtubule associated protein (MAP65/ASE1
  misc_feature (1)..(521): Homolog of NCBI NO: 15232967 NR Description: putative protein; protein id: At3g60840.1
  misc_feature (1)..(498): Homolog of NCBI NO: 15242132 NR Description: putative protein; protein id: At5g51600.1 thaliana] >gi|9758202|dbj|BAB08676.1|
  misc_feature (1)..(394): Homolog of NCBI NO: 15241762 NR Description: cytokinesis regulating protein - like; protein
  misc_feature (1)..(411): Homolog of NCBI NO: 11558252 NR Description: microtubule-associated protein MAP65-1a
  misc_feature (1)..(423): Homolog of NCBI NO: 11558256 NR Description: microtubule-associated protein MAP65-1c
  misc_feature (1)..(388): Homolog of NCBI NO: 25410943 NR Description: hypothetical protein At2g01910 [imported] - thaliana >gi|4522009|gb|AAD21782.1| unknown protein [Arabidopsis
  misc_feature (1)..(423): Homolog of NCBI NO: 11558254 NR Description: microtubule-associated protein MAP65-1b
  misc_feature (1)..(446): Homolog of NCBI NO: 15240485 NR Description: putative protein; protein id: At5g55230.1 thaliana] >gi|9758120|dbj|BAB08592.1| similarity to unknown protein [Arabidopsis thaliana]
  misc_feature (1)..(411): Homolog of NCBI NO: 28200790 NR Description: 65kD microtubule associated protein [Daucus
  misc_feature (1)..(440): Homolog of NCBI NO: 18416818 NR Description: putative protein; protein id: At4g26760.1, by cDNA: 151418., supported by cDNA: gi_18377611 [Arabidopsis
MIRFNEVIDQLLKLSLQLGNPTDYLKKFAAEETDLSLQRLEELRSQLGELQNEKSKRLEEVECLLKTLNSLCSVLGEDFKGMIRGIHSSLVDSNTRDVSRSTLDKLDMMIVNLREAKLQRMQKVQDLAVSLLELWNLLDTPAEEQKIFHNVTCSIALTESEITEANILSVASIKRVEDEVIRLSKIKITKIKEVILRKRLELEEISRKMHMATEVLKSENFSVEAIESGVKDPEQLLEQIDSEIAKVKEEASSRKEILEKVEKWMSACEEESWLEEYNRDDNRYNAGRGAHLTLKRAEKARLLVNKLPGMVEALTAKVTAWENERGNEFLYDGVRVLSMLGQYKTVWEEKEHEKQRQRDMKKLHGQLITEQEALYGSKPSPNKSGKKPLRTPVNAAMNRKLSLGGAMLHQSLKHEKATLNSKRTKYYDQNATSRRDSALPTLSGKAARSPMLRKPLSPVTSNILNSPEDHHKDAYTTKERILTPKTNEEKKRAVPTTPAASVAMTEATTPFTPAVEKRMDEEDVIVEYSFEEVRAGFC

SEQ ID NO: 85959 - DNA, 1777 bp, Arabidopsis thaliana
  misc_feature (1)..(1777): Ceres Seq. ID no. 12684856
  misc_feature: MA Experiment ID: 108594 Result: Up-regulated in Transcription
  misc_feature: MA Experiment 108594 PARAMETER Experiment Name: At_Ler-rhl_Root_cDNA_P Parameter: Plant Line Value: null
  misc_feature: MA Experiment ID: 108595 Result: Up-regulated in Transcription
  misc_feature: MA Experiment 108595 PARAMETER Experiment Name: At_Ler-pi_Ovule_cDNA_P Parameter: Plant Line Value: null
  misc_feature: MA Experiment ID: 20000166 Result: Down-regulated in Transcription
  misc_feature: MA Experiment 20000166 PARAMETER Experiment Name: At_100uM_ABA_P Parameter: Age (day) Value: 14
  misc_feature: MA Experiment 20000166 PARAMETER Experiment Name: At_100uM_ABA_P Parameter: Organism Value: A. thaliana
  misc_feature: MA Experiment 20000166 PARAMETER Experiment Name: At_100uM_ABA_P Parameter: Plant Line Value: WS
  misc_feature: MA Experiment 20000166 PARAMETER Experiment Name: At_100uM_ABA_P Parameter: Timepoint (hr) Value: 1
  misc_feature: MA Experiment 20000166 PARAMETER Experiment Name: At_100uM_ABA_P Parameter: Tissue Value: Aerial
  misc_feature: MA Experiment 20000166 PARAMETER Experiment Name: At_100uM_ABA_P Parameter: Treatment Value: 100uM ABA vs. No Treatment
  misc_feature: MA Experiment ID: 20000184 Result: Down-regulated in Transcription
  misc_feature: MA Experiment 20000184 PARAMETER Experiment Name: At_Shoots__P Parameter: Age (day) Value: 7
  misc_feature: MA Experiment 20000184 PARAMETER Experiment Name: At_Shoots__P Parameter: Tissue Value: Shoots vs. Whole Plant
  misc_feature: MA Experiment ID: 20000214 Result: Down-regulated in Transcription
  misc_feature: MA Experiment 20000214 PARAMETER Experiment Name: At_4deg_Cold_P Parameter: Timepoint (hr) Value: 6
  misc_feature: MA Experiment ID: 20000234 Result: Up-regulated in Transcription
  misc_feature: MA Experiment 20000234 PARAMETER Experiment Name: At_Siliques_P Parameter: Age (day) Value: 21
  misc_feature: MA Experiment 20000234 PARAMETER Experiment Name: At_Siliques_P Parameter: Organism Value: A. thaliana
  misc_feature: MA Experiment 20000234 PARAMETER Experiment Name: At_Siliques_P Parameter: Plant Line Value: WS
  misc_feature: MA Experiment 20000234 PARAMETER Experiment Name: At_Siliques_P Parameter: Tissue Value: Less Than 5mm Siliques vs. Whole Plant
  misc_feature: MA Experiment ID: 20000264 Result: Up-regulated in Transcription
  misc_feature: MA Experiment 20000264 PARAMETER Experiment Name: At_Open_Flower_P Parameter: Age (day) Value: 21
  misc_feature: MA Experiment 20000264 PARAMETER Experiment Name: At_Open_Flower_P Parameter: Plant Line Value: WS
  misc_feature: MA Experiment 20000264 PARAMETER Experiment Name: At_Open_Flower_P Parameter: Tissue Value: Open Flower vs. Whole Plant
  misc_feature: MA Experiment ID: 20000265 Result: Up-regulated in Transcription
  misc_feature: MA Experiment 20000265 PARAMETER Experiment Name: At_Open_Flower_P Parameter: Age (day) Value: 21
  misc_feature: MA Experiment 20000265 PARAMETER Experiment Name: At_Open_Flower_P Parameter: Plant Line Value: WS
  misc_feature: MA Experiment 20000265 PARAMETER Experiment Name: At_Open_Flower_P Parameter: Tissue Value: Closed Flower vs. Whole Plant
  misc_feature: MA Experiment ID: 20000268 Result: Down-regulated in Transcription
  misc_feature: MA Experiment 20000268 PARAMETER Experiment Name: At_100mM_NaCl__P Parameter: Age (day) Value: 14
  misc_feature: MA Experiment 20000268 PARAMETER Experiment Name: At_100mM_NaCl__P Parameter: Organism Value: A. thaliana
  misc_feature: MA Experiment 20000268 PARAMETER Experiment Name: At_100mM_NaCl__P Parameter: Plant Line Value: WS
  misc_feature: MA Experiment 20000268 PARAMETER Experiment Name: At_100mM_NaCl__P Parameter: Timepoint (hr) Value: 6
  misc_feature: MA Experiment 20000268 PARAMETER Experiment Name: At_100mM_NaCl__P Parameter: Tissue Value: Whole Plant
  misc_feature: MA Experiment 20000268 PARAMETER Experiment Name: At_100mM_NaCl__P Parameter: Treatment Value: 100mM NaCl vs. No Treatment
  misc_feature: MA Experiment ID: 20000269 Result: Up-regulated in Transcription
  misc_feature: MA Experiment 20000269 PARAMETER Experiment Name: At_1mM_KNO3_L-vs-H_Roots_P Parameter: Age (day) Value: 7,10,12
  misc_feature: MA Experiment 20000269 PARAMETER Experiment Name: At_1mM_KNO3_L-vs-H_Roots_P Parameter: Organism Value: A. thaliana
  misc_feature: MA Experiment 20000269 PARAMETER Experiment Name: At_1mM_KNO3_L-vs-H_Roots_P Parameter: Plant Line Value: WS
  misc_feature: MA Experiment 20000269 PARAMETER Experiment Name: At_1mM_KNO3_L-vs-H_Roots_P Parameter: Timepoint (day) Value: 7,10,12
  misc_feature: MA Experiment 20000269 PARAMETER Experiment Name: At_1mM_KNO3_L-vs-H_Roots_P Parameter: Tissue Value: Roots
  misc_feature: MA Experiment 20000269 PARAMETER Experiment Name: At_1mM_KNO3_L-vs-H_Roots_P Parameter: Treatment Value: 1mM KNO3 vs. 50mM KNO3
  misc_feature: MA Experiment ID: 20000286 Result: Up-regulated in Transcription
  misc_feature: MA Experiment 20000286 PARAMETER Experiment Name: At_Open_Flower_P Parameter: Age (day) Value: 21
  misc_feature: MA Experiment 20000286 PARAMETER Experiment Name: At_Open_Flower_P Parameter: Plant Line Value: WS
  misc_feature: MA Experiment 20000286 PARAMETER Experiment Name: At_Open_Flower_P Parameter: Tissue Value: Half Open vs. Whole Plant
  misc_feature: MA Experiment ID: 20000436 Result: Down-regulated in Transcription
  misc_feature: MA Experiment 20000436 PARAMETER Experiment Name: At_Drought_P Parameter: Age (day) Value: 7
  misc_feature: MA Experiment 20000436 PARAMETER Experiment Name: At_Drought_P Parameter: Organism Value: A. thaliana
  misc_feature: MA Experiment 20000436 PARAMETER Experiment Name: At_Drought_P Parameter: Plant Line Value: WS
  misc_feature: MA Experiment 20000436 PARAMETER Experiment Name: At_Drought_P Parameter: Timepoint (hr) Value: 12
  misc_feature: MA Experiment 20000436 PARAMETER Experiment Name: At_Drought_P Parameter: Tissue Value: Whole Plant
  misc_feature: MA Experiment 20000436 PARAMETER Experiment Name: At_Drought_P Parameter: Treatment Value: Drought vs. No Drought
  misc_feature: MA Experiment ID: 20000438 Result: Down-regulated in Transcription
  misc_feature: MA Experiment 20000438 PARAMETER Experiment Name: At_Shoots__P Parameter: Age (day) Value: 14
  misc_feature: MA Experiment 20000438 PARAMETER Experiment Name: At_Shoots__P Parameter: Tissue Value: Shoots vs. Whole Plant
  misc_feature: MA Experiment ID: 20000439 Result: Up-regulated in Transcription
  misc_feature: MA Experiment 20000439 PARAMETER Experiment Name: At_Roots__P Parameter: Age (day) Value: 14 vs. 21
  misc_feature: MA Experiment 20000439 PARAMETER Experiment Name: At_Roots__P Parameter: Organism Value: A. thaliana
  misc_feature: MA Experiment 20000439 PARAMETER Experiment Name: At_Roots__P Parameter: Tissue Value: Roots vs. Whole Plant
  misc_feature: MA Experiment ID: 20000453 Result: Up-regulated in Transcription
  misc_feature: MA Experiment 20000453 PARAMETER Experiment Name: At_100uM_ABA_P Parameter: Age (day) Value: 15
  misc_feature: MA Experiment 20000453 PARAMETER Experiment Name: At_100uM_ABA_P Parameter: Organism Value: A. thaliana
  misc_feature: MA Experiment 20000453 PARAMETER Experiment Name: At_100uM_ABA_P Parameter: Plant Line Value: WS
  misc_feature: MA Experiment 20000453 PARAMETER Experiment Name: At_100uM_ABA_P Parameter: Timepoint (hr) Value: 24
  misc_feature: MA Experiment 20000453 PARAMETER Experiment Name: At_100uM_ABA_P Parameter: Tissue Value: Aerial
  misc_feature: MA Experiment 20000453 PARAMETER Experiment Name: At_100uM_ABA_P Parameter: Treatment Value: 100uM ABA vs. No Treatment
  misc_feature: MA Experiment ID: 20000573 Result: Up-regulated in Transcription
  misc_feature: MA Experiment 20000573 PARAMETER Experiment Name: At_100uM_ABA_Mutants__P Parameter: Organism Value: A. thaliana
  misc_feature: MA Experiment 20000573 PARAMETER Experiment Name: At_100uM_ABA_Mutants__P Parameter: Plant Line Value: CS22 vs. Ler wt
  misc_feature: MA Experiment 20000573 PARAMETER Experiment Name: At_100uM_ABA_Mutants__P Parameter: Timepoint (hr) Value: N/A
  misc_feature: MA Experiment 20000573 PARAMETER Experiment Name: At_100uM_ABA_Mutants__P Parameter: Tissue Value: Whole Plant
  misc_feature: MA Experiment 20000573 PARAMETER Experiment Name: At_100uM_ABA_Mutants__P Parameter: Treatment Value: None
  misc_feature: MA Experiment ID: 20000574 Result: Up-regulated in Transcription
  misc_feature: MA Experiment 20000574 PARAMETER Experiment Name: At_100uM_ABA_Mutants__P Parameter: Organism Value: A. thaliana
  misc_feature: MA Experiment 20000574 PARAMETER Experiment Name: At_100uM_ABA_Mutants__P Parameter: Plant Line Value: CS23 vs. Ler wt
  misc_feature: MA Experiment 20000574 PARAMETER Experiment Name: At_100uM_ABA_Mutants__P Parameter: Timepoint (hr) Value: N/A
  misc_feature: MA Experiment 20000574 PARAMETER Experiment Name: At_100uM_ABA_Mutants__P Parameter: Tissue Value: Whole Plant
  misc_feature: MA Experiment 20000574 PARAMETER Experiment Name: At_100uM_ABA_Mutants__P Parameter: Treatment Value: None
  misc_feature: MA Experiment ID: 20000794 Result: Up-regulated in Transcription
  misc_feature: MA Experiment 20000794 PARAMETER Experiment Name: At_Petals_P Parameter: Age (day) Value: 23-25 days
  misc_feature: MA Experiment 20000794 PARAMETER Experiment Name: At_Petals_P Parameter: Plant Line Value: WS
  misc_feature: MA Experiment 20000794 PARAMETER Experiment Name: At_Petals_P Parameter: Tissue Value: Petals vs. Whole plant
  misc_feature: MA Experiment ID: 20001554 Result: Down-regulated in Transcription
  misc_feature: MA Experiment 20001554 PARAMETER Experiment Name: At_Drought_Soil_Dry_P Parameter: Age (day) Value: 21
  misc_feature: MA Experiment 20001554 PARAMETER Experiment Name: At_Drought_Soil_Dry_P Parameter: Organism Value: A. thaliana
  misc_feature: MA Experiment 20001554 PARAMETER Experiment Name: At_Drought_Soil_Dry_P Parameter: Plant Line Value: WS
  misc_feature: MA Experiment 20001554 PARAMETER Experiment Name: At_Drought_Soil_Dry_P Parameter: Post Timepoint (hr) Value: None
  misc_feature: MA Experiment 20001554 PARAMETER Experiment Name: At_Drought_Soil_Dry_P Parameter: Post-Treatment Value: None
  misc_feature: MA Experiment 20001554 PARAMETER Experiment Name: At_Drought_Soil_Dry_P Parameter: Timepoint (day) Value: 7
  misc_feature: MA Experiment 20001554 PARAMETER Experiment Name: At_Drought_Soil_Dry_P Parameter: Treatment Value: Drought vs. No Drought
  misc_feature: MA Experiment ID: 20001557 Result: Up-regulated in Transcription
  misc_feature: MA Experiment 20001557 PARAMETER Experiment Name: At_Drought_Soil_Dry_P Parameter: Age (day) Value: 27
  misc_feature: MA Experiment 20001557 PARAMETER Experiment Name: At_Drought_Soil_Dry_P Parameter: Organism Value: A. thaliana
  misc_feature: MA Experiment 20001557 PARAMETER Experiment Name: At_Drought_Soil_Dry_P Parameter: Plant Line Value: WS
  misc_feature: MA Experiment 20001557 PARAMETER Experiment Name: At_Drought_Soil_Dry_P Parameter: Post Timepoint (hr) Value: 3
  misc_feature: MA Experiment 20001557 PARAMETER Experiment Name: At_Drought_Soil_Dry_P Parameter: Post-Treatment Value: Re-Water vs. No Drought
  misc_feature: MA Experiment 20001557 PARAMETER Experiment Name: At_Drought_Soil_Dry_P Parameter: Timepoint (day) Value: 13
  misc_feature: MA Experiment 20001557 PARAMETER Experiment Name: At_Drought_Soil_Dry_P Parameter: Treatment Value: Drought vs. No Drought
  misc_feature: MA Experiment ID: 20001558 Result: Up-regulated in Transcription
  misc_feature: MA Experiment 20001558 PARAMETER Experiment Name: At_Drought_Soil_Dry_P Parameter: Age (day) Value: 27
  misc_feature: MA Experiment 20001558 PARAMETER Experiment Name: At_Drought_Soil_Dry_P Parameter: Organism Value: A. thaliana
  misc_feature: MA Experiment 20001558 PARAMETER Experiment Name: At_Drought_Soil_Dry_P Parameter: Plant Line Value: WS
  misc_feature: MA Experiment 20001558 PARAMETER Experiment Name: At_Drought_Soil_Dry_P Parameter: Post Timepoint (hr) Value: 6
  misc_feature: MA Experiment 20001558 PARAMETER Experiment Name: At_Drought_Soil_Dry_P Parameter: Post-Treatment Value: Re-Water vs. No Drought
  misc_feature: MA Experiment 20001558 PARAMETER Experiment Name: At_Drought_Soil_Dry_P Parameter: Timepoint (day) Value: 13
  misc_feature: MA Experiment 20001558 PARAMETER Experiment Name: At_Drought_Soil_Dry_P Parameter: Treatment Value: Drought vs. No Drought
  misc_feature: MA Experiment ID: 20001560 Result: Up-regulated in Transcription
  misc_feature: MA Experiment 20001560 PARAMETER Experiment Name: At_Drought_Soil_Dry_P Parameter: Age (day) Value: 28
  misc_feature: MA Experiment 20001560 PARAMETER Experiment Name: At_Drought_Soil_Dry_P Parameter: Organism Value: A. thaliana
  misc_feature: MA Experiment 20001560 PARAMETER Experiment Name: At_Drought_Soil_Dry_P Parameter: Plant Line Value: WS
  misc_feature: MA Experiment 20001560 PARAMETER Experiment Name: At_Drought_Soil_Dry_P Parameter: Post Timepoint (hr) Value: None
  misc_feature: MA Experiment 20001560 PARAMETER Experiment Name: At_Drought_Soil_Dry_P Parameter: Post-Treatment Value: None
  misc_feature: MA Experiment 20001560 PARAMETER Experiment Name: At_Drought_Soil_Dry_P Parameter: Timepoint (day) Value: 14
  misc_feature: MA Experiment 20001560 PARAMETER Experiment Name: At_Drought_Soil_Dry_P Parameter: Treatment Value: Drought vs. No Drought
  misc_feature: MA Experiment ID: 20001757 Result: Up-regulated in Transcription
  misc_feature: MA Experiment 20001757 PARAMETER Experiment Name: At_50mM_NH4NO3_L-to-H_P Parameter: Timepoint (hr) Value: 6
  misc_feature: MA Experiment 20001757 PARAMETER Experiment Name: At_50mM_NH4NO3_L-to-H_P Parameter: Tissue Value: Leaf
  misc_feature: MA Experiment 20001757 PARAMETER Experiment Name: At_50mM_NH4NO3_L-to-H_P Parameter: Treatment Value: 50mM NH4NO3 vs 100mM Mannitol
  misc_feature: MA Experiment ID: 20001906 Result: Up-regulated in Transcription
  misc_feature: MA Experiment 20001906 PARAMETER Experiment Name: At_Drought_Reproduction_P Parameter: Age (day) Value: 35
  misc_feature: MA Experiment 20001906 PARAMETER Experiment Name: At_Drought_Reproduction_P Parameter: Organism Value: A. thaliana
  misc_feature: MA Experiment 20001906 PARAMETER Experiment Name: At_Drought_Reproduction_P Parameter: Plant Line Value: WS
  misc_feature: MA Experiment 20001906 PARAMETER Experiment Name: At_Drought_Reproduction_P Parameter: Timepoint (day) Value: 5
  misc_feature: MA Experiment 20001906 PARAMETER Experiment Name: At_Drought_Reproduction_P Parameter: Tissue Value: Siliques
  misc_feature: MA Experiment 20001906 PARAMETER Experiment Name: At_Drought_Reproduction_P Parameter: Treatment Value: Drought vs. No Drought
atctctttctctctctttccttgcaaattttcagctctcaaagagttaagagttagagagagagaggatggccattagggaaatcaaagatgtagagaggggtgaaatagtgaataaggtagaagatcttgggaaaccatttttgactcatgaagatgatgaaaaagagagtgagaataatgaatcatatttgatggttctcttcagtacttttgttgctgtctgtggctcctttgagtttggctcttgtgttggatactcagcgcctactcagtcatctataagacaagatctcaatctctcccttgcagagttctccatgtttggatccatcttaactatcggtgcaatgcttggtgctgttatgagtgggaaaatttcagatttctccggccgaaaaggggcaatgaggacatcagcttgcttctgcattacaggttggctcgctgtcttcttcaccaagggggcattgttacttgatgtaggaaggttctttacaggatatggaattggagttttttcttatgtggtccctgtgtacattgctgagatatctcccaagaatctccgaggtggactcacaacactgaaccaactcatgattgtgatcggctcatcggtttctttcttgatcggatctctcatttcttggaaaactcttgccctaaccggacttgctccctgcattgttttgctctttggcttgtgcttcatacccgaatctcctcgatggctggcaaaagcaggccatgagaaagagtttcgcgtagccctgcaaaagctgcgaggaaaagatgcagatatcacaaatgaagcagacggtattcaagtctcgattcaagctctagagattcttccaaaagcaagaatccaagaccttgtgtccaagaaatatggtcgatctgtcatcattggtgtttccctgatggtattccaacagtttgttggaatcaatgggatcggattctacgcaagtgaaacgtttgtaaaagccggatttacctctgggaaactaggaacaatcgctatcgcttgtgttcaggtgccaataactgttcttggaacaatcttgatagataaatctggacgaaggccactaattatgatttcagctggtggtatcttcttgggatgcatactcacaggcacatctttcttactcaagggacagagcttgttgcttgaatgggtcccttccttagccgttggaggtgtacttatctatgtagctgctttctccatcggaatgggacctgttccttgggtgataatgtctgagatatttccgataaacgtaaagggaatcgcaggaagcttagtggtactagtgaattggtctggtgcttgggctgtttcttacactttcaacttcctcatgagctggagctctccaggtacattctatttgtactcggcttttgcagctgcgacgataatatttgtggcgaagatggtgccagagacgaaagggaagacactggaagagatccaagcttgtattcgaagagaaacataagaagaaagatacaatcaatgttatgggaatgttatcaaatgaaaagactcgaactattcccgttggtgagctcaaagtggagtagagtaaaaattatcgccgggagataacgttgaaagtccgatgatgaggcataagggttttgcatgaatgttatgagaataggtttacttttatgtatttgttcacgttttaagttttcatcaaataggtttttgattggtatacagtatgtggaatattaatagaatggagtggcag

SEQ ID NO: 85960 - protein, 482 aa, Arabidopsis thaliana; identical to SEQ ID NO: 26636
  peptide (1)..(482): Ceres Seq. ID no. 12684857
  misc_feature (47)..(478): Pfam Name: Sugar (and other) transporter Pfam Description: Sugar (and other) transporter
  misc_feature (1)..(482): Homolog of NCBI NO: 18419741 NR Description: sugar transporter - like protein; protein id: supported by cDNA: 3250., supported by cDNA: gi_17381264 thaliana] >gi|17381265|gb|AAL36051.1| AT5g18840/F17K4_90
  misc_feature (1)..(482): Homolog of NCBI NO: 21592787 NR Description: sugar transporter-like protein [Arabidopsis
  misc_feature (7)..(478): Homolog of NCBI NO: 23504385 NR Description: putative sugar transporter [Lycopersicon
  misc_feature (11)..(476): Homolog of NCBI NO: 30679397 NR Description: sugar transporter family [Arabidopsis thaliana]
  misc_feature (15)..(476): Homolog of NCBI NO: 6729025 NR Description: putative sugar transporter [Arabidopsis thaliana]
  misc_feature (43)..(478): Homolog of NCBI NO: 18407508 NR Description: putative sugar transporter; protein id: supported by cDNA: 114959. [Arabidopsis thaliana]
  misc_feature (43)..(478): Homolog of NCBI NO: 21536914 NR Description: putative sugar transporter [Arabidopsis thaliana]
  misc_feature (33)..(478): Homolog of NCBI NO: 30695810 NR Description: sugar transporter, putative [Arabidopsis thaliana]
  misc_feature (1)..(326): Homolog of NCBI NO: 25405762 NR Description: hypothetical protein T22H22.15 [imported] - thaliana >gi|3776581|gb|AAC64898.1| Similar to Beta integral protein homolog gb|U43629 from A. thaliana. [Arabidopsis
  misc_feature (378)..(478): Homolog of NCBI NO: 25405762 NR Description: hypothetical protein T22H22.15 [imported] - thaliana >gi|3776581|gb|AAC64898.1| Similar to Beta integral protein homolog gb|U43629 from A. thaliana. [Arabidopsis

SEQ ID NO: 85961 - protein, 440 aa, Arabidopsis thaliana; identical to SEQ ID NO: 26637
  peptide (1)..(440): Ceres Seq. ID no. 12684858
  misc_feature (5)..(436): Pfam Name: Sugar (and other) transporter Pfam Description: Sugar (and other) transporter
  misc_feature (1)..(440): Homolog of NCBI NO: 18419741 NR Description: sugar transporter - like protein; protein id: supported by cDNA: 3250., supported by cDNA: gi_17381264 thaliana] >gi|17381265|gb|AAL36051.1| AT5g18840/F17K4_90
  misc_feature (1)..(440): Homolog of NCBI NO: 21592787 NR Description: sugar transporter-like protein [Arabidopsis
  misc_feature (1)..(436): Homolog of NCBI NO: 23504385 NR Description: putative sugar transporter [Lycopersicon
  misc_feature (1)..(434): Homolog of NCBI NO: 30679397 NR Description: sugar transporter family [Arabidopsis thaliana]
  misc_feature (1)..(434): Homolog of NCBI NO: 6729025 NR Description: putative sugar transporter [Arabidopsis thaliana]
  misc_feature (1)..(436): Homolog of NCBI NO: 18407508 NR Description: putative sugar transporter; protein id: supported by cDNA: 114959. [Arabidopsis thaliana]
  misc_feature (1)..(436): Homolog of NCBI NO: 21536914 NR Description: putative sugar transporter [Arabidopsis thaliana]
  misc_feature (1)..(436): Homolog of NCBI NO: 30695810 NR Description: sugar transporter, putative [Arabidopsis thaliana]
  misc_feature (1)..(284): Homolog of NCBI NO: 25405762 NR Description: hypothetical protein T22H22.15 [imported] - thaliana >gi|3776581|gb|AAC64898.1| Similar to Beta integral protein homolog gb|U43629 from A. thaliana. [Arabidopsis
  misc_feature (336)..(436): Homolog of NCBI NO: 25405762 NR Description: hypothetical protein T22H22.15 [imported] - thaliana >gi|3776581|gb|AAC64898.1| Similar to Beta integral protein homolog gb|U43629 from A. thaliana. [Arabidopsis

SEQ ID NO: 85962 - protein, 398 aa, Arabidopsis thaliana; identical to SEQ ID NO: 26638
  peptide (1)..(398): Ceres Seq. ID no. 12684859
  misc_feature (1)..(394): Pfam Name: Sugar (and other) transporter Pfam Description: Sugar (and other) transporter
  misc_feature (1)..(398): Homolog of NCBI NO: 18419741 NR Description: sugar transporter - like protein; protein id: supported by cDNA: 3250., supported by cDNA: gi_17381264 thaliana] >gi|17381265|gb|AAL36051.1| AT5g18840/F17K4_90
  misc_feature (1)..(398): Homolog of NCBI NO: 21592787 NR Description: sugar transporter-like protein [Arabidopsis
  misc_feature (1)..(394): Homolog of NCBI NO: 23504385 NR Description: putative sugar transporter [Lycopersicon
  misc_feature (1)..(392): Homolog of NCBI NO: 30679397 NR Description: sugar transporter family [Arabidopsis thaliana]
  misc_feature (1)..(392): Homolog of NCBI NO: 6729025 NR Description: putative sugar transporter [Arabidopsis thaliana]
  misc_feature (1)..(394): Homolog of NCBI NO: 18407508 NR Description: putative sugar transporter; protein id: supported by cDNA: 114959. [Arabidopsis thaliana]
  misc_feature (1)..(394): Homolog of NCBI NO: 21536914 NR Description: putative sugar transporter [Arabidopsis thaliana]
  misc_feature (1)..(394): Homolog of NCBI NO: 30695810 NR Description: sugar transporter, putative [Arabidopsis thaliana]
  misc_feature (1)..(242): Homolog of NCBI NO: 25405762 NR Description: hypothetical protein T22H22.15 [imported] - thaliana >gi|3776581|gb|AAC64898.1| Similar to Beta integral protein homolog gb|U43629 from A. thaliana. [Arabidopsis
  misc_feature (294)..(394): Homolog of NCBI NO: 25405762 NR Description: hypothetical protein T22H22.15 [imported] - thaliana >gi|3776581|gb|AAC64898.1| Similar to Beta integral protein homolog gb|U43629 from A. thaliana. [Arabidopsis

SEQ ID NO: 85963 - DNA, 580 bp, Arabidopsis thaliana
  misc_feature (1)..(580): Ceres Seq. ID no. 12684868
  misc_feature: MA Experiment ID: 108434 Result: Up-regulated in Transcription
  misc_feature: MA Experiment 108434 PARAMETER Experiment Name: At_Root_Tips_cDNA_P Parameter: Tissue Value: Root Tips
  misc_feature: MA Experiment ID: 20001911 Result: Down-regulated in Transcription
  misc_feature: MA Experiment 20001911 PARAMETER Experiment Name: At_Drought_Reproduction_P Parameter: Age (day) Value: 40
  misc_feature: MA Experiment 20001911 PARAMETER Experiment Name: At_Drought_Reproduction_P Parameter: Organism Value: A. thaliana
  misc_feature: MA Experiment 20001911 PARAMETER Experiment Name: At_Drought_Reproduction_P Parameter: Plant Line Value: WS
  misc_feature: MA Experiment 20001911 PARAMETER Experiment Name: At_Drought_Reproduction_P Parameter: Timepoint (day) Value: 10
  misc_feature: MA Experiment 20001911 PARAMETER Experiment Name: At_Drought_Reproduction_P Parameter: Tissue Value: Flowers
  misc_feature: MA Experiment 20001911 PARAMETER Experiment Name: At_Drought_Reproduction_P Parameter: Treatment Value: Drought vs. No Drought
  misc_feature: Pfam Name: CHCH Pfam Description: CHCH domain
gtcggactcagtggagaagaagaagaagatccaaatcgatccgttgaaaaggaatttcgaatttgctgtgcgatgtcgagtgcggtggacgctacgggaaacccgatccctacttcggcggttttaacggcgtcagcgaagcatataggtatgaggtgtatgccggagaatgttgcgttcctcaaatgcaagaagaatgatccaaacccagagaagtgtctcgacaaaggtcgtgacgtcactcgctgcgtgcttggcttcaaaaggagatggatgattatgttgggtgtatgtattactacacaaacgagtttgatctgtgtaggaaagagcaagaagccttcgagaaagtgtgtcccttgaaatgagaatcacaagttcttgtcatgttttgatttgtatctcataataaagcaaaatgttcatttttgaatgagctttactctctccatctcttgtttgttgtcatcccatttatttcctctcagatgctttcgtagtgagttccaaagacaactaaatgactcagttttattgttcgatggttcactaatcagcacagaatggaacaattgttttt

SEQ ID NO: 85964 - protein, 120 aa, Arabidopsis thaliana
  peptide (1)..(120): Ceres Seq. ID no. 12684869
  misc_feature: Pfam Name: CHCH Pfam Description: CHCH domain
  misc_feature (25)..(86): Homolog of NCBI NO: 15239564 NR Description: NADH:ubiquinone oxidoreductase - like protein;
  misc_feature (26)..(86): Homolog of NCBI NO: 18397530 NR Description: expressed protein; protein id: At3g06310.1, by cDNA: 30584., supported by cDNA: gi_20260661 [Arabidopsis >gi|6437555|gb|AAF08582.1|AC011623_15 unknown protein
  misc_feature (38)..(120): Homolog of NCBI NO: 37589679 NR Description: Unknown (protein for MGC:73139) [Danio rerio]
VGLSGEEEEDPNRSVEKEFRICCAMSSAVDATGNPIPTSAVLTASAKHIGMRCMPENVAFLKCKKNDPNPEKCLDKGRDVTRCVLGFKRRWMIMLGVCITTQTSLICVGKSKKPSRKCVP

SEQ ID NO: 85965 - protein, 96 aa, Arabidopsis thaliana
  peptide (1)..(96): Ceres Seq. ID no. 12684870
  misc_feature: Pfam Name: CHCH Pfam Description: CHCH domain
  misc_feature (1)..(62): Homolog of NCBI NO: 15239564 NR Description: NADH:ubiquinone oxidoreductase - like protein;
  misc_feature (2)..(62): Homolog of NCBI NO: 18397530 NR Description: expressed protein; protein id: At3g06310.1, by cDNA: 30584., supported by cDNA: gi_20260661 [Arabidopsis >gi|6437555|gb|AAF08582.1|AC011623_15 unknown protein
  misc_feature (14)..(96): Homolog of NCBI NO: 37589679 NR Description: Unknown (protein for MGC:73139) [Danio rerio]
MSSAVDATGNPIPTSAVLTASAKHIGMRCMPENVAFLKCKKNDPNPEKCLDKGRDVTRCVLGFKRRWMIMLGVCITTQTSLICVGKSKKPSRKCVP

SEQ ID NO: 85966 - protein, 70 aa, Arabidopsis thaliana
  peptide (1)..(70): Ceres Seq. ID no. 12684871
  misc_feature: Pfam Name: CHCH Pfam Description: CHCH domain
  misc_feature (1)..(36): Homolog of NCBI NO: 15239564 NR Description: NADH:ubiquinone oxidoreductase - like protein;
  misc_feature (1)..(36): Homolog of NCBI NO: 18397530 NR Description: expressed protein; protein id: At3g06310.1, by cDNA: 30584., supported by cDNA: gi_20260661 [Arabidopsis >gi|6437555|gb|AAF08582.1|AC011623_15 unknown protein
  misc_feature (1)..(70): Homolog of NCBI NO: 37589679 NR Description: Unknown (protein for MGC:73139) [Danio rerio]
MRCMPENVAFLKCKKNDPNPEKCLDKGRDVTRCVLGFKRRWMIMLGVCITTQTSLICVGKSKKPSRKCVP

SEQ ID NO: 85967 - DNA, 1660 bp, Arabidopsis thaliana
  misc_feature (1)..(1660): Ceres Seq. ID no. 12684872
  misc_feature: MA Experiment ID: 20000794 Result: Up-regulated in Transcription
  misc_feature: MA Experiment 20000794 PARAMETER Experiment Name: At_Petals_P Parameter: Age (day) Value: 23-25 days
  misc_feature: MA Experiment 20000794 PARAMETER Experiment Name: At_Petals_P Parameter: Plant Line Value: WS
  misc_feature: MA Experiment 20000794 PARAMETER Experiment Name: At_Petals_P Parameter: Tissue Value: Petals vs. Whole plant
atgatcgctttcgttatattcattctctcttttctctttccattttggctcccaccgacgtcatcaatctctaccggagacttccgccgattctcacaccgttcttcttctctccttccgattccggattccaatttcgttccttttttgttttctctcaaaacccctaaattttcttcctttcttcgatctggattttttgtgttccccaaatttcaagactttgatctgattccttctaagatttctccaaagcaaagatcttttttttgttttttgggatctctgtattgttgatgggcacaactagggtctgctcggaggtttcttctggatcttcgaaatcgcttagccaatctctcacggtatcgacctctaccacagaaacagtcaatggtttccatgaattcaagatctgtgggtactctctcgctaaaggtgttggtgtcggcaaatacgtcgcttccgatacgtttatggtcggtggttactcgtgggcaatctacttttatccagatgggaagagtccggaggataactcgtcttacgtttctttgttcatagctcttgctagcgaaggagctgatgttagggctttgtttgagctcacgcttgtggatcagagtggtaatgggaagcataaggttcatagccattttggtagagctctcgatagcggtccctatactctcaagtatcgtggaagcatgtggggatacaagcggtttttcaggaggtccagtctagaatcgtcggattatttgaaggagaatagtctcttggttaggtgccgtgtgggtgtggtgaagtcagttacggagggaccgaggtattacaatatccctgtgccagtttctaacttgggacaacagttgggaaatttattggagagtgggaaaggctgtgatgttgttttccaagttgatggagaaaccttcaacgcacacaaattggttcttgcaacgcgttccccggttttcaacgcacagctttttggccctttaggagaccgaaataccaaatgcataacgatagaagacatggaagcacccattttcaaggtattgctccattttatctactgggacgaattgcctgatatgcaagagttaataggaacagactctacattggcgtctactcttgtggctcagcatctactagcagcggcagaccgttatgctcttgagcggcttaaagcaatctgtgagtcaaaactctgtgaaggggttgccataaacacggttgcaactactttggccctagcagagcagcatcattgtttgcagctaaaagcagtgtgtctcaaattcgtggcactgccagagaacctgaaagctgtgatgcaaacagatgggtttgattatctgaaagagagttgcccatctttactaacggagctattgcagtatgtggcgaggctaagtgaacactctgttatagtatctggacatcgaaaagaaatatttgccgatggttgtgacgcgagtggaagacgagtgaagccccggttgcactgaatgggagagaaagaagaaagatttgtgcattgtataatctctgttatggataatggctgatctaatcggatctagcaagtacaatgaatcgttttcaacgcgttttctcataaatcaaagatccaatgaaatttggggtt

SEQ ID NO: 85968 - protein, 407 aa, Arabidopsis thaliana
  peptide (1)..(407): Ceres Seq. ID no. 12684873
  misc_feature (40)..(169): Pfam Name: MATH domain Pfam Description: MATH domain
  misc_feature (1)..(407): Homolog of NCBI NO: 22531225 NR Description: putative protein [Arabidopsis thaliana]
  misc_feature (1)..(407): Homolog of NCBI NO: 18397497 NR Description: expressed protein; protein id: At3g06190.1, by cDNA: gi_15028068, supported by cDNA: gi_20259304 [Arabidopsis >gi|6862923|gb|AAF30312.1|AC018907_12 unknown protein
  misc_feature (8)..(406): Homolog of NCBI NO: 23617108 NR Description: contains ESTs to Arabidopsis thaliana chromosome 5, At5g19000~unknown protein
  misc_feature (1)..(336): Homolog of NCBI NO: 15239625 NR Description: putative protein; protein id: At5g19000.1
  misc_feature (23)..(401): Homolog of NCBI NO: 21595740 NR Description: unknown [Arabidopsis thaliana]
  misc_feature (23)..(405): Homolog of NCBI NO: 18405153 NR Description: expressed protein; protein id: At2g39760.1, by cDNA: 8256. [Arabidopsis thaliana] >gi|7487697|pir||T01006
  misc_feature (25)..(406): Homolog of NCBI NO: 34394164 NR Description: putative speckle-type POZ protein [Oryza sativa
  misc_feature (11)..(405): Homolog of NCBI NO: 34900034 NR Description: OJ1641_C04.24 [Oryza sativa (japonica >gi|22202734|dbj|BAC07391.1| putative zinc finger POZ domain
  misc_feature (19)..(403): Homolog of NCBI NO: 21536509 NR Description: unknown [Arabidopsis thaliana]
  misc_feature (19)..(403): Homolog of NCBI NO: 30678912 NR Description: expressed protein [Arabidopsis thaliana] unknown protein [Arabidopsis thaliana] AT3g03740/F20H23_23 [Arabidopsis thaliana]
MGTTRVCSEVSSGSSKSLSQSLTVSTSTTETVNGFHEFKICGYSLAKGVGVGKYVASDTFMVGGYSWAIYFYPDGKSPEDNSSYVSLFIALASEGADVRALFELTLVDQSGNGKHKVHSHFGRALDSGPYTLKYRGSMWGYKRFFRRSSLESSDYLKENSLLVRCRVGVVKSVTEGPRYYNIPVPVSNLGQQLGNLLESGKGCDVVFQVDGETFNAHKLVLATRSPVFNAQLFGPLGDRNTKCITIEDMEAPIFKVLLHFIYWDELPDMQELIGTDSTLASTLVAQHLLAAADRYALERLKAICESKLCEGVAINTVATTLALAEQHHCLQLKAVCLKFVALPENLKAVMQTDGFDYLKESCPSLLTELLQYVARLSEHSVIVSGHRKEIFADGCDASGRRVKPRLH

SEQ ID NO: 85969 - protein, 347 aa, Arabidopsis thaliana
  peptide (1)..(347): Ceres Seq. ID no. 12684874
  misc_feature (1)..(109): Pfam Name: MATH domain Pfam Description: MATH domain
  misc_feature (1)..(347): Homolog of NCBI NO: 22531225 NR Description: putative protein [Arabidopsis thaliana]
  misc_feature (1)..(347): Homolog of NCBI NO: 18397497 NR Description: expressed protein; protein id: At3g06190.1, by cDNA: gi_15028068, supported by cDNA: gi_20259304 [Arabidopsis >gi|6862923|gb|AAF30312.1|AC018907_12 unknown protein
  misc_feature (1)..(346): Homolog of NCBI NO: 23617108 NR Description: contains ESTs to Arabidopsis thaliana chromosome 5, At5g19000~unknown protein
  misc_feature (1)..(276): Homolog of NCBI NO: 15239625 NR Description: putative protein; protein id: At5g19000.1
  misc_feature (1)..(341): Homolog of NCBI NO: 21595740 NR Description: unknown [Arabidopsis thaliana]
  misc_feature (1)..(345): Homolog of NCBI NO: 18405153 NR Description: expressed protein; protein id: At2g39760.1, by cDNA: 8256. [Arabidopsis thaliana] >gi|7487697|pir||T01006
  misc_feature (1)..(346): Homolog of NCBI NO: 34394164 NR Description: putative speckle-type POZ protein [Oryza sativa
  misc_feature (1)..(345): Homolog of NCBI NO: 34900034 NR Description: OJ1641_C04.24 [Oryza sativa (japonica >gi|22202734|dbj|BAC07391.1| putative zinc finger POZ domain
  misc_feature (1)..(343): Homolog of NCBI NO: 21536509 NR Description: unknown [Arabidopsis thaliana]
  misc_feature (1)..(343): Homolog of NCBI NO: 30678912 NR Description: expressed protein [Arabidopsis thaliana] unknown protein [Arabidopsis thaliana] AT3g03740/F20H23_23 [Arabidopsis thaliana]
MVGGYSWAIYFYPDGKSPEDNSSYVSLFIALASEGADVRALFELTLVDQSGNGKHKVHSHFGRALDSGPYTLKYRGSMWGYKRFFRRSSLESSDYLKENSLLVRCRVGVVKSVTEGPRYYNIPVPVSNLGQQLGNLLESGKGCDVVFQVDGETFNAHKLVLATRSPVFNAQLFGPLGDRNTKCITIEDMEAPIFKVLLHFIYWDELPDMQELIGTDSTLASTLVAQHLLAAADRYALERLKAICESKLCEGVAINTVATTLALAEQHHCLQLKAVCLKFVALPENLKAVMQTDGFDYLKESCPSLLTELLQYVARLSEHSVIVSGHRKEIFADGCDASGRRVKPRLH

SEQ ID NO: 85970 - protein, 270 aa, Arabidopsis thaliana
  peptide (1)..(270): Ceres Seq. ID no. 12684875
  misc_feature (56)..(175): Pfam Name: BTB/POZ domain Pfam Description: BTB/POZ domain
  misc_feature (1)..(270): Homolog of NCBI NO: 22531225 NR Description: putative protein [Arabidopsis thaliana]
  misc_feature (1)..(270): Homolog of NCBI NO: 18397497 NR Description: expressed protein; protein id: At3g06190.1, by cDNA: gi_15028068, supported by cDNA: gi_20259304 [Arabidopsis >gi|6862923|gb|AAF30312.1|AC018907_12 unknown protein
  misc_feature (1)..(269): Homolog of NCBI NO: 23617108 NR Description: contains ESTs to Arabidopsis thaliana chromosome 5, At5g19000~unknown protein
  misc_feature (1)..(199): Homolog of NCBI NO: 15239625 NR Description: putative protein; protein id: At5g19000.1
  misc_feature (1)..(264): Homolog of NCBI NO: 21595740 NR Description: unknown [Arabidopsis thaliana]
  misc_feature (1)..(268): Homolog of NCBI NO: 18405153 NR Description: expressed protein; protein id: At2g39760.1, by cDNA: 8256. [Arabidopsis thaliana] >gi|7487697|pir||T01006
  misc_feature (1)..(269): Homolog of NCBI NO: 34394164 NR Description: putative speckle-type POZ protein [Oryza sativa
  misc_feature (1)..(268): Homolog of NCBI NO: 34900034 NR Description: OJ1641_C04.24 [Oryza sativa (japonica >gi|22202734|dbj|BAC07391.1| putative zinc finger POZ domain
  misc_feature (1)..(266): Homolog of NCBI NO: 21536509 NR Description: unknown [Arabidopsis thaliana]
  misc_feature (1)..(266): Homolog of NCBI NO: 30678912 NR Description: expressed protein [Arabidopsis thaliana] unknown protein [Arabidopsis thaliana] AT3g03740/F20H23_23 [Arabidopsis thaliana]
MWGYKRFFRRSSLESSDYLKENSLLVRCRVGVVKSVTEGPRYYNIPVPVSNLGQQLGNLLESGKGCDVVFQVDGETFNAHKLVLATRSPVFNAQLFGPLGDRNTKCITIEDMEAPIFKVLLHFIYWDELPDMQELIGTDSTLASTLVAQHLLAAADRYALERLKAICESKLCEGVAINTVATTLALAEQHHCLQLKAVCLKFVALPENLKAVMQTDGFDYLKESCPSLLTELLQYVARLSEHSVIVSGHRKEIFADGCDASGRRVKPRLH

SEQ ID NO: 85971 - DNA, 1187 bp, Arabidopsis thaliana
  misc_feature (1)..(1187): Ceres Seq. ID no. 12684876
  misc_feature: MA Experiment ID: 20000224 Result: Down-regulated in Transcription
  misc_feature: MA Experiment ID: 20000496 Result: Up-regulated in Transcription
  misc_feature: MA Experiment 20000496 PARAMETER Experiment Name: At_Guard_Cells_P Parameter: Harvest Date Value: 7/19/2002
  misc_feature: MA Experiment 20000496 PARAMETER Experiment Name: At_Guard_Cells_P Parameter: Organism Value: Canola
  misc_feature: MA Experiment 20000496 PARAMETER Experiment Name: At_Guard_Cells_P Parameter: Tissue Value: Guard Cells vs. Leaves
accgttgaacactttcccgagaaaagctctctcatcttttattttcccggaaaaaaataattaaacttttactctcttccgatctcctttccttgtacatctagatccaagcggtatcgatggctcgacgtggattattgatttcgttcttcgctatcttctccgtcctgcttcaatcttccacttctctgatcagttcttctagcgtcttcgtcaatccttccaaagtcaagcaggtttcatcgaaacccagggcgtttgtgtatgaagggtttctcacggaattggaatgtgatcatatggtctcccttgcaaaagcgagcctgaagagatctgctgttgctgataatgatagtggagagagcaaattcagcgaggttcgaaccagctctggcacctttatctccaaaggaaaggatcccattgtttctggtatagaagataagatctccacttggacatttcttccaaaagaaaacggggaagacattcaggtattgagatacgagcacggccaaaaatacgatgctcactttgattactttcatgacaaagtcaacattgtccgtggtggacatcgcatggcaacaattcttatgtatctatccaatgtgacgaaaggtggagaaactgtattccctgatgcagagataccttctcgccgagtactatctgaaaataaagaagacctttctgattgtgccaagagaggaattgctgtgaaaccaaggaaaggggatgctttgttgttcttcaacctccacccagacgcaatcccggacccattgagccttcacggtggatgtcctgtgatagaaggagagaaatggtcggcaaccaagtggatccacgtagactcatttgataggatcgtgacaccaagcggaaactgcacggatatgaacgagagctgtgagagatgggcagttcttggggaatgcacaaagaatccagagtacatggttggaactacagagcttcctggctattgcaggcgaagctgtaaggcttgctagactttattttacctcttctttgtcttattatgtgcctttactctcaaagttttctgtttttttccgagtttctcttagagttgttgtcgttgatgaaatttgttctaaggggagttctgtaaaactatactgttcctgaaaagaatataatgtaaacacatagattcagtc

SEQ ID NO: 85972 - protein, 298 aa, Arabidopsis thaliana; identical to SEQ ID NO: 24186
  peptide (1)..(298): Ceres Seq. ID no. 12684877
  misc_feature (120)..(245): Pfam Name: 2OG-Fe(II) oxygenase superfamily Pfam Description: 2OG-Fe(II) oxygenase superfamily
  misc_feature (1)..(298): Homolog of NCBI NO: 15239594 NR Description: putative protein; protein id: At5g18900.1, by cDNA: 37828., supported by cDNA: gi_20260279 [Arabidopsis
  misc_feature (1)..(298): Homolog of NCBI NO: 20260280 NR Description: unknown protein [Arabidopsis thaliana]
  misc_feature (1)..(298): Homolog of NCBI NO: 18397528 NR Description: expressed protein; protein id: At3g06300.1,
  misc_feature (1)..(298): Homolog of NCBI NO: 21618073 NR Description: prolyl 4-hydroxylase alpha subunit-like protein
  misc_feature (1)..(298): Homolog of NCBI NO: 29150365 NR Description: putative oxidoreductase [Oryza sativa (japonica
  misc_feature (26)..(298): Homolog of NCBI NO: 9294583 NR Description: prolyl 4-hydroxylase alpha subunit-like protein
  misc_feature (26)..(298): Homolog of NCBI NO: 18405808 NR Description: prolyl 4-hydroxylase, putative; protein id: supported by cDNA: 8330., supported by cDNA: gi_18086436
  misc_feature (26)..(298): Homolog of NCBI NO: 18086437 NR Description: AT3g28480/MFJ20_16 [Arabidopsis thaliana]
  misc_feature (20)..(298): Homolog of NCBI NO: 29150368 NR Description: putative oxidoreductase [Oryza sativa (japonica
  misc_feature (100)..(298): Homolog of NCBI NO: 37534316 NR Description: unknown protein [Oryza sativa (japonica

SEQ ID NO: 85973 - protein, 238 aa, Arabidopsis thaliana; identical to SEQ ID NO: 24187
  peptide (1)..(238): Ceres Seq. ID no. 12684878
  misc_feature (60)..(185): Pfam Name: 2OG-Fe(II) oxygenase superfamily Pfam Description: 2OG-Fe(II) oxygenase superfamily
  misc_feature (1)..(238): Homolog of NCBI NO: 15239594 NR Description: putative protein; protein id: At5g18900.1, by cDNA: 37828., supported by cDNA: gi_20260279 [Arabidopsis
  misc_feature (1)..(238): Homolog of NCBI NO: 20260280 NR Description: unknown protein [Arabidopsis thaliana]
  misc_feature (1)..(238): Homolog of NCBI NO: 18397528 NR Description: expressed protein; protein id: At3g06300.1,
  misc_feature (1)..(238): Homolog of NCBI NO: 21618073 NR Description: prolyl 4-hydroxylase alpha subunit-like protein
  misc_feature (1)..(238): Homolog of NCBI NO: 29150365 NR Description: putative oxidoreductase [Oryza sativa (japonica
  misc_feature (1)..(238): Homolog of NCBI NO: 9294583 NR Description: prolyl 4-hydroxylase alpha subunit-like protein
  misc_feature (1)..(238): Homolog of NCBI NO: 18405808 NR Description: prolyl 4-hydroxylase, putative; protein id: supported by cDNA: 8330., supported by cDNA: gi_18086436
  misc_feature (1)..(238): Homolog of NCBI NO: 18086437 NR Description: AT3g28480/MFJ20_16 [Arabidopsis thaliana]
  misc_feature (1)..(238): Homolog of NCBI NO: 29150368 NR Description: putative oxidoreductase [Oryza sativa (japonica
  misc_feature (40)..(238): Homolog of NCBI NO: 37534316 NR Description: unknown protein [Oryza sativa (japonica

SEQ ID NO: 85974 - DNA, 1166 bp, Arabidopsis thaliana
  misc_feature (1)..(1166): Ceres Seq. ID no. 12684892
  misc_feature: MA Experiment ID: 108434 Result: Up-regulated in Transcription
  misc_feature: MA Experiment 108434 PARAMETER Experiment Name: At_Root_Tips_cDNA_P Parameter: Tissue Value: Root Tips
  misc_feature: MA Experiment ID: 108462 Result: Down-regulated in Transcription
  misc_feature: MA Experiment 108462 PARAMETER Experiment Name: At_Germinating_Seeds_cDNA_P Parameter: Age (day) Value: 2 vs. 0
  misc_feature: MA Experiment 108462 PARAMETER Experiment Name: At_Germinating_Seeds_cDNA_P Parameter: Tissue Value: Germinating Seeds
  misc_feature: MA Experiment ID: 108463 Result: Down-regulated in Transcription
  misc_feature: MA Experiment 108463 PARAMETER Experiment Name: At_Germinating_Seeds_cDNA_P Parameter: Age (day) Value: 3 vs. 0
  misc_feature: MA Experiment 108463 PARAMETER Experiment Name: At_Germinating_Seeds_cDNA_P Parameter: Tissue Value: Germinating Seeds
  misc_feature: MA Experiment ID: 108464 Result: Down-regulated in Transcription
  misc_feature: MA Experiment 108464 PARAMETER Experiment Name: At_Germinating_Seeds_cDNA_P Parameter: Age (day) Value: 4 vs. 0
  misc_feature: MA Experiment 108464 PARAMETER Experiment Name: At_Germinating_Seeds_cDNA_P Parameter: Tissue Value: Germinating Seeds
  misc_feature: MA Experiment ID: 108577 Result: Up-regulated in Transcription
  misc_feature: MA Experiment 108577 PARAMETER Experiment Name: At_42deg_Heat_cDNA_P Parameter: Temperature (deg C) Value: 42 vs. 22
  misc_feature: MA Experiment 108577 PARAMETER Experiment Name: At_42deg_Heat_cDNA_P Parameter: Timepoint (hr) Value: 6
  misc_feature: MA Experiment 108577 PARAMETER Experiment Name: At_42deg_Heat_cDNA_P Parameter: Tissue Value: Aerial
  misc_feature: MA Experiment ID: 108595 Result: Down-regulated in Transcription
  misc_feature: MA Experiment 108595 PARAMETER Experiment Name: At_Ler-pi_Ovule_cDNA_P Parameter: Plant Line Value: null
  misc_feature: MA Experiment ID: 20000093 Result: Up-regulated in Transcription
  misc_feature: MA Experiment 20000093 PARAMETER Experiment Name: At_42deg_Heat_cDNA_P Parameter: Temperature (deg C) Value: 42 vs. 22
  misc_feature: MA Experiment 20000093 PARAMETER Experiment Name: At_42deg_Heat_cDNA_P Parameter: Timepoint (hr) Value: 0.5
  misc_feature: MA Experiment 20000093 PARAMETER Experiment Name: At_42deg_Heat_cDNA_P Parameter: Tissue Value: Aerial
  misc_feature: MA Experiment ID: 20000111 Result: Up-regulated in Transcription
  misc_feature: MA Experiment 20000111 PARAMETER Experiment Name: At_42deg_Heat_cDNA_P Parameter: Temperature (deg C) Value: 42 vs. 22
  misc_feature: MA Experiment 20000111 PARAMETER Experiment Name: At_42deg_Heat_cDNA_P Parameter: Timepoint (hr) Value: 6
  misc_feature: MA Experiment 20000111 PARAMETER Experiment Name: At_42deg_Heat_cDNA_P Parameter: Tissue Value: Aerial
  misc_feature: MA Experiment ID: 20000113 Result: Up-regulated in Transcription
  misc_feature: MA Experiment 20000113 PARAMETER Experiment Name: At_42deg_Heat_cDNA_P Parameter: Temperature (deg C) Value: 42 vs. 22
  misc_feature: MA Experiment 20000113 PARAMETER Experiment Name: At_42deg_Heat_cDNA_P Parameter: Timepoint (hr) Value: 8
  misc_feature: MA Experiment 20000113 PARAMETER Experiment Name: At_42deg_Heat_cDNA_P Parameter: Tissue Value: Aerial
  misc_feature: MA Experiment ID: 20000224 Result: Down-regulated in Transcription
  misc_feature: MA Experiment ID: 20000794 Result: Down-regulated in Transcription
  misc_feature: MA Experiment 20000794 PARAMETER Experiment Name: At_Petals_P Parameter: Age (day) Value: 23-25 days
  misc_feature: MA Experiment 20000794 PARAMETER Experiment Name: At_Petals_P Parameter: Plant Line Value: WS
  misc_feature: MA Experiment 20000794 PARAMETER Experiment Name: At_Petals_P Parameter: Tissue Value: Petals vs. Whole plant
  misc_feature: MA Experiment ID: 20001557 Result: Up-regulated in Transcription
  misc_feature: MA Experiment 20001557 PARAMETER Experiment Name: At_Drought_Soil_Dry_P Parameter: Age (day) Value: 27
  misc_feature: MA Experiment 20001557 PARAMETER Experiment Name: At_Drought_Soil_Dry_P Parameter: Organism Value: A. thaliana
  misc_feature: MA Experiment 20001557 PARAMETER Experiment Name: At_Drought_Soil_Dry_P Parameter: Plant Line Value: WS
  misc_feature: MA Experiment 20001557 PARAMETER Experiment Name: At_Drought_Soil_Dry_P Parameter: Post Timepoint (hr) Value: 3
  misc_feature: MA Experiment 20001557 PARAMETER Experiment Name: At_Drought_Soil_Dry_P Parameter: Post-Treatment Value: Re-Water vs. No Drought
  misc_feature: MA Experiment 20001557 PARAMETER Experiment Name: At_Drought_Soil_Dry_P Parameter: Timepoint (day) Value: 13
  misc_feature: MA Experiment 20001557 PARAMETER Experiment Name: At_Drought_Soil_Dry_P Parameter: Treatment Value: Drought vs. No Drought
  misc_feature: MA Experiment ID: 20001558 Result: Up-regulated in Transcription
  misc_feature: MA Experiment 20001558 PARAMETER Experiment Name: At_Drought_Soil_Dry_P Parameter: Age (day) Value: 27
  misc_feature: MA Experiment 20001558 PARAMETER Experiment Name: At_Drought_Soil_Dry_P Parameter: Organism Value: A. thaliana
  misc_feature: MA Experiment 20001558 PARAMETER Experiment Name: At_Drought_Soil_Dry_P Parameter: Plant Line Value: WS
  misc_feature: MA Experiment 20001558 PARAMETER Experiment Name: At_Drought_Soil_Dry_P Parameter: Post Timepoint (hr) Value: 6
  misc_feature: MA Experiment 20001558 PARAMETER Experiment Name: At_Drought_Soil_Dry_P Parameter: Post-Treatment Value: Re-Water vs. No Drought
  misc_feature: MA Experiment 20001558 PARAMETER Experiment Name: At_Drought_Soil_Dry_P Parameter: Timepoint (day) Value: 13
  misc_feature: MA Experiment 20001558 PARAMETER Experiment Name: At_Drought_Soil_Dry_P Parameter: Treatment Value: Drought vs. No Drought
  misc_feature: MA Experiment ID: 20001757 Result: Up-regulated in Transcription
  misc_feature: MA Experiment 20001757 PARAMETER Experiment Name: At_50mM_NH4NO3_L-to-H_P Parameter: Timepoint (hr) Value: 6
  misc_feature: MA Experiment 20001757 PARAMETER Experiment Name: At_50mM_NH4NO3_L-to-H_P Parameter: Tissue Value: Leaf
  misc_feature: MA Experiment 20001757 PARAMETER Experiment Name: At_50mM_NH4NO3_L-to-H_P Parameter: Treatment Value: 50mM NH4NO3 vs 100mM Mannitol
acagctcaggatatactcttttaggtttcaacagcagcttagtctctctgatctctctacctccctcacaccctaaaactcagcaacaatggccgttaccttttcagatctacacacagaggagggtgtcaaatccgtggaggagcacctcgccggaaaaacctacatctccggagatcaattgtctgtggatgatgtcaaggtttacgctgccgttccagtgaaacccagcgatgccttccccaatgctagcaagtggtacgagtccgtggcttcccaacttgctaaaagtttccctggaaaggccgttggagtacaattcggtggctctgctgctgctgctccagctgttgaagctgaggtacctttacttgaatgctttattctttattaccatagtcgtagaccttagaaaaagggtaatgaatgtagtttggaactatgatttgaaaggtgatatttccaatcttgtattagggatcacgagctatgtttggtaggggaattgattggagtttggtttggaatgttgtgtgtgtgtgtgtgtgtttacgctatcttgcataattgtcaacaggcacctgcagctgcagctgatgatgatgatgacatggatctctttggtgacgagaccgaagaagaaaagaaagctgcagaggagagggaggctgctaagaaggacaccaagaagcctaaagagagtggaaagtcttctgtgctcatggatgttaagccatgggatgatgaaaccgacatgaagaaactggaagaggctgttcgtggtgttgagatgcctggtcttttctggggagcctcaaaacttgtaccagttggttatgggatcaagaaactcacaattatgttcacgattgttgatgacctcgtgtccccggacaacctcattgaagacttcctcacctcagagcctaacaacgagtacatccagagttgtgacattgtcgctttcaacaagatttagagacttcaaatttctccttaccgaaacatatctgaatttcaagttttgttttcgtttgtgttgtttaccgaaatgtttctttcctagttgcaagaccgctttcatgttacaataacactaaattttcaatggttactattccgttgcatcattgttaagaaacatttagatactttgacaaattctc

SEQ ID NO: 85975 - protein, 150 aa, Arabidopsis thaliana
  peptide (1)..(150): Ceres Seq. ID no. 12684893
  misc_feature (61)..(150): Pfam Name: EF-1 guanine nucleotide exchange domain Pfam Description: EF-1 guanine nucleotide exchange domain
  misc_feature (1)..(150): Homolog of NCBI NO: 30687350 NR Description: elongation factor 1B alpha-subunit [Arabidopsis >gi|25456757|pir||T52558 translation elongation factor eEF1Balpha
  misc_feature (13)..(150): Homolog of NCBI NO: 15239877 NR Description: elongation factor 1B alpha-subunit protein id: At5g12110.1 [Arabidopsis thaliana]
  misc_feature (13)..(150): Homolog of NCBI NO: 27754711 NR Description: putative elongation factor 1B alpha-subunit
  misc_feature (18)..(150): Homolog of NCBI NO: 38175744 NR Description: putative translation elongation factor eEF-1
  misc_feature (18)..(150): Homolog of NCBI NO: 232031 NR Description: ELONGATION FACTOR 1-BETA' (EF-1-BETA')
  misc_feature (18)..(150): Homolog of NCBI NO: 232033 NR Description: ELONGATION FACTOR 1-BETA' (EF-1-BETA')
  misc_feature (18)..(150): Homolog of NCBI NO: 34899162 NR Description: putative translation elongation factor eEF-1
  misc_feature (17)..(150): Homolog of NCBI NO: 6015064 NR Description: ELONGATION FACTOR 1-BETA (EF-1-BETA)
  misc_feature (17)..(150): Homolog of NCBI NO: 38232568 NR Description: translational elongation factor 1 subunit Bbeta
  misc_feature (16)..(150): Homolog of NCBI NO: 3894214 NR Description: elongation factor 1 beta 2 [Oryza sativa cultivar- group)] >gi|3894216|dbj|BAA34599.1| elongation factor 1
MLCVCVCVYAILHNCQQAPAAAADDDDDMDLFGDETEEEKKAAEEREAAKKDTKKPKESGKSSVLMDVKPWDDETDMKKLEEAVRGVEMPGLFWGASKLVPVGYGIKKLTIMFTIVDDLVSPDNLIEDFLTSEPNNEYIQSCDIVAFNKI

SEQ ID NO: 85976 - protein, 122 aa, Arabidopsis thaliana; identical to SEQ ID NO: 36256
  peptide (1)..(122): Ceres Seq. ID no. 12684894
  misc_feature (33)..(122): Pfam Name: EF-1 guanine nucleotide exchange domain Pfam Description: EF-1 guanine nucleotide exchange domain
  misc_feature (1)..(122): Homolog of NCBI NO: 30687350 NR Description: elongation factor 1B alpha-subunit [Arabidopsis >gi|25456757|pir||T52558 translation elongation factor eEF1Balpha
  misc_feature (1)..(122): Homolog of NCBI NO: 15239877 NR Description: elongation factor 1B alpha-subunit protein id: At5g12110.1 [Arabidopsis thaliana]
  misc_feature (1)..(122): Homolog of NCBI NO: 27754711 NR Description: putative elongation factor 1B alpha-subunit
  misc_feature (1)..(122): Homolog of NCBI NO: 38175744 NR Description: putative translation elongation factor eEF-1
  misc_feature (1)..(122): Homolog of NCBI NO: 232031 NR Description: ELONGATION FACTOR 1-BETA' (EF-1-BETA')
  misc_feature (1)..(122): Homolog of NCBI NO: 232033 NR Description: ELONGATION FACTOR 1-BETA' (EF-1-BETA')
  misc_feature (1)..(122): Homolog of NCBI NO: 34899162 NR Description: putative translation elongation factor eEF-1
  misc_feature (1)..(122): Homolog of NCBI NO: 6015064 NR Description: ELONGATION FACTOR 1-BETA (EF-1-BETA)
  misc_feature (1)..(122): Homolog of NCBI NO: 38232568 NR Description: translational elongation factor 1 subunit Bbeta
  misc_feature (1)..(122): Homolog of NCBI NO: 3894214 NR Description: elongation factor 1 beta 2 [Oryza sativa cultivar- group)] >gi|3894216|dbj|BAA34599.1| elongation factor 1

SEQ ID NO: 85977 - protein, 107 aa, Arabidopsis thaliana
  peptide (1)..(107): Ceres Seq. ID no. 12684895
  misc_feature (18)..(65): Pfam Name: Glutathione S-transferase, C-terminal domain Pfam Description: Glutathione S-transferase, C-terminal domain
  misc_feature (1)..(93): Homolog of NCBI NO: 30687350 NR Description: elongation factor 1B alpha-subunit [Arabidopsis >gi|25456757|pir||T52558 translation elongation factor eEF1Balpha
  misc_feature (1)..(90): Homolog of NCBI NO: 15239877 NR Description: elongation factor 1B alpha-subunit protein id: At5g12110.1 [Arabidopsis thaliana]
  misc_feature (19)..(90): Homolog of NCBI NO: 27754711 NR Description: putative elongation factor 1B alpha-subunit
  misc_feature (1)..(90): Homolog of NCBI NO: 38175744 NR Description: putative translation elongation factor eEF-1
  misc_feature (1)..(90): Homolog of NCBI NO: 232031 NR Description: ELONGATION FACTOR 1-BETA' (EF-1-BETA')
  misc_feature (1)..(91): Homolog of NCBI NO: 232033 NR Description: ELONGATION FACTOR 1-BETA' (EF-1-BETA')
  misc_feature (1)..(90): Homolog of NCBI NO: 34899162 NR Description: putative translation elongation factor eEF-1
  misc_feature (1)..(88): Homolog of NCBI NO: 6015064 NR Description: ELONGATION FACTOR 1-BETA (EF-1-BETA)
  misc_feature (1)..(88): Homolog of NCBI NO: 38232568 NR Description: translational elongation factor 1 subunit Bbeta
  misc_feature (1)..(93): Homolog of NCBI NO: 3894214 NR Description: elongation factor 1 beta 2 [Oryza sativa cultivar- group)] >gi|3894216|dbj|BAA34599.1| elongation factor 1
MAVTFSDLHTEEGVKSVEEHLAGKTYISGDQLSVDDVKVYAAVPVKPSDAFPNASKWYESVASQLAKSFPGKAVGVQFGGSAAAAPAVEAEVPLLECFILYYHSRRP

SEQ ID NO: 85978 - DNA, 1515 bp, Arabidopsis thaliana
  misc_feature (1)..(1515): Ceres Seq. ID no. 12684896
  misc_feature: MA Experiment ID: 108433 Result: Up-regulated in Transcription
  misc_feature: MA Experiment 108433 PARAMETER Experiment Name: At_rhl_Mutant2_cDNA_P Parameter: Age (day) Value: 7
  misc_feature: MA Experiment 108433 PARAMETER Experiment Name: At_rhl_Mutant2_cDNA_P Parameter: Organism Value: A. thaliana
  misc_feature: MA Experiment 108433 PARAMETER Experiment Name: At_rhl_Mutant2_cDNA_P Parameter: Plant Line Value: rhl Mutant vs. wt landsburg
  misc_feature: MA Experiment 108433 PARAMETER Experiment Name: At_rhl_Mutant2_cDNA_P Parameter: Tissue Value: Roots
  misc_feature: MA Experiment ID: 108461 Result: Down-regulated in Transcription
  misc_feature: MA Experiment 108461 PARAMETER Experiment Name: At_Germinating_Seeds_cDNA_P Parameter: Age (day) Value: 1 vs. 0
  misc_feature: MA Experiment 108461 PARAMETER Experiment Name: At_Germinating_Seeds_cDNA_P Parameter: Tissue Value: Germinating Seeds
  misc_feature: MA Experiment ID: 108462 Result: Down-regulated in Transcription
  misc_feature: MA Experiment 108462 PARAMETER Experiment Name: At_Germinating_Seeds_cDNA_P Parameter: Age (day) Value: 2 vs. 0
  misc_feature: MA Experiment 108462 PARAMETER Experiment Name: At_Germinating_Seeds_cDNA_P Parameter: Tissue Value: Germinating Seeds
  misc_feature: MA Experiment ID: 108463 Result: Down-regulated in Transcription
  misc_feature: MA Experiment 108463 PARAMETER Experiment Name: At_Germinating_Seeds_cDNA_P Parameter: Age (day) Value: 3 vs. 0
  misc_feature: MA Experiment 108463 PARAMETER Experiment Name: At_Germinating_Seeds_cDNA_P Parameter: Tissue Value: Germinating Seeds
  misc_feature: MA Experiment ID: 108464 Result: Down-regulated in Transcription
  misc_feature: MA Experiment 108464 PARAMETER Experiment Name: At_Germinating_Seeds_cDNA_P Parameter: Age (day) Value: 4 vs. 0
  misc_feature: MA Experiment 108464 PARAMETER Experiment Name: At_Germinating_Seeds_cDNA_P Parameter: Tissue Value: Germinating Seeds
  misc_feature: MA Experiment ID: 108573 Result: Up-regulated in Transcription
  misc_feature: MA Experiment 108573 PARAMETER Experiment Name: At_Drought_cDNA_P Parameter: Timepoint (hr) Value: 6
  misc_feature: MA Experiment 108573 PARAMETER Experiment Name: At_Drought_cDNA_P Parameter: Tissue Value: Aerial
  misc_feature: MA Experiment 108573 PARAMETER Experiment Name: At_Drought_cDNA_P Parameter: Treatment Value: Drought vs. No Drought
  misc_feature: MA Experiment ID: 20000180 Result: Down-regulated in Transcription
  misc_feature: MA Experiment 20000180 PARAMETER Experiment Name: At_Germinating_Seeds_P Parameter: Age (hr) Value: 24 vs. 0
  misc_feature: MA Experiment 20000180 PARAMETER Experiment Name: At_Germinating_Seeds_P Parameter: Tissue Value: Germinating Seeds
  misc_feature: MA Experiment ID: 20000185 Result: Up-regulated in Transcription
  misc_feature: MA Experiment 20000185 PARAMETER Experiment Name: At_Roots__P Parameter: Age (day) Value: 7 vs. 21
  misc_feature: MA Experiment 20000185 PARAMETER Experiment Name: At_Roots__P Parameter: Organism Value: A. thaliana
  misc_feature: MA Experiment 20000185 PARAMETER Experiment Name: At_Roots__P Parameter: Tissue Value: Roots vs. Whole Plant
  misc_feature: MA Experiment ID: 20000235 Result: Up-regulated in Transcription
  misc_feature: MA Experiment 20000235 PARAMETER Experiment Name: At_Siliques_P Parameter: Age (day) Value: 21
  misc_feature: MA Experiment 20000235 PARAMETER Experiment Name: At_Siliques_P Parameter: Organism Value: A. thaliana
  misc_feature: MA Experiment 20000235 PARAMETER Experiment Name: At_Siliques_P Parameter: Plant Line Value: WS
  misc_feature: MA Experiment 20000235 PARAMETER Experiment Name: At_Siliques_P Parameter: Tissue Value: 5-10mm Siliques vs. Whole Plant
  misc_feature: MA Experiment ID: 20000439 Result: Up-regulated in Transcription
  misc_feature: MA Experiment 20000439 PARAMETER Experiment Name: At_Roots__P Parameter: Age (day) Value: 14 vs. 21
  misc_feature: MA Experiment 20000439 PARAMETER Experiment Name: At_Roots__P Parameter: Organism Value: A. thaliana
  misc_feature: MA Experiment 20000439 PARAMETER Experiment Name: At_Roots__P Parameter: Tissue Value: Roots vs. Whole Plant
  misc_feature: MA Experiment ID: 20000574 Result: Up-regulated in Transcription
  misc_feature: MA Experiment 20000574 PARAMETER Experiment Name: At_100uM_ABA_Mutants__P Parameter: Organism Value: A. thaliana
  misc_feature: MA Experiment 20000574 PARAMETER Experiment Name: At_100uM_ABA_Mutants__P Parameter: Plant Line Value: CS23 vs. Ler wt
  misc_feature: MA Experiment 20000574 PARAMETER Experiment Name: At_100uM_ABA_Mutants__P Parameter: Timepoint (hr) Value: N/A
  misc_feature: MA Experiment 20000574 PARAMETER Experiment Name: At_100uM_ABA_Mutants__P Parameter: Tissue Value: Whole Plant
  misc_feature: MA Experiment 20000574 PARAMETER Experiment Name: At_100uM_ABA_Mutants__P Parameter: Treatment Value: None
caagattaaaaagacgacttctcttttaacttattcctcctctgcttcttcaagatccattgtctgcaatttcaatcccttgtctcgtcatggattccgtcttctctaacgttgctcgtgctcccgaagatcctattctcggtgtaactgttgcttacaacaatgatcctagtcctgttaagatcaatttgggtgtcggtgcctaccgaactgaggaagggaagcctcttgttcttgatgtggtgcgtaaggcagagcaacagctagtgaacgatccgtctcgggtcaaggaatacattcccattgttggtatttccgattttaacaagttaagcgccaagctcatcttaggtgctgacagtcctgcgattacagaaagtagagttactacagtccagtgcttgtctggtactggttcgttgagagttggggctgagtttctcaaaacacactaccaccaaagtgtcatttacattccaaaaccaacttgggggaaccatcccaaagttttcaacttggcaggcttgtctgtggagtatttccgctactatgatcctgcaacccgtggtcttgacttcaaaggcttgctcgaggatcttggcgctgcaccatctggagctattgtcttacttcatgcatgtgcacacaatcccactggagttgacccaacctctgaacagtgggaacagattcgacagctgatgagatctaaaagcttattacccttttttgatagtgcatatcagggttttgctagtggtagccttgacacagatgcacaatctgtccgtacatttgttgctgatggcggtgaatgcttgatagctcaaagttacgccaaaaatatgggactttatggggagcgtgttggtgcccttagcattgtctgcaagtcagcagatgtggctagtaaggttgagagccaggtgaagcttgttgtgcggcccatgtattcgagcccccctattcatggagcatcaattgttgccaccattctaaaaagcagtgatatgtacaacaactggaccatcgagctgaaagaaatggctgaccgtataaagagcatgcgccaacagttatttgaagctatacaagctagaggtacacctggtgactggagtcatattatcaaacagattgggatgtttacatttactggattgaacaaggagcaagttgaattcatgaccaaagagttccacatttacatgacctctgatgggagaataagcatggcaggtctaagttcgaagacagtgcctcaccttgccgatgctatgcatgctgcagtgacccgcctcggctaaactagcgaccatacatttttttgctgtttctacaaataaaatgggacaaaaaaaaagaacaccgtttttgttggcttatatactatggtttttttctgatggtaccatatgtttcctcatgtcttttgactaaagatggttgaaccaaaaccaaagtgaggattgtgacattgagatctaccgtttctaagaaaatattggttacttt

SEQ ID NO: 85979 - protein, 405 aa, Arabidopsis thaliana; identical to SEQ ID NO: 28643
  peptide (1)..(405): Ceres Seq. ID no. 12684897
  misc_feature (84)..(401): Pfam Name: Aminotransferase class I and II Pfam Description: Aminotransferase class I and II
  misc_feature (1)..(405): Homolog of NCBI NO: 15239772 NR Description: aspartate aminotransferase Asp2; protein id: supported by cDNA: gi_693689 [Arabidopsis thaliana] Aspartate aminotransferase, cytoplasmic isozyme 1 (Transaminase
  misc_feature (1)..(405): Homolog of NCBI NO: 693690 NR Description: aspartate aminotransferase

SEQ ID NO: 85980 - DNA, 1808 bp, Arabidopsis thaliana
  misc_feature (1)..(1808): Ceres Seq. ID no. 12684929
  misc_feature: MA Experiment ID: 108561 Result: Up-regulated in Transcription
  misc_feature: MA Experiment 108561 PARAMETER Experiment Name: At_100uM_ABA_cDNA_P Parameter: Timepoint (hr) Value: 6
  misc_feature: MA Experiment 108561 PARAMETER Experiment Name: At_100uM_ABA_cDNA_P Parameter: Tissue Value: Aerial
  misc_feature: MA Experiment 108561 PARAMETER Experiment Name: At_100uM_ABA_cDNA_P Parameter: Treatment Value: 100uM ABA vs. No Treatment
  misc_feature: MA Experiment ID: 108572 Result: Up-regulated in Transcription
  misc_feature: MA Experiment 108572 PARAMETER Experiment Name: At_Drought_cDNA_P Parameter: Timepoint (hr) Value: 1
  misc_feature: MA Experiment 108572 PARAMETER Experiment Name: At_Drought_cDNA_P Parameter: Tissue Value: Aerial
  misc_feature: MA Experiment 108572 PARAMETER Experiment Name: At_Drought_cDNA_P Parameter: Treatment Value: Drought vs. No Drought
  misc_feature: MA Experiment ID: 108573 Result: Up-regulated in Transcription
  misc_feature: MA Experiment 108573 PARAMETER Experiment Name: At_Drought_cDNA_P Parameter: Timepoint (hr) Value: 6
  misc_feature: MA Experiment 108573 PARAMETER Experiment Name: At_Drought_cDNA_P Parameter: Tissue Value: Aerial
  misc_feature: MA Experiment 108573 PARAMETER Experiment Name: At_Drought_cDNA_P Parameter: Treatment Value: Drought vs. No Drought
  misc_feature: MA Experiment ID: 108585 Result: Up-regulated in Transcription
  misc_feature: MA Experiment 108585 PARAMETER Experiment Name: At_5mM_NaNP_cDNA_P Parameter: Timepoint (hr) Value: 6
  misc_feature: MA Experiment 108585 PARAMETER Experiment Name: At_5mM_NaNP_cDNA_P Parameter: Tissue Value: Aerial
  misc_feature: MA Experiment 108585 PARAMETER Experiment Name: At_5mM_NaNP_cDNA_P Parameter: Treatment Value: null
  misc_feature: MA Experiment ID: 108668 Result: Up-regulated in Transcription
  misc_feature: MA Experiment 108668 PARAMETER Experiment Name: At_2mM_SA_cDNA_P Parameter: Plant Line Value: WS
  misc_feature: MA Experiment 108668 PARAMETER Experiment Name: At_2mM_SA_cDNA_P Parameter: Timepoint (hr) Value: 6
  misc_feature: MA Experiment 108668 PARAMETER Experiment Name: At_2mM_SA_cDNA_P Parameter: Treatment Value: 2mM SA vs. No Treatment
  misc_feature: MA Experiment ID: 20000087 Result: Down-regulated in Transcription
  misc_feature: MA Experiment 20000087 PARAMETER Experiment Name: At_100uM_ABA_Mutants_cDNA_P Parameter: Plant Line Value: WS
  misc_feature: MA Experiment 20000087 PARAMETER Experiment Name: At_100uM_ABA_Mutants_cDNA_P Parameter: Timepoint (hr) Value: 6
  misc_feature: MA Experiment 20000087 PARAMETER Experiment Name: At_100uM_ABA_Mutants_cDNA_P Parameter: Tissue Value: Aerial
  misc_feature: MA Experiment 20000087 PARAMETER Experiment Name: At_100uM_ABA_Mutants_cDNA_P Parameter: Treatment Value: 100uM ABA vs. No Treatment
  misc_feature: MA Experiment ID: 20000089 Result: Down-regulated in Transcription
  misc_feature: MA Experiment ID: 20000112 Result: Up-regulated in Transcription
  misc_feature: MA Experiment 20000112 PARAMETER Experiment Name: At_42deg_Heat_cDNA_P Parameter: Temperature (deg C) Value: 42 vs. 22
  misc_feature: MA Experiment 20000112 PARAMETER Experiment Name: At_42deg_Heat_cDNA_P Parameter: Timepoint (hr) Value: 2
  misc_feature: MA Experiment 20000112 PARAMETER Experiment Name: At_42deg_Heat_cDNA_P Parameter: Tissue Value: Aerial
  misc_feature: MA Experiment ID: 20000169 Result: Up-regulated in Transcription
  misc_feature: MA Experiment 20000169 PARAMETER Experiment Name: At_100uM_ABA_P Parameter: Age (day) Value: 14
  misc_feature: MA Experiment 20000169 PARAMETER Experiment Name: At_100uM_ABA_P Parameter: Organism Value: A. thaliana
  misc_feature: MA Experiment 20000169 PARAMETER Experiment Name: At_100uM_ABA_P Parameter: Plant Line Value: WS
  misc_feature: MA Experiment 20000169 PARAMETER Experiment Name: At_100uM_ABA_P Parameter: Timepoint (hr) Value: 6
  misc_feature: MA Experiment 20000169 PARAMETER Experiment Name: At_100uM_ABA_P Parameter: Tissue Value: Aerial
  misc_feature: MA Experiment 20000169 PARAMETER Experiment Name: At_100uM_ABA_P Parameter: Treatment Value: 100uM ABA vs. No Treatment
  misc_feature: MA Experiment ID: 20000182 Result: Up-regulated in Transcription
  misc_feature: MA Experiment 20000182 PARAMETER Experiment Name: At_2mM_SA_P Parameter: Age (day) Value: 14
  misc_feature: MA Experiment 20000182 PARAMETER Experiment Name: At_2mM_SA_P Parameter: Organism Value: A. thaliana
  misc_feature: MA Experiment 20000182 PARAMETER Experiment Name: At_2mM_SA_P Parameter: Plant Line Value: WS
  misc_feature: MA Experiment 20000182 PARAMETER Experiment Name: At_2mM_SA_P Parameter: Timepoint (hr) Value: 6
  misc_feature: MA Experiment 20000182 PARAMETER Experiment Name: At_2mM_SA_P Parameter: Tissue Value: Aerial
  misc_feature: MA Experiment 20000182 PARAMETER Experiment Name: At_2mM_SA_P Parameter: Treatment Value: 2mM SA vs. No Treatment
  misc_feature: MA Experiment ID: 20000437 Result: Up-regulated in Transcription
  misc_feature: MA Experiment 20000437 PARAMETER Experiment Name: At_Drought_P Parameter: Age (day) Value: 8
  misc_feature: MA Experiment 20000437 PARAMETER Experiment Name: At_Drought_P Parameter: Organism Value: A. thaliana
  misc_feature: MA Experiment 20000437 PARAMETER Experiment Name: At_Drought_P Parameter: Plant Line Value: WS
  misc_feature: MA Experiment 20000437 PARAMETER Experiment Name: At_Drought_P Parameter: Timepoint (hr) Value: 24
  misc_feature: MA Experiment 20000437 PARAMETER Experiment Name: At_Drought_P Parameter: Tissue Value: Whole Plant
  misc_feature: MA Experiment 20000437 PARAMETER Experiment Name: At_Drought_P Parameter: Treatment Value: Drought vs. No Drought
  misc_feature: MA Experiment ID: 20000438 Result: Up-regulated in Transcription
  misc_feature: MA Experiment 20000438 PARAMETER Experiment Name: At_Shoots__P Parameter: Age (day) Value: 14
  misc_feature: MA Experiment 20000438 PARAMETER Experiment Name: At_Shoots__P Parameter: Tissue Value: Shoots vs. Whole Plant
  misc_feature: MA Experiment ID: 20000452 Result: Up-regulated in Transcription
  misc_feature: MA Experiment 20000452 PARAMETER Experiment Name: At_CS6879_Shoots-Roots_P Parameter: Age (day) Value: 14
  misc_feature: MA Experiment 20000452 PARAMETER Experiment Name: At_CS6879_Shoots-Roots_P Parameter: Organism Value: A. thaliana
  misc_feature: MA Experiment 20000452 PARAMETER Experiment Name: At_CS6879_Shoots-Roots_P Parameter: Plant Line Value: CS6879 vs. WS
  misc_feature: MA Experiment 20000452 PARAMETER Experiment Name: At_CS6879_Shoots-Roots_P Parameter: Tissue Value: Shoots
  misc_feature: MA Experiment ID: 20000794 Result: Up-regulated in Transcription
  misc_feature: MA Experiment 20000794 PARAMETER Experiment Name: At_Petals_P Parameter: Age (day) Value: 23-25 days
  misc_feature: MA Experiment 20000794 PARAMETER Experiment Name: At_Petals_P Parameter: Plant Line Value: WS
  misc_feature: MA Experiment 20000794 PARAMETER Experiment Name: At_Petals_P Parameter: Tissue Value: Petals vs. Whole plant
  misc_feature: MA Experiment ID: 20001451 Result: Up-regulated in Transcription
  misc_feature: MA Experiment 20001451 PARAMETER Experiment Name: At_Far-red-induction_P Parameter: Age (day) Value: 7
  misc_feature: MA Experiment 20001451 PARAMETER Experiment Name: At_Far-red-induction_P Parameter: Light Value: Far-red vs. White
  misc_feature: MA Experiment 20001451 PARAMETER Experiment Name: At_Far-red-induction_P Parameter: Organism Value: A. thaliana
  misc_feature: MA Experiment 20001451 PARAMETER Experiment Name: At_Far-red-induction_P Parameter: Plant Line Value: Columbia
  misc_feature: MA Experiment 20001451 PARAMETER Experiment Name: At_Far-red-induction_P Parameter: Timepoint (hr) Value: 24
  misc_feature: MA Experiment 20001451 PARAMETER Experiment Name: At_Far-red-induction_P Parameter: Tissue Value: Whole Plant
  misc_feature: MA Experiment ID: 20001906 Result: Up-regulated in Transcription
  misc_feature: MA Experiment 20001906 PARAMETER Experiment Name: At_Drought_Reproduction_P Parameter: Age (day) Value: 35
  misc_feature: MA Experiment 20001906 PARAMETER Experiment Name: At_Drought_Reproduction_P Parameter: Organism Value: A. thaliana
  misc_feature: MA Experiment 20001906 PARAMETER Experiment Name: At_Drought_Reproduction_P Parameter: Plant Line Value: WS
  misc_feature: MA Experiment 20001906 PARAMETER Experiment Name: At_Drought_Reproduction_P Parameter: Timepoint (day) Value: 5
  misc_feature: MA Experiment 20001906 PARAMETER Experiment Name: At_Drought_Reproduction_P Parameter: Tissue Value: Siliques
  misc_feature: MA Experiment 20001906 PARAMETER Experiment Name: At_Drought_Reproduction_P Parameter: Treatment Value: Drought vs. No Drought
  misc_feature: MA Experiment ID: 20001911 Result: Up-regulated in Transcription
  misc_feature: MA Experiment 20001911 PARAMETER Experiment Name: At_Drought_Reproduction_P Parameter: Age (day) Value: 40
  misc_feature: MA Experiment 20001911 PARAMETER Experiment Name: At_Drought_Reproduction_P Parameter: Organism Value: A. thaliana
  misc_feature: MA Experiment 20001911 PARAMETER Experiment Name: At_Drought_Reproduction_P Parameter: Plant Line Value: WS
  misc_feature: MA Experiment 20001911 PARAMETER Experiment Name: At_Drought_Reproduction_P Parameter: Timepoint (day) Value: 10
  misc_feature: MA Experiment 20001911 PARAMETER Experiment Name: At_Drought_Reproduction_P Parameter: Tissue Value: Flowers
  misc_feature: MA Experiment 20001911 PARAMETER Experiment Name: At_Drought_Reproduction_P Parameter: Treatment Value: Drought vs. No Drought
attttccattttgcttcttcttccttcttctcctctctctgacaccaacaatggcgagacttaccttgagaccccacaatcacttcttctcatctcctatctacgcacataaacaacctttcctctccgtatacaccatcttcccccaccaccaccaaaatcctcttatcaaatcaagggttaagtgctccgccagtggtactgaacgagtcagagagagtaagaagcttcctccaaaggatcctatcgaagaccctaaaccccagcttccgattcctgaagttctcagtacggaaacgggttttgaacagaattggcctccatggaaaaatatacctcagagatataagcttatcggcgctacttctctcgcctttgttatctgcaatatggacaaggtgaacttgagtattgctataataccaatgtcacaccagtttggatggagctcatctgtggctgggttggtccagtcttccttcttttggggttatgccttgagccagttgcctggaggttggctttccaagatttttggcggaagaaaagtgcttgagattggtgtctttacatggtctttcgctacagctcttgttccactacttgctggatttatgcccggtttgatcttttctcgaattttgagatttgtaactccaggtgggaataggagaaggtgtttccccatcggctgcgacagaccttattgccaggacaatacctgttaaggagcgctcaagagcggtaggctttgtttttggaggactgagtttggggagtgtaatggggcttctcttggctcctcccatcatcgaaacctttaattgggaatctgtcttttacttgtttggtctccttggtgttggctggttcgtcgggtttcagtttcttaatgaagaagaagtttcatataaaggtaatgagatctctacttcgcataaatcagaaaacgctacaaaggaagagttggggagctcattgaaggagattccatggaagtcatttttccaaagcccggctgtttgggcaatgatatacactcacttttgtggaagttggggtcactatacctgtttatcttggctaccaacttatttcagtgaggctctgagtctaaatttgacagaagctgcttgggtttccatccttcctccactggcttcgattgtcgtgacaagtcttgcttcacaatttgctgattacttaattacaaatggagttgatactaccacggtccgaaagatttgtcaaacgattgcgtttgtggcaccagcgatctgcatgacactttcatctgtggacattggattgccaccatgggaaattgtaggaattttgacagcaggcttggccctatcaagttttgctttatcaggactttattgtactcatcaggacatttcacccgaatatgcaagcatactcctgggtattacaaacacagtcggggcagtacctggaattgtaggagtggccctaactggttttctcctagactcgacccattcctggactatgtctctattcgtgccatcaatattcttctacttgacggggacggttgtatggttggcatttgcaagcagtgagcctcagacgttcagaaaggaagactcataagttttgttattgaggcacaaaaacatggagaaacttttgttattgtataggtaaaaaagaaatggtaaaaaattttctgttgtgaaagcaaaaacaaagagcagtggtaattttgttcactgccttatcctggtttttgcatagatgcaaattaaactcagtgttaatgggtaaaaggtggagtattg

SEQ ID NO: 85981 - protein, 278 aa, Arabidopsis thaliana
  peptide (1)..(278): Ceres Seq. ID no. 12684930
  misc_feature (1)..(265): Pfam Name: Sugar (and other) transporter Pfam Description: Sugar (and other) transporter
  misc_feature (107)..(234): Homolog of NCBI NO: 15241342 NR Description: putative protein; protein id: At5g20380.1
  misc_feature (1)..(28): Homolog of NCBI NO: 15241342 NR Description: putative protein; protein id: At5g20380.1
  misc_feature (1)..(269): Homolog of NCBI NO: 34903342 NR Description: unnamed protein product [Oryza sativa (japonica group)] >gi|6498428|dbj|BAA87831.1| unnamed protein product
  misc_feature (1)..(269): Homolog of NCBI NO: 30678625 NR Description: expressed protein [Arabidopsis thaliana]
  misc_feature (1)..(269): Homolog of NCBI NO: 15227589 NR Description: putative Na+-dependent inorganic phosphate protein id: At2g29650.1, supported by cDNA: gi_17064975
  misc_feature (1)..(269): Homolog of NCBI NO: 17064976 NR Description: putative Na+-dependent inorganic phosphate
  misc_feature (1)..(273): Homolog of NCBI NO: 34908356 NR Description: P0529H11.31 [Oryza sativa (japonica
  misc_feature (1)..(110): Homolog of NCBI NO: 7485271 NR Description: hypothetical protein A_IG005I10.nn - Arabidopsis >gi|2252847|gb|AAB62846.1| A_IG005I10.nn gene product thaliana] >gi|6049889|gb|AAF02804.1|AF195115_24 weak similarity
  misc_feature (161)..(269): Homolog of NCBI NO: 7485271 NR Description: hypothetical protein A_IG005I10.nn - Arabidopsis >gi|2252847|gb|AAB62846.1| A_IG005I10.nn gene product thaliana] >gi|6049889|gb|AAF02804.1|AF195115_24 weak similarity
  misc_feature (1)..(153): Homolog of NCBI NO: 30684317 NR Description: inorganic phosphate transporter, putative
MGLLLAPPIIETFNWESVFYLFGLLGVGWFVGFQFLNEEEVSYKGNEISTSHKSENATKEELGSSLKEIPWKSFFQSPAVWAMIYTHFCGSWGHYTCLSWLPTYFSEALSLNLTEAAWVSILPPLASIVVTSLASQFADYLITNGVDTTTVRKICQTIAFVAPAICMTLSSVDIGLPPWEIVGILTAGLALSSFALSGLYCTHQDISPEYASILLGITNTVGAVPGIVGVALTGFLLDSTHSWTMSLFVPSIFFYLTGTVVWLAFASSEPQTFRKEDS

SEQ ID NO: 85982 - protein, 241 aa, Arabidopsis thaliana
  peptide (1)..(241): Ceres Seq. ID no. 12684931
  misc_feature (124)..(220): Pfam Name: Sugar (and other) transporter Pfam Description: Sugar (and other) transporter
  misc_feature (17)..(214): Homolog of NCBI NO: 15241342 NR Description: putative protein; protein id: At5g20380.1
  misc_feature (112)..(220): Homolog of NCBI NO: 34903342 NR Description: unnamed protein product [Oryza sativa (japonica group)] >gi|6498428|dbj|BAA87831.1| unnamed protein product
  misc_feature (93)..(215): Homolog of NCBI NO: 30678625 NR Description: expressed protein [Arabidopsis thaliana]
  misc_feature (106)..(220): Homolog of NCBI NO: 15227589 NR Description: putative Na+-dependent inorganic phosphate protein id: At2g29650.1, supported by cDNA: gi_17064975
  misc_feature (106)..(220): Homolog of NCBI NO: 17064976 NR Description: putative Na+-dependent inorganic phosphate
  misc_feature (77)..(220): Homolog of NCBI NO: 34908356 NR Description: P0529H11.31 [Oryza sativa (japonica
  misc_feature (93)..(183): Homolog of NCBI NO: 7485271 NR Description: hypothetical protein A_IG005I10.nn - Arabidopsis >gi|2252847|gb|AAB62846.1| A_IG005I10.nn gene product thaliana] >gi|6049889|gb|AAF02804.1|AF195115_24 weak similarity
  misc_feature (106)..(220): Homolog of NCBI NO: 30684317 NR Description: inorganic phosphate transporter, putative
  misc_feature (92)..(220): Homolog of NCBI NO: 17064732 NR Description: putative protein [Arabidopsis thaliana]
  misc_feature (92)..(220): Homolog of NCBI NO: 22331630 NR Description: putative protein; protein id: At3g46980.1,
FPFCFFFLLLLSLTPTMARLTLRPHNHFFSSPIYAHKQPFLSVYTIFPHHHQNPLIKSRVKCSASGTERVRESKKLPPKDPIEDPKPQLPIPEVLSTETGFEQNWPPWKNIPQRYKLIGATSLAFVICNMDKVNLSIAIIPMSHQFGWSSSVAGLVQSSFFWGYALSQLPGGWLSKIFGGRKVLEIGVFTWSFATALVPLLAGFMPGLIFSRILRFVTPGGNRRRCFPIGCDRPYCQDNTC

SEQ ID NO: 85983 - protein, 225 aa, Arabidopsis thaliana
  peptide (1)..(225): Ceres Seq. ID no. 12684932
  misc_feature (108)..(204): Pfam Name: Sugar (and other) transporter Pfam Description: Sugar (and other) transporter
  misc_feature (1)..(198): Homolog of NCBI NO: 15241342 NR Description: putative protein; protein id: At5g20380.1
  misc_feature (96)..(204): Homolog of NCBI NO: 34903342 NR Description: unnamed protein product [Oryza sativa (japonica group)] >gi|6498428|dbj|BAA87831.1| unnamed protein product
  misc_feature (77)..(199): Homolog of NCBI NO: 30678625 NR Description: expressed protein [Arabidopsis thaliana]
  misc_feature (90)..(204): Homolog of NCBI NO: 15227589 NR Description: putative Na+-dependent inorganic phosphate protein id: At2g29650.1, supported by cDNA: gi_17064975
  misc_feature (90)..(204): Homolog of NCBI NO: 17064976 NR Description: putative Na+-dependent inorganic phosphate
  misc_feature (61)..(204): Homolog of NCBI NO: 34908356 NR Description: P0529H11.31 [Oryza sativa (japonica
  misc_feature (77)..(167): Homolog of NCBI NO: 7485271 NR Description: hypothetical protein A_IG005I10.nn - Arabidopsis >gi|2252847|gb|AAB62846.1| A_IG005I10.nn gene product thaliana] >gi|6049889|gb|AAF02804.1|AF195115_24 weak similarity
  misc_feature (90)..(204): Homolog of NCBI NO: 30684317 NR Description: inorganic phosphate transporter, putative
  misc_feature (76)..(204): Homolog of NCBI NO: 17064732 NR Description: putative protein [Arabidopsis thaliana]
  misc_feature (76)..(204): Homolog of NCBI NO: 22331630 NR Description: putative protein; protein id: At3g46980.1,
MARLTLRPHNHFFSSPIYAHKQPFLSVYTIFPHHHQNPLIKSRVKCSASGTERVRESKKLPPKDPIEDPKPQLPIPEVLSTETGFEQNWPPWKNIPQRYKLIGATSLAFVICNMDKVNLSIAIIPMSHQFGWSSSVAGLVQSSFFWGYALSQLPGGWLSKIFGGRKVLEIGVFTWSFATALVPLLAGFMPGLIFSRILRFVTPGGNRRRCFPIGCDRPYCQDNTC

SEQ ID NO: 85984 - DNA, 958 bp, Arabidopsis thaliana
  misc_feature (1)..(958): Ceres Seq. ID no. 12684933
  misc_feature: MA Experiment ID: 108434 Result: Up-regulated in Transcription
  misc_feature: MA Experiment 108434 PARAMETER Experiment Name: At_Root_Tips_cDNA_P Parameter: Tissue Value: Root Tips
  misc_feature: MA Experiment ID: 108462 Result: Down-regulated in Transcription
  misc_feature: MA Experiment 108462 PARAMETER Experiment Name: At_Germinating_Seeds_cDNA_P Parameter: Age (day) Value: 2 vs. 0
  misc_feature: MA Experiment 108462 PARAMETER Experiment Name: At_Germinating_Seeds_cDNA_P Parameter: Tissue Value: Germinating Seeds
  misc_feature: MA Experiment ID: 108463 Result: Down-regulated in Transcription
  misc_feature: MA Experiment 108463 PARAMETER Experiment Name: At_Germinating_Seeds_cDNA_P Parameter: Age (day) Value: 3 vs. 0
  misc_feature: MA Experiment 108463 PARAMETER Experiment Name: At_Germinating_Seeds_cDNA_P Parameter: Tissue Value: Germinating Seeds
  misc_feature: MA Experiment ID: 108464 Result: Down-regulated in Transcription
  misc_feature: MA Experiment 108464 PARAMETER Experiment Name: At_Germinating_Seeds_cDNA_P Parameter: Age (day) Value: 4 vs. 0
  misc_feature: MA Experiment 108464 PARAMETER Experiment Name: At_Germinating_Seeds_cDNA_P Parameter: Tissue Value: Germinating Seeds
  misc_feature: MA Experiment ID: 108488 Result: Up-regulated in Transcription
  misc_feature: MA Experiment ID: 108573 Result: Down-regulated in Transcription
  misc_feature: MA Experiment 108573 PARAMETER Experiment Name: At_Drought_cDNA_P Parameter: Timepoint (hr) Value: 6
  misc_feature: MA Experiment 108573 PARAMETER Experiment Name: At_Drought_cDNA_P Parameter: Tissue Value: Aerial
  misc_feature: MA Experiment 108573 PARAMETER Experiment Name: At_Drought_cDNA_P Parameter: Treatment Value: Drought vs. No Drought
  misc_feature: MA Experiment ID: 108577 Result: Up-regulated in Transcription
  misc_feature: MA Experiment 108577 PARAMETER Experiment Name: At_42deg_Heat_cDNA_P Parameter: Temperature (deg C) Value: 42 vs. 22
  misc_feature: MA Experiment 108577 PARAMETER Experiment Name: At_42deg_Heat_cDNA_P Parameter: Timepoint (hr) Value: 6
  misc_feature: MA Experiment 108577 PARAMETER Experiment Name: At_42deg_Heat_cDNA_P Parameter: Tissue Value: Aerial
  misc_feature: MA Experiment ID: 108595 Result: Down-regulated in Transcription
  misc_feature: MA Experiment 108595 PARAMETER Experiment Name: At_Ler-pi_Ovule_cDNA_P Parameter: Plant Line Value: null
  misc_feature: MA Experiment ID: 20000069 Result: Down-regulated in Transcription
  misc_feature: MA Experiment 20000069 PARAMETER Experiment Name: At_100uM_ABA_Mutants_cDNA_P Parameter: Plant Line Value: CS23
  misc_feature: MA Experiment 20000069 PARAMETER Experiment Name: At_100uM_ABA_Mutants_cDNA_P Parameter: Timepoint (hr) Value: 6
  misc_feature: MA Experiment 20000069 PARAMETER Experiment Name: At_100uM_ABA_Mutants_cDNA_P Parameter: Tissue Value: Aerial
  misc_feature: MA Experiment 20000069 PARAMETER Experiment Name: At_100uM_ABA_Mutants_cDNA_P Parameter: Treatment Value: 100uM ABA vs. No Treatment
  misc_feature: MA Experiment ID: 20000070 Result: Down-regulated in Transcription
  misc_feature: MA Experiment 20000070 PARAMETER Experiment Name: At_100uM_ABA_Mutants_cDNA_P Parameter: Plant Line Value: CS24
  misc_feature: MA Experiment 20000070 PARAMETER Experiment Name: At_100uM_ABA_Mutants_cDNA_P Parameter: Timepoint (hr) Value: 6
  misc_feature: MA Experiment 20000070 PARAMETER Experiment Name: At_100uM_ABA_Mutants_cDNA_P Parameter: Tissue Value: Aerial
  misc_feature: MA Experiment 20000070 PARAMETER Experiment Name: At_100uM_ABA_Mutants_cDNA_P Parameter: Treatment Value: 100uM ABA vs. No Treatment
  misc_feature: MA Experiment ID: 20000071 Result: Down-regulated in Transcription
  misc_feature: MA Experiment 20000071 PARAMETER Experiment Name: At_100uM_ABA_Mutants_cDNA_P Parameter: Plant Line Value: CS8104
  misc_feature: MA Experiment 20000071 PARAMETER Experiment Name: At_100uM_ABA_Mutants_cDNA_P Parameter: Timepoint (hr) Value: 6
  misc_feature: MA Experiment 20000071 PARAMETER Experiment Name: At_100uM_ABA_Mutants_cDNA_P Parameter: Tissue Value: Aerial
  misc_feature: MA Experiment 20000071 PARAMETER Experiment Name: At_100uM_ABA_Mutants_cDNA_P Parameter: Treatment Value: 100uM ABA vs. No Treatment
  misc_feature: MA Experiment ID: 20000072 Result: Down-regulated in Transcription
  misc_feature: MA Experiment 20000072 PARAMETER Experiment Name: At_100uM_ABA_Mutants_cDNA_P Parameter: Plant Line Value: CS8105
  misc_feature: MA Experiment 20000072 PARAMETER Experiment Name: At_100uM_ABA_Mutants_cDNA_P Parameter: Timepoint (hr) Value: 6
  misc_feature: MA Experiment 20000072 PARAMETER Experiment Name: At_100uM_ABA_Mutants_cDNA_P Parameter: Tissue Value: Aerial
  misc_feature: MA Experiment 20000072 PARAMETER Experiment Name: At_100uM_ABA_Mutants_cDNA_P Parameter: Treatment Value: 100uM ABA vs. No Treatment
  misc_feature: MA Experiment ID: 20000086 Result: Down-regulated in Transcription
  misc_feature: MA Experiment 20000086 PARAMETER Experiment Name: At_100uM_ABA_Mutants_cDNA_P Parameter: Plant Line Value: CS22
  misc_feature: MA Experiment 20000086 PARAMETER Experiment Name: At_100uM_ABA_Mutants_cDNA_P Parameter: Timepoint (hr) Value: 6
  misc_feature: MA Experiment 20000086 PARAMETER Experiment Name: At_100uM_ABA_Mutants_cDNA_P Parameter: Tissue Value: Aerial
  misc_feature: MA Experiment 20000086 PARAMETER Experiment Name: At_100uM_ABA_Mutants_cDNA_P Parameter: Treatment Value: 100uM ABA vs. No Treatment
  misc_feature: MA Experiment ID: 20000087 Result: Down-regulated in Transcription
  misc_feature: MA Experiment 20000087 PARAMETER Experiment Name: At_100uM_ABA_Mutants_cDNA_P Parameter: Plant Line Value: WS
  misc_feature: MA Experiment 20000087 PARAMETER Experiment Name: At_100uM_ABA_Mutants_cDNA_P Parameter: Timepoint (hr) Value: 6
  misc_feature: MA Experiment 20000087 PARAMETER Experiment Name: At_100uM_ABA_Mutants_cDNA_P Parameter: Tissue Value: Aerial
  misc_feature: MA Experiment 20000087 PARAMETER Experiment Name: At_100uM_ABA_Mutants_cDNA_P Parameter: Treatment Value: 100uM ABA vs. No Treatment
  misc_feature: MA Experiment ID: 20000093 Result: Up-regulated in Transcription
  misc_feature: MA Experiment 20000093 PARAMETER Experiment Name: At_42deg_Heat_cDNA_P Parameter: Temperature (deg C) Value: 42 vs. 22
  misc_feature: MA Experiment 20000093 PARAMETER Experiment Name: At_42deg_Heat_cDNA_P Parameter: Timepoint (hr) Value: 0.5
  misc_feature: MA Experiment 20000093 PARAMETER Experiment Name: At_42deg_Heat_cDNA_P Parameter: Tissue Value: Aerial
  misc_feature: MA Experiment ID: 20000111 Result: Up-regulated in Transcription
  misc_feature: MA Experiment 20000111 PARAMETER Experiment Name: At_42deg_Heat_cDNA_P Parameter: Temperature (deg C) Value: 42 vs. 22
  misc_feature: MA Experiment 20000111 PARAMETER Experiment Name: At_42deg_Heat_cDNA_P Parameter: Timepoint (hr) Value: 6
  misc_feature: MA Experiment 20000111 PARAMETER Experiment Name: At_42deg_Heat_cDNA_P Parameter: Tissue Value: Aerial
  misc_feature: MA Experiment ID: 20000112 Result: Up-regulated in Transcription
  misc_feature: MA Experiment 20000112 PARAMETER Experiment Name: At_42deg_Heat_cDNA_P Parameter: Temperature (deg C) Value: 42 vs. 22
  misc_feature: MA Experiment 20000112 PARAMETER Experiment Name: At_42deg_Heat_cDNA_P Parameter: Timepoint (hr) Value: 2
  misc_feature: MA Experiment 20000112 PARAMETER Experiment Name: At_42deg_Heat_cDNA_P Parameter: Tissue Value: Aerial
  misc_feature: MA Experiment ID: 20000113 Result: Up-regulated in Transcription
  misc_feature: MA Experiment 20000113 PARAMETER Experiment Name: At_42deg_Heat_cDNA_P Parameter: Temperature (deg C) Value: 42 vs. 22
  misc_feature: MA Experiment 20000113 PARAMETER Experiment Name: At_42deg_Heat_cDNA_P Parameter: Timepoint (hr) Value: 8
  misc_feature: MA Experiment 20000113 PARAMETER Experiment Name: At_42deg_Heat_cDNA_P Parameter: Tissue Value: Aerial
  misc_feature: MA Experiment ID: 20000117 Result: Down-regulated in Transcription
  misc_feature: MA Experiment 20000117 PARAMETER Experiment Name: At_100uM_ABA_Mutants_cDNA_P Parameter: Plant Line Value: Columbia
  misc_feature: MA Experiment 20000117 PARAMETER Experiment Name: At_100uM_ABA_Mutants_cDNA_P Parameter: Timepoint (hr) Value: 6
  misc_feature: MA Experiment 20000117 PARAMETER Experiment Name: At_100uM_ABA_Mutants_cDNA_P Parameter: Tissue Value: Aerial
  misc_feature: MA Experiment 20000117 PARAMETER Experiment Name: At_100uM_ABA_Mutants_cDNA_P Parameter: Treatment Value: 100uM ABA vs. No Treatment
  misc_feature: MA Experiment ID: 20000144 Result: Up-regulated in Transcription
  misc_feature: MA Experiment 20000144 PARAMETER Experiment Name: At_42deg_Heat_cDNA_P Parameter: Temperature (deg C) Value: 42 vs. 22
  misc_feature: MA Experiment 20000144 PARAMETER Experiment Name: At_42deg_Heat_cDNA_P Parameter: Timepoint (hr) Value: 1
  misc_feature: MA Experiment 20000144 PARAMETER Experiment Name: At_42deg_Heat_cDNA_P Parameter: Tissue Value: Aerial
  misc_feature: MA Experiment ID: 20000171 Result: Up-regulated in Transcription
  misc_feature: MA Experiment 20000171 PARAMETER Experiment Name: At_42deg_Heat_P Parameter: Age (day) Value: 14
  misc_feature: MA Experiment 20000171 PARAMETER Experiment Name: At_42deg_Heat_P Parameter: Organism Value: A. thaliana
  misc_feature: MA Experiment 20000171 PARAMETER Experiment Name: At_42deg_Heat_P Parameter: Plant Line Value: WS
  misc_feature: MA Experiment 20000171 PARAMETER Experiment Name: At_42deg_Heat_P Parameter: Temperature (deg C) Value: 42 vs. 22
  misc_feature: MA Experiment 20000171 PARAMETER Experiment Name: At_42deg_Heat_P Parameter: Timepoint (hr) Value: 1
  misc_feature: MA Experiment 20000171 PARAMETER Experiment Name: At_42deg_Heat_P Parameter: Tissue Value: Aerial
  misc_feature: MA Experiment ID: 20000173 Result: Up-regulated in Transcription
  misc_feature: MA Experiment 20000173 PARAMETER Experiment Name: At_42deg_Heat_P Parameter: Age (day) Value: 14
  misc_feature: MA Experiment 20000173 PARAMETER Experiment Name: At_42deg_Heat_P Parameter: Organism Value: A. thaliana
  misc_feature: MA Experiment 20000173 PARAMETER Experiment Name: At_42deg_Heat_P Parameter: Plant Line Value: WS
  misc_feature: MA Experiment 20000173 PARAMETER Experiment Name: At_42deg_Heat_P Parameter: Temperature (deg C) Value: 42 vs. 22
  misc_feature: MA Experiment 20000173 PARAMETER Experiment Name: At_42deg_Heat_P Parameter: Timepoint (hr) Value: 6
  misc_feature: MA Experiment 20000173 PARAMETER Experiment Name: At_42deg_Heat_P Parameter: Tissue Value: Aerial
  misc_feature: MA Experiment ID: 20000234 Result: Up-regulated in Transcription
  misc_feature: MA Experiment 20000234 PARAMETER Experiment Name: At_Siliques_P Parameter: Age (day) Value: 21
  misc_feature: MA Experiment 20000234 PARAMETER Experiment Name: At_Siliques_P Parameter: Organism Value: A. thaliana
  misc_feature: MA Experiment 20000234 PARAMETER Experiment Name: At_Siliques_P Parameter: Plant Line Value: WS
  misc_feature: MA Experiment 20000234 PARAMETER Experiment Name: At_Siliques_P Parameter: Tissue Value: Less Than 5mm Siliques vs. Whole Plant
  misc_feature: MA Experiment ID: 20000437 Result: Down-regulated in Transcription
  misc_feature: MA Experiment 20000437 PARAMETER Experiment Name: At_Drought_P Parameter: Age (day) Value: 8
  misc_feature: MA Experiment 20000437 PARAMETER Experiment Name: At_Drought_P Parameter: Organism Value: A. thaliana
  misc_feature: MA Experiment 20000437 PARAMETER Experiment Name: At_Drought_P Parameter: Plant Line Value: WS
  misc_feature: MA Experiment 20000437 PARAMETER Experiment Name: At_Drought_P Parameter: Timepoint (hr) Value: 24
  misc_feature: MA Experiment 20000437 PARAMETER Experiment Name: At_Drought_P Parameter: Tissue Value: Whole Plant
  misc_feature: MA Experiment 20000437 PARAMETER Experiment Name: At_Drought_P Parameter: Treatment Value: Drought vs. No Drought
  misc_feature: MA Experiment ID: 20000794 Result: Down-regulated in Transcription
  misc_feature: MA Experiment 20000794 PARAMETER Experiment Name: At_Petals_P Parameter: Age (day) Value: 23-25 days
  misc_feature: MA Experiment 20000794 PARAMETER Experiment Name: At_Petals_P Parameter: Plant Line Value: WS
  misc_feature: MA Experiment 20000794 PARAMETER Experiment Name: At_Petals_P Parameter: Tissue Value: Petals vs. Whole plant
  misc_feature: MA Experiment ID: 20001248 Result: Down-regulated in Transcription
  misc_feature: MA Experiment 20001248 PARAMETER Experiment Name: At_Far-red-induction_P Parameter: Age (day) Value: 7
  misc_feature: MA Experiment 20001248 PARAMETER Experiment Name: At_Far-red-induction_P Parameter: Light Value: Far-red vs. White
  misc_feature: MA Experiment 20001248 PARAMETER Experiment Name: At_Far-red-induction_P Parameter: Organism Value: A. thaliana
  misc_feature: MA Experiment 20001248 PARAMETER Experiment Name: At_Far-red-induction_P Parameter: Plant Line Value: Columbia
  misc_feature: MA Experiment 20001248 PARAMETER Experiment Name: At_Far-red-induction_P Parameter: Timepoint (hr) Value: 4
  misc_feature: MA Experiment 20001248 PARAMETER Experiment Name: At_Far-red-induction_P Parameter: Tissue Value: Whole Plant
  misc_feature: MA Experiment ID: 20001450 Result: Down-regulated in Transcription
  misc_feature: MA Experiment 20001450 PARAMETER Experiment Name: At_Far-red-induction_P Parameter: Age (day) Value: 7
  misc_feature: MA Experiment 20001450 PARAMETER Experiment Name: At_Far-red-induction_P Parameter: Light Value: Far-red vs. White
  misc_feature: MA Experiment 20001450 PARAMETER Experiment Name: At_Far-red-induction_P Parameter: Organism Value: A. thaliana
  misc_feature: MA Experiment 20001450 PARAMETER Experiment Name: At_Far-red-induction_P Parameter: Plant Line Value: Columbia
  misc_feature: MA Experiment 20001450 PARAMETER Experiment Name: At_Far-red-induction_P Parameter: Timepoint (hr) Value: 8
  misc_feature: MA Experiment 20001450 PARAMETER Experiment Name: At_Far-red-induction_P Parameter: Tissue Value: Whole Plant
  misc_feature: MA Experiment ID: 20001451 Result: Down-regulated in Transcription
  misc_feature: MA Experiment 20001451 PARAMETER Experiment Name: At_Far-red-induction_P Parameter: Age (day) Value: 7
  misc_feature: MA Experiment 20001451 PARAMETER Experiment Name: At_Far-red-induction_P Parameter: Light Value: Far-red vs. White
  misc_feature: MA Experiment 20001451 PARAMETER Experiment Name: At_Far-red-induction_P Parameter: Organism Value: A. thaliana
  misc_feature: MA Experiment 20001451 PARAMETER Experiment Name: At_Far-red-induction_P Parameter: Plant Line Value: Columbia
  misc_feature: MA Experiment 20001451 PARAMETER Experiment Name: At_Far-red-induction_P Parameter: Timepoint (hr) Value: 24
  misc_feature: MA Experiment 20001451 PARAMETER Experiment Name: At_Far-red-induction_P Parameter: Tissue Value: Whole Plant
  misc_feature: MA Experiment ID: 20001558 Result: Up-regulated in Transcription
  misc_feature: MA Experiment 20001558 PARAMETER Experiment Name: At_Drought_Soil_Dry_P Parameter: Age (day) Value: 27
  misc_feature: MA Experiment 20001558 PARAMETER Experiment Name: At_Drought_Soil_Dry_P Parameter: Organism Value: A. thaliana
  misc_feature: MA Experiment 20001558 PARAMETER Experiment Name: At_Drought_Soil_Dry_P Parameter: Plant Line Value: WS
  misc_feature: MA Experiment 20001558 PARAMETER Experiment Name: At_Drought_Soil_Dry_P Parameter: Post Timepoint (hr) Value: 6
  misc_feature: MA Experiment 20001558 PARAMETER Experiment Name: At_Drought_Soil_Dry_P Parameter: Post-Treatment Value: Re-Water vs. No Drought
  misc_feature: MA Experiment 20001558 PARAMETER Experiment Name: At_Drought_Soil_Dry_P Parameter: Timepoint (day) Value: 13
  misc_feature: MA Experiment 20001558 PARAMETER Experiment Name: At_Drought_Soil_Dry_P Parameter: Treatment Value: Drought vs. No Drought
  misc_feature: MA Experiment ID: 20001560 Result: Up-regulated in Transcription
  misc_feature: MA Experiment 20001560 PARAMETER Experiment Name: At_Drought_Soil_Dry_P Parameter: Age (day) Value: 28
  misc_feature: MA Experiment 20001560 PARAMETER Experiment Name: At_Drought_Soil_Dry_P Parameter: Organism Value: A. thaliana
  misc_feature: MA Experiment 20001560 PARAMETER Experiment Name: At_Drought_Soil_Dry_P Parameter: Plant Line Value: WS
  misc_feature: MA Experiment 20001560 PARAMETER Experiment Name: At_Drought_Soil_Dry_P Parameter: Post Timepoint (hr) Value: None
  misc_feature: MA Experiment 20001560 PARAMETER Experiment Name: At_Drought_Soil_Dry_P Parameter: Post-Treatment Value: None
  misc_feature: MA Experiment 20001560 PARAMETER Experiment Name: At_Drought_Soil_Dry_P Parameter: Timepoint (day) Value: 14
  misc_feature: MA Experiment 20001560 PARAMETER Experiment Name: At_Drought_Soil_Dry_P Parameter: Treatment Value: Drought vs. No Drought
  misc_feature: MA Experiment ID: 20001905 Result: Down-regulated in Transcription
  misc_feature: MA Experiment 20001905 PARAMETER Experiment Name: At_Drought_Reproduction_P Parameter: Age (day) Value: 40
  misc_feature: MA Experiment 20001905 PARAMETER Experiment Name: At_Drought_Reproduction_P Parameter: Organism Value: A. thaliana
  misc_feature: MA Experiment 20001905 PARAMETER Experiment Name: At_Drought_Reproduction_P Parameter: Plant Line Value: WS
  misc_feature: MA Experiment 20001905 PARAMETER Experiment Name: At_Drought_Reproduction_P Parameter: Timepoint (day) Value: 10
  misc_feature: MA Experiment 20001905 PARAMETER Experiment Name: At_Drought_Reproduction_P Parameter: Tissue Value: Rosettes
  misc_feature: MA Experiment 20001905 PARAMETER Experiment Name: At_Drought_Reproduction_P Parameter: Treatment Value: Drought vs. No Drought
atctaactctctctctactgcaatttttagggttttatcctccgaaagtctcaacctttttcttatcctcaacaaggagaaatggcggcgactcaacttacagcgtcaccagtgactatgtcagcaaggagcttagcctcgctggatggtctcagagcttcgagtgtcaagttttcatctttgaaaccagggacccttagacagagccagttccgtcgtttggttgtcaaagctgcttctgttgttgcccctaagtatacttcaattaagccattgggagatcgagttttggtgaagatcaaggaggcagaggagaagactttaggtggtatcttacttccatccactgctcaatcaaaacctcaaggaggtgaagtcgttgccgtgggtgaaggaagaactattgggaagaacaaaattgatatcactgtccctactggagcacaaattatctactccaaatacgcaggaactgaggtggagttcaatgatgtgaagcatcttatcctcaaggaagatgatattgttggcattcttgagacagaggacatcaaagatctcaaacctttgaatgaccgagtctttattaaggttgctgaggcggaggagaaaacagctggagggttgttgttaaccgagactaccaaagagaagccttctattggcacggtgatagcagttggaccgggttccctagacgaggaaggtaaaattacgcctctaccagtatcaaccggaagcacagtactttactccaagtatgctggtaacgacttcaagggcaaagatggttccaactacattgccctcagagcttcagatgtgatggctatactttcttagttatgttatatctttgtaatctgcaacttgtatcccaattgtggaaattttttccgtaaacggcctgagcataatctggaataaagacttgagtttgaaaatgtgattttattgc

SEQ ID NO: 85985 - protein, 253 aa, Arabidopsis thaliana; identical to SEQ ID NO: 24239
  peptide (1)..(253): Ceres Seq. ID no. 12684934
  misc_feature (158)..(253): Pfam Name: Chaperonin 10 Kd subunit Pfam Description: Chaperonin 10 Kd subunit
  misc_feature (1)..(253): Homolog of NCBI NO: 15242045 NR Description: chloroplast Cpn21 protein; protein id: supported by cDNA: gi_10179871, supported by cDNA: gi_14334611, by cDNA: gi_14587372, supported by cDNA: gi_16226814, supported
  misc_feature (1)..(253): Homolog of NCBI NO: 25453528 NR Description: chaperonin 10 [imported] - Arabidopsis thaliana
  misc_feature (1)..(253): Homolog of NCBI NO: 21780187 NR Description: cp10-like protein [Gossypium hirsutum]
  misc_feature (1)..(253): Homolog of NCBI NO: 7331143 NR Description: chaperonin 21 precursor [Lycopersicon esculentum]
  misc_feature (1)..(253): Homolog of NCBI NO: 399241 NR Description: 20 kDa chaperonin, chloroplast precursor (Protein
  misc_feature (157)..(252): Homolog of NCBI NO: 22297730 NR Description: 10kD chaperonin [Thermosynechococcus elongatus >gi|4033374|sp|O50322|CH10_SYNEL 10 kDa chaperonin (Protein (groES protein) >gi|2696700|dbj|BAA23816.1| GroES [Synechococcus
  misc_feature (159)..(253): Homolog of NCBI NO: 3599923 NR Description: GroES/HSP10 homolog [Lawsonia intracellularis]
  misc_feature (62)..(153): Homolog of NCBI NO: 2493659 NR Description: 10 kDa chaperonin (Protein Cpn10) (groES protein)
  misc_feature (154)..(253): Homolog of NCBI NO: 11467285 NR Description: GroES [Cyanophora paradoxa] GroES [Cyanophora paradoxa] >gi|2493661|sp|Q37761|CH10_CYAPA 10
  misc_feature (61)..(153): Homolog of NCBI NO: 23474135 NR Description: hypothetical protein [Desulfovibrio desulfuricans

SEQ ID NO: 85986 - protein, 241 aa, Arabidopsis thaliana; identical to SEQ ID NO: 24240
  peptide (1)..(241): Ceres Seq. ID no. 12684935
  misc_feature (146)..(241): Pfam Name: Chaperonin 10 Kd subunit Pfam Description: Chaperonin 10 Kd subunit
  misc_feature (1)..(241): Homolog of NCBI NO: 15242045 NR Description: chloroplast Cpn21 protein; protein id: supported by cDNA: gi_10179871, supported by cDNA: gi_14334611, by cDNA: gi_14587372, supported by cDNA: gi_16226814, supported
  misc_feature (1)..(241): Homolog of NCBI NO: 25453528 NR Description: chaperonin 10 [imported] - Arabidopsis thaliana
  misc_feature (1)..(241): Homolog of NCBI NO: 21780187 NR Description: cp10-like protein [Gossypium hirsutum]
  misc_feature (1)..(241): Homolog of NCBI NO: 7331143 NR Description: chaperonin 21 precursor [Lycopersicon esculentum]
  misc_feature (1)..(241): Homolog of NCBI NO: 399241 NR Description: 20 kDa chaperonin, chloroplast precursor (Protein
  misc_feature (145)..(240): Homolog of NCBI NO: 22297730 NR Description: 10kD chaperonin [Thermosynechococcus elongatus >gi|4033374|sp|O50322|CH10_SYNEL 10 kDa chaperonin (Protein (groES protein) >gi|2696700|dbj|BAA23816.1| GroES [Synechococcus
  misc_feature (147)..(241): Homolog of NCBI NO: 3599923 NR Description: GroES/HSP10 homolog [Lawsonia intracellularis]
  misc_feature (50)..(141): Homolog of NCBI NO: 2493659 NR Description: 10 kDa chaperonin (Protein Cpn10) (groES protein)
  misc_feature (142)..(241): Homolog of NCBI NO: 11467285 NR Description: GroES [Cyanophora paradoxa] GroES [Cyanophora paradoxa] >gi|2493661|sp|Q37761|CH10_CYAPA 10
  misc_feature (49)..(141): Homolog of NCBI NO: 23474135 NR Description: hypothetical protein [Desulfovibrio desulfuricans

SEQ ID NO: 85987 - DNA, 1311 bp, Arabidopsis thaliana
  misc_feature (1)..(1311): Ceres Seq. ID no. 12685004
  misc_feature: MA Experiment ID: 20000171 Result: Down-regulated in Transcription
  misc_feature: MA Experiment 20000171 PARAMETER Experiment Name: At_42deg_Heat_P Parameter: Age (day) Value: 14
  misc_feature: MA Experiment 20000171 PARAMETER Experiment Name: At_42deg_Heat_P Parameter: Organism Value: A. thaliana
  misc_feature: MA Experiment 20000171 PARAMETER Experiment Name: At_42deg_Heat_P Parameter: Plant Line Value: WS
  misc_feature: MA Experiment 20000171 PARAMETER Experiment Name: At_42deg_Heat_P Parameter: Temperature (deg C) Value: 42 vs. 22
  misc_feature: MA Experiment 20000171 PARAMETER Experiment Name: At_42deg_Heat_P Parameter: Timepoint (hr) Value: 1
  misc_feature: MA Experiment 20000171 PARAMETER Experiment Name: At_42deg_Heat_P Parameter: Tissue Value: Aerial
  misc_feature: MA Experiment ID: 20000173 Result: Down-regulated in Transcription
  misc_feature: MA Experiment 20000173 PARAMETER Experiment Name: At_42deg_Heat_P Parameter: Age (day) Value: 14
  misc_feature: MA Experiment 20000173 PARAMETER Experiment Name: At_42deg_Heat_P Parameter: Organism Value: A. thaliana
  misc_feature: MA Experiment 20000173 PARAMETER Experiment Name: At_42deg_Heat_P Parameter: Plant Line Value: WS
  misc_feature: MA Experiment 20000173 PARAMETER Experiment Name: At_42deg_Heat_P Parameter: Temperature (deg C) Value: 42 vs. 22
  misc_feature: MA Experiment 20000173 PARAMETER Experiment Name: At_42deg_Heat_P Parameter: Timepoint (hr) Value: 6
  misc_feature: MA Experiment 20000173 PARAMETER Experiment Name: At_42deg_Heat_P Parameter: Tissue Value: Aerial
  misc_feature: MA Experiment ID: 20000184 Result: Down-regulated in Transcription
  misc_feature: MA Experiment 20000184 PARAMETER Experiment Name: At_Shoots__P Parameter: Age (day) Value: 7
  misc_feature: MA Experiment 20000184 PARAMETER Experiment Name: At_Shoots__P Parameter: Tissue Value: Shoots vs. Whole Plant
  misc_feature: MA Experiment ID: 20000234 Result: Up-regulated in Transcription
  misc_feature: MA Experiment 20000234 PARAMETER Experiment Name: At_Siliques_P Parameter: Age (day) Value: 21
  misc_feature: MA Experiment 20000234 PARAMETER Experiment Name: At_Siliques_P Parameter: Organism Value: A. thaliana
  misc_feature: MA Experiment 20000234 PARAMETER Experiment Name: At_Siliques_P Parameter: Plant Line Value: WS
  misc_feature: MA Experiment 20000234 PARAMETER Experiment Name: At_Siliques_P Parameter: Tissue Value: Less Than 5mm Siliques vs. Whole Plant
  misc_feature: MA Experiment ID: 20000264 Result: Up-regulated in Transcription
  misc_feature: MA Experiment 20000264 PARAMETER Experiment Name: At_Open_Flower_P Parameter: Age (day) Value: 21
  misc_feature: MA Experiment 20000264 PARAMETER Experiment Name: At_Open_Flower_P Parameter: Plant Line Value: WS
  misc_feature: MA Experiment 20000264 PARAMETER Experiment Name: At_Open_Flower_P Parameter: Tissue Value: Open Flower vs. Whole Plant
  misc_feature: MA Experiment ID: 20000265 Result: Up-regulated in Transcription
  misc_feature: MA Experiment 20000265 PARAMETER Experiment Name: At_Open_Flower_P Parameter: Age (day) Value: 21
  misc_feature: MA Experiment 20000265 PARAMETER Experiment Name: At_Open_Flower_P Parameter: Plant Line Value: WS
  misc_feature: MA Experiment 20000265 PARAMETER Experiment Name: At_Open_Flower_P Parameter: Tissue Value: Closed Flower vs. Whole Plant
  misc_feature: MA Experiment ID: 20000286 Result: Up-regulated in Transcription
  misc_feature: MA Experiment 20000286 PARAMETER Experiment Name: At_Open_Flower_P Parameter: Age (day) Value: 21
  misc_feature: MA Experiment 20000286 PARAMETER Experiment Name: At_Open_Flower_P Parameter: Plant Line Value: WS
  misc_feature: MA Experiment 20000286 PARAMETER Experiment Name: At_Open_Flower_P Parameter: Tissue Value: Half Open vs. Whole Plant
  misc_feature: MA Experiment ID: 20001451 Result: Down-regulated in Transcription
  misc_feature: MA Experiment 20001451 PARAMETER Experiment Name: At_Far-red-induction_P Parameter: Age (day) Value: 7
  misc_feature: MA Experiment 20001451 PARAMETER Experiment Name: At_Far-red-induction_P Parameter: Light Value: Far-red vs. White
  misc_feature: MA Experiment 20001451 PARAMETER Experiment Name: At_Far-red-induction_P Parameter: Organism Value: A. thaliana
  misc_feature: MA Experiment 20001451 PARAMETER Experiment Name: At_Far-red-induction_P Parameter: Plant Line Value: Columbia
  misc_feature: MA Experiment 20001451 PARAMETER Experiment Name: At_Far-red-induction_P Parameter: Timepoint (hr) Value: 24
  misc_feature: MA Experiment 20001451 PARAMETER Experiment Name: At_Far-red-induction_P Parameter: Tissue Value: Whole Plant
atgaattcttctacctcaggtttccgttggagctggtctgatcctaagactcctcaatggaaccaatccatgtttcctaaagttccaattcgcacccgctgtggcaatggcaacggcagttcatcgtgtcgtgctaatatatgtatagccgtgacaaatggttcatcatcaatattcggtgaaagatgtaatgcgtctcatgcttttgtttgcgctgttgattctgatatcaaatgtcgcaattgtcacaaatatctagttatcctcgctgttgtcagcggtttgattctcttcacgacattcgccattatattatggctccttgtctataagcgaagcaagaaacgccgaaaatcacgaaaagtatctaatccagcttcatcatcatcagtagttcctccttcatggaagatcttcactagtgaagaactgagatcaatgacgaagaacttcagtgaagcaaaccgtctagctggggacgcgaaaaccggtggaacctatagcggtggtttatcagacgggactaaagtggcggttaagagattgaaaaggtctagttttcagaggaagaaagagttctactccgagattagaagagcagctaaactttatcacccgaatgtagttgctataaaaggttgttgctatgatcatggagaacgtttcattgtttatgagttcatagctagtggacctctcgatagatggctacaccatgtgcctagaggtggtagaagcttggactggaacatgagattgaacatcgccacaactcttgctcaaggaatcgcgtttctacacgacaaggtcaagccacaagtggtgcaccgcgacatccgagctagcaacgtgctacttgatgaggagtttggagctcatttaatgggtgttggtctctcaaaattcgttccttgggaagtaatgcaagagagaaccgtaatggcgggtggaacctacggttacctcgcacccgaatacgtttacagaaacgagctaaccacgaagagcgatgtctacagtttcggagtccttttgcttgagattgtgagcggtcgtagaccaactcaggctgttaattcttcagttgggtggcagagcatattcgaatgggcaacaccattggttcaagctaaccgttggttagagattcttgatccggttattacatgcggtttaccggaagcatgtgtggttcagaaagttgttgacttggtttattcttgtactcagaatgtgccatcaatgcgtccaaggatgtcacatgtggttcatcagcttcagcaattggtccaacctttagaggttaagtag

SEQ ID NO: 85988 - protein, 436 aa, Arabidopsis thaliana
  peptide (1)..(436): Ceres Seq. ID no. 12685005
  misc_feature (1)..(73): Pfam Name: Lectin C-type domain Pfam Description: Lectin C-type domain
  misc_feature (1)..(436): Homolog of NCBI NO: 15218209 NR Description: protein kinase, putative; protein id: supported by cDNA: gi_17065349 [Arabidopsis thaliana]
  misc_feature (63)..(429): Homolog of NCBI NO: 34894050 NR Description: putative receptor ser/thr protein kinase [Oryza
  misc_feature (84)..(422): Homolog of NCBI NO: 28812097 NR Description: P0458H05.21 [Oryza sativa (japonica
  misc_feature (104)..(435): Homolog of NCBI NO: 9294048 NR Description: protein kinase-like protein [Arabidopsis thaliana]
  misc_feature (88)..(426): Homolog of NCBI NO: 25404093 NR Description: hypothetical protein T6H22.9 [imported] -
  misc_feature (137)..(429): Homolog of NCBI NO: 34894174 NR Description: putative protein kinase [Oryza sativa (japonica group)] >gi|13486635|dbj|BAB39873.1| putative protein kinase
  misc_feature (58)..(431): Homolog of NCBI NO: 8978273 NR Description: receptor protein kinase-like [Arabidopsis
  misc_feature (58)..(431): Homolog of NCBI NO: 30695748 NR Description: receptor protein kinase-related [Arabidopsis >gi|26449348|dbj|BAC41801.1| putative receptor protein kinase thaliana] >gi|30102752|gb|AAP21294.1| At5g49760 [Arabidopsis
  misc_feature (137)..(428): Homolog of NCBI NO: 5923666 NR Description: putative receptor ser/thr protein kinase
  misc_feature (137)..(428): Homolog of NCBI NO: 18398327 NR Description: putative receptor ser/thr protein kinase; protein At3g09010.1, supported by cDNA: 124301. [Arabidopsis thaliana]
MNSSTSGFRWSWSDPKTPQWNQSMFPKVPIRTRCGNGNGSSSCRANICIAVTNGSSSIFGERCNASHAFVCAVDSDIKCRNCHKYLVILAVVSGLILFTTFAIILWLLVYKRSKKRRKSRKVSNPASSSSVVPPSWKIFTSEELRSMTKNFSEANRLAGDAKTGGTYSGGLSDGTKVAVKRLKRSSFQRKKEFYSEIRRAAKLYHPNVVAIKGCCYDHGERFIVYEFIASGPLDRWLHHVPRGGRSLDWNMRLNIATTLAQGIAFLHDKVKPQVVHRDIRASNVLLDEEFGAHLMGVGLSKFVPWEVMQERTVMAGGTYGYLAPEYVYRNELTTKSDVYSFGVLLLEIVSGRRPTQAVNSSVGWQSIFEWATPLVQANRWLEILDPVITCGLPEACVVQKVVDLVYSCTQNVPSMRPRMSHVVHQLQQLVQPLEVK

SEQ ID NO: 85989 - protein, 413 aa, Arabidopsis thaliana
  peptide (1)..(413): Ceres Seq. ID no. 12685006
  misc_feature (1)..(413): Homolog of NCBI NO: 15218209 NR Description: protein kinase, putative; protein id: supported by cDNA: gi_17065349 [Arabidopsis thaliana]
  misc_feature (40)..(406): Homolog of NCBI NO: 34894050 NR Description: putative receptor ser/thr protein kinase [Oryza
  misc_feature (61)..(399): Homolog of NCBI NO: 28812097 NR Description: P0458H05.21 [Oryza sativa (japonica
  misc_feature (81)..(412): Homolog of NCBI NO: 9294048 NR Description: protein kinase-like protein [Arabidopsis thaliana]
  misc_feature (65)..(403): Homolog of NCBI NO: 25404093 NR Description: hypothetical protein T6H22.9 [imported] -
  misc_feature (114)..(406): Homolog of NCBI NO: 34894174 NR Description: putative protein kinase [Oryza sativa (japonica group)] >gi|13486635|dbj|BAB39873.1| putative protein kinase
  misc_feature (35)..(408): Homolog of NCBI NO: 8978273 NR Description: receptor protein kinase-like [Arabidopsis
  misc_feature (35)..(408): Homolog of NCBI NO: 30695748 NR Description: receptor protein kinase-related [Arabidopsis >gi|26449348|dbj|BAC41801.1| putative receptor protein kinase thaliana] >gi|30102752|gb|AAP21294.1| At5g49760 [Arabidopsis
  misc_feature (114)..(405): Homolog of NCBI NO: 5923666 NR Description: putative receptor ser/thr protein kinase
  misc_feature (114)..(405): Homolog of NCBI NO: 18398327 NR Description: putative receptor ser/thr protein kinase; protein At3g09010.1, supported by cDNA: 124301. [Arabidopsis thaliana]
MFPKVPIRTRCGNGNGSSSCRANICIAVTNGSSSIFGERCNASHAFVCAVDSDIKCRNCHKYLVILAVVSGLILFTTFAIILWLLVYKRSKKRRKSRKVSNPASSSSVVPPSWKIFTSEELRSMTKNFSEANRLAGDAKTGGTYSGGLSDGTKVAVKRLKRSSFQRKKEFYSEIRRAAKLYHPNVVAIKGCCYDHGERFIVYEFIASGPLDRWLHHVPRGGRSLDWNMRLNIATTLAQGIAFLHDKVKPQVVHRDIRASNVLLDEEFGAHLMGVGLSKFVPWEVMQERTVMAGGTYGYLAPEYVYRNELTTKSDVYSFGVLLLEIVSGRRPTQAVNSSVGWQSIFEWATPLVQANRWLEILDPVITCGLPEACVVQKVVDLVYSCTQNVPSMRPRMSHVVHQLQQLVQPLEVK

SEQ ID NO: 85990 - protein, 290 aa, Arabidopsis thaliana
  peptide (1)..(290): Ceres Seq. ID no. 12685007
  misc_feature (1)..(290): Homolog of NCBI NO: 15218209 NR Description: protein kinase, putative; protein id: supported by cDNA: gi_17065349 [Arabidopsis thaliana]
  misc_feature (1)..(283): Homolog of NCBI NO: 34894050 NR Description: putative receptor ser/thr protein kinase [Oryza
  misc_feature (1)..(276): Homolog of NCBI NO: 28812097 NR Description: P0458H05.21 [Oryza sativa (japonica
  misc_feature (1)..(289): Homolog of NCBI NO: 9294048 NR Description: protein kinase-like protein [Arabidopsis thaliana]
  misc_feature (1)..(280): Homolog of NCBI NO: 25404093 NR Description: hypothetical protein T6H22.9 [imported] -
  misc_feature (1)..(283): Homolog of NCBI NO: 34894174 NR Description: putative protein kinase [Oryza sativa (japonica group)] >gi|13486635|dbj|BAB39873.1| putative protein kinase
  misc_feature (1)..(285): Homolog of NCBI NO: 8978273 NR Description: receptor protein kinase-like [Arabidopsis
  misc_feature (1)..(285): Homolog of NCBI NO: 30695748 NR Description: receptor protein kinase-related [Arabidopsis >gi|26449348|dbj|BAC41801.1| putative receptor protein kinase thaliana] >gi|30102752|gb|AAP21294.1| At5g49760 [Arabidopsis
  misc_feature (1)..(282): Homolog of NCBI NO: 5923666 NR Description: putative receptor ser/thr protein kinase
  misc_feature (1)..(282): Homolog of NCBI NO: 18398327 NR Description: putative receptor ser/thr protein kinase; protein At3g09010.1, supported by cDNA: 124301. [Arabidopsis thaliana]
MTKNFSEANRLAGDAKTGGTYSGGLSDGTKVAVKRLKRSSFQRKKEFYSEIRRAAKLYHPNVVAIKGCCYDHGERFIVYEFIASGPLDRWLHHVPRGGRSLDWNMRLNIATTLAQGIAFLHDKVKPQVVHRDIRASNVLLDEEFGAHLMGVGLSKFVPWEVMQERTVMAGGTYGYLAPEYVYRNELTTKSDVYSFGVLLLEIVSGRRPTQAVNSSVGWQSIFEWATPLVQANRWLEILDPVITCGLPEACVVQKVVDLVYSCTQNVPSMRPRMSHVVHQLQQLVQPLEVK

SEQ ID NO: 85991 - DNA, 768 bp, Arabidopsis thaliana
  misc_feature (1)..(768): Ceres Seq. ID no. 12685049
  misc_feature: MA Experiment ID: 20000451 Result: Up-regulated in Transcription
  misc_feature: MA Experiment 20000451 PARAMETER Experiment Name: At_CS6879_Shoots-Roots_P Parameter: Age (day) Value: 14
  misc_feature: MA Experiment 20000451 PARAMETER Experiment Name: At_CS6879_Shoots-Roots_P Parameter: Organism Value: A. thaliana
  misc_feature: MA Experiment 20000451 PARAMETER Experiment Name: At_CS6879_Shoots-Roots_P Parameter: Plant Line Value: CS6879 vs. WS
  misc_feature: MA Experiment 20000451 PARAMETER Experiment Name: At_CS6879_Shoots-Roots_P Parameter: Tissue Value: Roots
atgagttactctcatcaaagcatgggttctggtagtagaaatgcaaggggatatgaatttggaaggacttatgttgtgaggcctaaaggaaagcatcaagccactctagtctggcttcatggtcttggtgacaatggctctagttcatctcagctcatggacagcttgcatcttccaaatataaaatggatttgtccaaccgctccttcgcgtcctgttacaagtcttggtggatttacatgcactgcttggtttgacgttggggaaatttctgaagatggtcatgatgatttggaaggtttagatgcctcagcttcacatattgctaaccttttgtcctctgaaccagcagatgttaaagtaggcataggaggttttagcatgggagcagcaatatctctctactccgcgacttgttatgctcttggacgttatggaactggccatgcgtatcctataaacctacaagctgttgtaggactcagcggctggcttcctggttggaagagcttaaggagcaaaatagaatgttcatttgaggctgcaaggcgtgctgcatcgttaccaattatacttacacatggaacttccgatgatgtggttccttataggtttggagagaaatctgcgcagtctcttggcatggctggatttcgactagccatgtttaaaccatacgaaggacttggtcattataccgttcccagagaaatggatgaggtcgttcactggctcacaacgatgctcggacttgagggctcgcgctaa

SEQ ID NO: 85992 - protein, 255 aa, Arabidopsis thaliana
  peptide (1)..(255): Ceres Seq. ID no. 12685050
  misc_feature (20)..(249): Pfam Name: Phospholipase/Carboxylesterase Pfam Description: Phospholipase/Carboxylesterase
  misc_feature (1)..(255): Homolog of NCBI NO: 15232645 NR Description: putative lysophospholipase; protein id:
  misc_feature (1)..(166): Homolog of NCBI NO: 15219072 NR Description: unknown protein; protein id: At1g52700.1
  misc_feature (197)..(255): Homolog of NCBI NO: 15219072 NR Description: unknown protein; protein id: At1g52700.1
  misc_feature (1)..(166): Homolog of NCBI NO: 5903036 NR Description: F6D8.5 [Arabidopsis thaliana]
  misc_feature (197)..(228): Homolog of NCBI NO: 5903036 NR Description: F6D8.5 [Arabidopsis thaliana]
  misc_feature (1)..(253): Homolog of NCBI NO: 15241251 NR Description: putative protein; protein id: At5g20060.1, by cDNA: 42475. [Arabidopsis thaliana] putative lysophospholipase [Arabidopsis thaliana]
  misc_feature (7)..(254): Homolog of NCBI NO: 34910274 NR Description: OSJNBa0089K24.24 [Oryza sativa (japonica
  misc_feature (1)..(254): Homolog of NCBI NO: 29409364 NR Description: biostress-resistance-related protein [Triticum
  misc_feature (85)..(255): Homolog of NCBI NO: 34912598 NR Description: P0046B10.16 [Oryza sativa (japonica
  misc_feature (102)..(253): Homolog of NCBI NO: 28932772 NR Description: FPh1 [Gossypium hirsutum]
MSYSHQSMGSGSRNARGYEFGRTYVVRPKGKHQATLVWLHGLGDNGSSSSQLMDSLHLPNIKWICPTAPSRPVTSLGGFTCTAWFDVGEISEDGHDDLEGLDASASHIANLLSSEPADVKVGIGGFSMGAAISLYSATCYALGRYGTGHAYPINLQAVVGLSGWLPGWKSLRSKIECSFEAARRAASLPIILTHGTSDDVVPYRFGEKSAQSLGMAGFRLAMFKPYEGLGHYTVPREMDEVVHWLTTMLGLEGSR

SEQ ID NO: 85993 - protein, 248 aa, Arabidopsis thaliana
  peptide (1)..(248): Ceres Seq. ID no. 12685051
  misc_feature (13)..(242): Pfam Name: Phospholipase/Carboxylesterase Pfam Description: Phospholipase/Carboxylesterase
  misc_feature (1)..(248): Homolog of NCBI NO: 15232645 NR Description: putative lysophospholipase; protein id:
  misc_feature (1)..(159): Homolog of NCBI NO: 15219072 NR Description: unknown protein; protein id: At1g52700.1
  misc_feature (190)..(248): Homolog of NCBI NO: 15219072 NR Description: unknown protein; protein id: At1g52700.1
  misc_feature (1)..(159): Homolog of NCBI NO: 5903036 NR Description: F6D8.5 [Arabidopsis thaliana]
  misc_feature (190)..(221): Homolog of NCBI NO: 5903036 NR Description: F6D8.5 [Arabidopsis thaliana]
  misc_feature (1)..(246): Homolog of NCBI NO: 15241251 NR Description: putative protein; protein id: At5g20060.1, by cDNA: 42475. [Arabidopsis thaliana] putative lysophospholipase [Arabidopsis thaliana]
  misc_feature (1)..(247): Homolog of NCBI NO: 34910274 NR Description: OSJNBa0089K24.24 [Oryza sativa (japonica
  misc_feature (1)..(247): Homolog of NCBI NO: 29409364 NR Description: biostress-resistance-related protein [Triticum
  misc_feature (78)..(248): Homolog of NCBI NO: 34912598 NR Description: P0046B10.16 [Oryza sativa (japonica
  misc_feature (95)..(246): Homolog of NCBI NO: 28932772 NR Description: FPh1 [Gossypium hirsutum]
MGSGSRNARGYEFGRTYVVRPKGKHQATLVWLHGLGDNGSSSSQLMDSLHLPNIKWICPTAPSRPVTSLGGFTCTAWFDVGEISEDGHDDLEGLDASASHIANLLSSEPADVKVGIGGFSMGAAISLYSATCYALGRYGTGHAYPINLQAVVGLSGWLPGWKSLRSKIECSFEAARRAASLPIILTHGTSDDVVPYRFGEKSAQSLGMAGFRLAMFKPYEGLGHYTVPREMDEVVHWLTTMLGLEGSR

SEQ ID NO: 85994 - protein, 203 aa, Arabidopsis thaliana
  peptide (1)..(203): Ceres Seq. ID no. 12685052
  misc_feature (1)..(197): Pfam Name: Phospholipase/Carboxylesterase Pfam Description: Phospholipase/Carboxylesterase
  misc_feature (1)..(203): Homolog of NCBI NO: 15232645 NR Description: putative lysophospholipase; protein id:
  misc_feature (1)..(114): Homolog of NCBI NO: 15219072 NR Description: unknown protein; protein id: At1g52700.1
  misc_feature (145)..(203): Homolog of NCBI NO: 15219072 NR Description: unknown protein; protein id: At1g52700.1
  misc_feature (1)..(114): Homolog of NCBI NO: 5903036 NR Description: F6D8.5 [Arabidopsis thaliana]
  misc_feature (145)..(176): Homolog of NCBI NO: 5903036 NR Description: F6D8.5 [Arabidopsis thaliana]
  misc_feature (1)..(201): Homolog of NCBI NO: 15241251 NR Description: putative protein; protein id: At5g20060.1, by cDNA: 42475. [Arabidopsis thaliana] putative lysophospholipase [Arabidopsis thaliana]
  misc_feature (1)..(202): Homolog of NCBI NO: 34910274 NR Description: OSJNBa0089K24.24 [Oryza sativa (japonica
  misc_feature (1)..(202): Homolog of NCBI NO: 29409364 NR Description: biostress-resistance-related protein [Triticum
  misc_feature (33)..(203): Homolog of NCBI NO: 34912598 NR Description: P0046B10.16 [Oryza sativa (japonica
  misc_feature (50)..(201): Homolog of NCBI NO: 28932772 NR Description: FPh1 [Gossypium hirsutum]
MDSLHLPNIKWICPTAPSRPVTSLGGFTCTAWFDVGEISEDGHDDLEGLDASASHIANLLSSEPADVKVGIGGFSMGAAISLYSATCYALGRYGTGHAYPINLQAVVGLSGWLPGWKSLRSKIECSFEAARRAASLPIILTHGTSDDVVPYRFGEKSAQSLGMAGFRLAMFKPYEGLGHYTVPREMDEVVHWLTTMLGLEGSR

SEQ ID NO: 85995 - DNA, 873 bp, Arabidopsis thaliana
  misc_feature (1)..(873): Ceres Seq. ID no. 12685102
  misc_feature: MA Experiment ID: 108434 Result: Up-regulated in Transcription
  misc_feature: MA Experiment 108434 PARAMETER Experiment Name: At_Root_Tips_cDNA_P Parameter: Tissue Value: Root Tips
  misc_feature: MA Experiment ID: 108595 Result: Down-regulated in Transcription
  misc_feature: MA Experiment 108595 PARAMETER Experiment Name: At_Ler-pi_Ovule_cDNA_P Parameter: Plant Line Value: null
atgtcggtgtgttcttcgtcttcttcttctcagaaaacatggattgttaacgggatcttggccggaacagcgattgcagccgcaatcggcgcacgtgcttatctgggtcgatccaagaaattccggagccgggtcgtcggaatcattcccgcacgttacgcttcctctcgattcgagggtaagcctctcgtgcaaatcctcggcaaacccatgatccagagaacttgggagaggtcgaagttagctactacgcttgatcatattgttgtagccactgatgatgaaagaatcgcggagtgttgtcgtggatttggtgccgatgttatcatgacttcagagtcttgcagaaatggcactgagaggtgcaacgaagcgctagaaaagctggagaagaagtatgatgtcgttgttaacattcaaggagatgaaccacttattgagcctgagattatagacggtgtagtcaaagcacttcaggtaacaccggatgcagtgtttagcacagcggtgacatcattgaaaccagaagacgggcttgatcctaaccgagttaaatgtgtggtggacaatcgtggctatgctatctatttctcaaggggtttgattccttataacaagagtggtaaagtcaatccagattttccgtacatgcttcatcttggaattcagagctttgattcgaagtttctgaaggtatattcagagcttcaaccaacgccattgcagcaagaagaggatctagaacagctcaaagttcttgagaatggctacaaaatgaaggttataaaggtagatcatgaagctcatggagttgacacacccgatgatgtcgaaaagattgaatctttaatgcgcgaaagaaacatgtcctag

SEQ ID NO: 85996 - protein, 290 aa, Arabidopsis thaliana
  peptide (1)..(290): Ceres Seq. ID no. 12685103
  misc_feature (46)..(261): Pfam Name: Cytidylyltransferase Pfam Description: Cytidylyltransferase
  misc_feature (1)..(290): Homolog of NCBI NO: 30695393 NR Description: CMP-KDO synthetase -related [Arabidopsis >gi|12324630|gb|AAG52266.1|AC019018_3 putative deoxyoctulonosic
  misc_feature (2)..(289): Homolog of NCBI NO: 7688435 NR Description: CMP-KDO synthetase [Zea mays]
  misc_feature (49)..(284): Homolog of NCBI NO: 7688437 NR Description: CMP-KDO synthetase [Zea mays]
  misc_feature (44)..(289): Homolog of NCBI NO: 19704142 NR Description: 3-deoxy-manno-octulosonate cytidylyltransferase
  misc_feature (44)..(289): Homolog of NCBI NO: 34762436 NR Description: 3-deoxy-manno-octulosonate cytidylyltransferase
  misc_feature (43)..(284): Homolog of NCBI NO: 14194887 NR Description: 3-DEOXY-MANNO-OCTULOSONATE CYTIDYLYLTRANSFERASE
  misc_feature (43)..(284): Homolog of NCBI NO: 15835072 NR Description: 3-deoxy-manno-octulosonate cytidylyltransferase
  misc_feature (43)..(284): Homolog of NCBI NO: 1361311 NR Description: CMP-2-keto-3-deoxyoctulosonic acid synthetase
  misc_feature (43)..(284): Homolog of NCBI NO: 15604902 NR Description: CMP-2-keto-3-deoxyoctulosonic acid synthetase
  misc_feature (37)..(284): Homolog of NCBI NO: 29840354 NR Description: 3-deoxy-D-manno-octulosonate cytidylyltransferase
MSVCSSSSSSQKTWIVNGILAGTAIAAAIGARAYLGRSKKFRSRVVGIIPARYASSRFEGKPLVQILGKPMIQRTWERSKLATTLDHIVVATDDERIAECCRGFGADVIMTSESCRNGTERCNEALEKLEKKYDVVVNIQGDEPLIEPEIIDGVVKALQVTPDAVFSTAVTSLKPEDGLDPNRVKCVVDNRGYAIYFSRGLIPYNKSGKVNPDFPYMLHLGIQSFDSKFLKVYSELQPTPLQQEEDLEQLKVLENGYKMKVIKVDHEAHGVDTPDDVEKIESLMRERNMS

SEQ ID NO: 85997 - protein, 220 aa, Arabidopsis thaliana
  peptide (1)..(220): Ceres Seq. ID no. 12685104
  misc_feature (1)..(191): Pfam Name: Cytidylyltransferase Pfam Description: Cytidylyltransferase
  misc_feature (1)..(220): Homolog of NCBI NO: 30695393 NR Description: CMP-KDO synthetase -related [Arabidopsis >gi|12324630|gb|AAG52266.1|AC019018_3 putative deoxyoctulonosic
  misc_feature (1)..(219): Homolog of NCBI NO: 7688435 NR Description: CMP-KDO synthetase [Zea mays]
  misc_feature (1)..(214): Homolog of NCBI NO: 7688437 NR Description: CMP-KDO synthetase [Zea mays]
  misc_feature (1)..(219): Homolog of NCBI NO: 19704142 NR Description: 3-deoxy-manno-octulosonate cytidylyltransferase
  misc_feature (1)..(219): Homolog of NCBI NO: 34762436 NR Description: 3-deoxy-manno-octulosonate cytidylyltransferase
  misc_feature (1)..(214): Homolog of NCBI NO: 14194887 NR Description: 3-DEOXY-MANNO-OCTULOSONATE CYTIDYLYLTRANSFERASE
  misc_feature (1)..(214): Homolog of NCBI NO: 15835072 NR Description: 3-deoxy-manno-octulosonate cytidylyltransferase
  misc_feature (1)..(214): Homolog of NCBI NO: 1361311 NR Description: CMP-2-keto-3-deoxyoctulosonic acid synthetase
  misc_feature (1)..(214): Homolog of NCBI NO: 15604902 NR Description: CMP-2-keto-3-deoxyoctulosonic acid synthetase
  misc_feature (1)..(214): Homolog of NCBI NO: 29840354 NR Description: 3-deoxy-D-manno-octulosonate cytidylyltransferase
MIQRTWERSKLATTLDHIVVATDDERIAECCRGFGADVIMTSESCRNGTERCNEALEKLEKKYDVVVNIQGDEPLIEPEIIDGVVKALQVTPDAVFSTAVTSLKPEDGLDPNRVKCVVDNRGYAIYFSRGLIPYNKSGKVNPDFPYMLHLGIQSFDSKFLKVYSELQPTPLQQEEDLEQLKVLENGYKMKVIKVDHEAHGVDTPDDVEKIESLMRERNMS

SEQ ID NO: 85998 - protein, 181 aa, Arabidopsis thaliana
  peptide (1)..(181): Ceres Seq. ID no. 12685105
  misc_feature (1)..(152): Pfam Name: Cytidylyltransferase Pfam Description: Cytidylyltransferase
  misc_feature (1)..(181): Homolog of NCBI NO: 30695393 NR Description: CMP-KDO synthetase -related [Arabidopsis >gi|12324630|gb|AAG52266.1|AC019018_3 putative deoxyoctulonosic
  misc_feature (1)..(180): Homolog of NCBI NO: 7688435 NR Description: CMP-KDO synthetase [Zea mays]
  misc_feature (1)..(175): Homolog of NCBI NO: 7688437 NR Description: CMP-KDO synthetase [Zea mays]
  misc_feature (1)..(180): Homolog of NCBI NO: 19704142 NR Description: 3-deoxy-manno-octulosonate cytidylyltransferase
  misc_feature (1)..(180): Homolog of NCBI NO: 34762436 NR Description: 3-deoxy-manno-octulosonate cytidylyltransferase
  misc_feature (1)..(175): Homolog of NCBI NO: 14194887 NR Description: 3-DEOXY-MANNO-OCTULOSONATE CYTIDYLYLTRANSFERASE
  misc_feature (1)..(175): Homolog of NCBI NO: 15835072 NR Description: 3-deoxy-manno-octulosonate cytidylyltransferase
  misc_feature (1)..(175): Homolog of NCBI NO: 1361311 NR Description: CMP-2-keto-3-deoxyoctulosonic acid synthetase
  misc_feature (1)..(175): Homolog of NCBI NO: 15604902 NR Description: CMP-2-keto-3-deoxyoctulosonic acid synthetase
  misc_feature (1)..(175): Homolog of NCBI NO: 29840354 NR Description: 3-deoxy-D-manno-octulosonate cytidylyltransferase
MTSESCRNGTERCNEALEKLEKKYDVVVNIQGDEPLIEPEIIDGVVKALQVTPDAVFSTAVTSLKPEDGLDPNRVKCVVDNRGYAIYFSRGLIPYNKSGKVNPDFPYMLHLGIQSFDSKFLKVYSELQPTPLQQEEDLEQLKVLENGYKMKVIKVDHEAHGVDTPDDVEKIESLMRERNMS

SEQ ID NO: 85999 - DNA, 1623 bp, Arabidopsis thaliana
  misc_feature (1)..(1623): Ceres Seq. ID no. 12685118
  misc_feature: MA Experiment ID: 20000173 Result: Down-regulated in Transcription
  misc_feature: MA Experiment 20000173 PARAMETER Experiment Name: At_42deg_Heat_P Parameter: Age (day) Value: 14
  misc_feature: MA Experiment 20000173 PARAMETER Experiment Name: At_42deg_Heat_P Parameter: Organism Value: A. thaliana
  misc_feature: MA Experiment 20000173 PARAMETER Experiment Name: At_42deg_Heat_P Parameter: Plant Line Value: WS
  misc_feature: MA Experiment 20000173 PARAMETER Experiment Name: At_42deg_Heat_P Parameter: Temperature (deg C) Value: 42 vs. 22
  misc_feature: MA Experiment 20000173 PARAMETER Experiment Name: At_42deg_Heat_P Parameter: Timepoint (hr) Value: 6
  misc_feature: MA Experiment 20000173 PARAMETER Experiment Name: At_42deg_Heat_P Parameter: Tissue Value: Aerial
  misc_feature: MA Experiment ID: 20000179 Result: Up-regulated in Transcription
  misc_feature: MA Experiment 20000179 PARAMETER Experiment Name: At_Germinating_Seeds_P Parameter: Age (hr) Value: 6 vs. 0
  misc_feature: MA Experiment 20000179 PARAMETER Experiment Name: At_Germinating_Seeds_P Parameter: Tissue Value: Germinating Seeds
  misc_feature: MA Experiment ID: 20000180 Result: Up-regulated in Transcription
  misc_feature: MA Experiment 20000180 PARAMETER Experiment Name: At_Germinating_Seeds_P Parameter: Age (hr) Value: 24 vs. 0
  misc_feature: MA Experiment 20000180 PARAMETER Experiment Name: At_Germinating_Seeds_P Parameter: Tissue Value: Germinating Seeds
  misc_feature: MA Experiment ID: 20000286 Result: Up-regulated in Transcription
  misc_feature: MA Experiment 20000286 PARAMETER Experiment Name: At_Open_Flower_P Parameter: Age (day) Value: 21
  misc_feature: MA Experiment 20000286 PARAMETER Experiment Name: At_Open_Flower_P Parameter: Plant Line Value: WS
  misc_feature: MA Experiment 20000286 PARAMETER Experiment Name: At_Open_Flower_P Parameter: Tissue Value: Half Open vs. Whole Plant
  misc_feature: MA Experiment ID: 20001451 Result: Down-regulated in Transcription
  misc_feature: MA Experiment 20001451 PARAMETER Experiment Name: At_Far-red-induction_P Parameter: Age (day) Value: 7
  misc_feature: MA Experiment 20001451 PARAMETER Experiment Name: At_Far-red-induction_P Parameter: Light Value: Far-red vs. White
  misc_feature: MA Experiment 20001451 PARAMETER Experiment Name: At_Far-red-induction_P Parameter: Organism Value: A. thaliana
  misc_feature: MA Experiment 20001451 PARAMETER Experiment Name: At_Far-red-induction_P Parameter: Plant Line Value: Columbia
  misc_feature: MA Experiment 20001451 PARAMETER Experiment Name: At_Far-red-induction_P Parameter: Timepoint (hr) Value: 24
  misc_feature: MA Experiment 20001451 PARAMETER Experiment Name: At_Far-red-induction_P Parameter: Tissue Value: Whole Plant
atgctcacttctaattctaaagagaaggaaaggtctctctccttcttatgttgctggtacttaggtcgtcgacgagttgctatgcttctacttctcagccttgcttttgttgtctttgtgttgggttcctacactatcaacaaagagagcaatagtccaaatattcatcagagtattgagacgatggattttggaagcaaccaaacaccgataagtagagaattgacttctttctatacaaaggagtctgataatgatcatgttagagatccttttttgtggaatggcattggaggaagtgatgtagacgtcaaccatcctcctccattcttaccttcatggcatcaccatccgtgtgatagtttttcttttcctcctcctccaccacctggaatgagaaggcctggtccacgcccttgtccggtatgctacctacctccagaagaggccttagcacatatgccaaagtatccatttgaatctcccttgctcaagaatttgacatatatacgtgaagagagtcctgtaaaacctgaagaaagtgaaggaggctctgaattcggaggttatccttctctcgagcataggactaactcttttgacataaaagagtccatgacagtgcattgcgggtttattaaaggaacaaaaccgggccaccaaactggatttgacatcgatgaggatatccttcatgagttggaccagtcccatgatgtgattgtcgcgtcagcgatatttggaaagtatgacataattcaagaaccggtgaacatcagtgaaatggcgaggaagaacatcccattctacatgtttgttgatgaagaaacacatttataccttaagaacacgtcgagttatacagacgataacaagagagtgggattgtggaggatcattgttgtacataatgtcccttataccgatgcacggcgtaatggaaaggttccgaagcttttattgcatagattattcccaaatgtccggtactctatatgggttgatgcaaagctccagcttgttgtagatccatatcaaatccttgaaaggttcttgtggagaacgaattctagttttgcaatctcgagacattaccgacgttttgatgtgtttgtagaggctgaagcgaataaggccgcaagaaagtacgacaatgcctcaatagattaccaagtagagttctacaagaaggaaggtttaacaccttatacggaggctaagcttccaataacaagtgatgtccctgaaggttgtaccatcataagagaacacataccgatcacaaaccttttcacatgtgtatggttcaacgaggtagatcggtttacttcaagagatcagctaagctttgcaattgcgagagacaaaataagagagaaagttgattggagcatcaatatgttcttggactgtgaaagacgcaactttgtgaaacaggtatatcatagagacgttttgctgaccatgaaacctcctcgagcttcttctagagttcttcccgagccactggttttaccacgtggaagattagccggtggtagagccacgccgggtaagaagactccgggacaacgcgggaaaaggcgtcaccggaaagtttcagccggtggcagaaacatgtga

SEQ ID NO: 86000 - protein, 540 aa, Arabidopsis thaliana
  peptide (1)..(540): Ceres Seq. ID no. 12685119
  misc_feature (166)..(482): Pfam Name: Protein of unknown function (DUF616) Pfam Description: Protein of unknown function (DUF616)
  misc_feature (1)..(540): Homolog of NCBI NO: 30695403 NR Description: expressed protein [Arabidopsis thaliana]
  misc_feature (46)..(540): Homolog of NCBI NO: 25405617 NR Description: hypothetical protein F8L10.10 [imported] - thaliana >gi|9454542|gb|AAF87865.1|AC022520_9 Unknown protein
  misc_feature (7)..(534): Homolog of NCBI NO: 15217874 NR Description: unknown protein; protein id: At1g28240.1,
  misc_feature (7)..(534): Homolog of NCBI NO: 17064856 NR Description: Unknown protein [Arabidopsis thaliana]
  misc_feature (298)..(533): Homolog of NCBI NO: 34905662 NR Description: P0475H04.14 [Oryza sativa (japonica
  misc_feature (110)..(319): Homolog of NCBI NO: 34905662 NR Description: P0475H04.14 [Oryza sativa (japonica
  misc_feature (166)..(483): Homolog of NCBI NO: 25403429 NR Description: protein F12K21.12 [imported] - Arabidopsis >gi|8778248|gb|AAF79257.1|AC023279_6 F12K21.12 [Arabidopsis
  misc_feature (166)..(483): Homolog of NCBI NO: 15233955 NR Description: putative protein; protein id: At4g09630.1
  misc_feature (133)..(492): Homolog of NCBI NO: 15227062 NR Description: unknown protein; protein id: At2g02910.1
  misc_feature (134)..(472): Homolog of NCBI NO: 18420250 NR Description: putative protein; protein id: At4g38500.1, by cDNA: gi_15010783 [Arabidopsis thaliana] AT4g38500/F20M13_60 [Arabidopsis thaliana]
MLTSNSKEKERSLSFLCCWYLGRRRVAMLLLLSLAFVVFVLGSYTINKESNSPNIHQSIETMDFGSNQTPISRELTSFYTKESDNDHVRDPFLWNGIGGSDVDVNHPPPFLPSWHHHPCDSFSFPPPPPPGMRRPGPRPCPVCYLPPEEALAHMPKYPFESPLLKNLTYIREESPVKPEESEGGSEFGGYPSLEHRTNSFDIKESMTVHCGFIKGTKPGHQTGFDIDEDILHELDQSHDVIVASAIFGKYDIIQEPVNISEMARKNIPFYMFVDEETHLYLKNTSSYTDDNKRVGLWRIIVVHNVPYTDARRNGKVPKLLLHRLFPNVRYSIWVDAKLQLVVDPYQILERFLWRTNSSFAISRHYRRFDVFVEAEANKAARKYDNASIDYQVEFYKKEGLTPYTEAKLPITSDVPEGCTIIREHIPITNLFTCVWFNEVDRFTSRDQLSFAIARDKIREKVDWSINMFLDCERRNFVKQVYHRDVLLTMKPPRASSRVLPEPLVLPRGRLAGGRATPGKKTPGQRGKRRHRKVSAGGRNM

SEQ ID NO: 86001 - protein, 513 aa, Arabidopsis thaliana
  peptide (1)..(513): Ceres Seq. ID no. 12685120
  misc_feature (139)..(455): Pfam Name: Protein of unknown function (DUF616) Pfam Description: Protein of unknown function (DUF616)
  misc_feature (1)..(513): Homolog of NCBI NO: 30695403 NR Description: expressed protein [Arabidopsis thaliana]
  misc_feature (19)..(513): Homolog of NCBI NO: 25405617 NR Description: hypothetical protein F8L10.10 [imported] - thaliana >gi|9454542|gb|AAF87865.1|AC022520_9 Unknown protein
  misc_feature (1)..(507): Homolog of NCBI NO: 15217874 NR Description: unknown protein; protein id: At1g28240.1,
  misc_feature (1)..(507): Homolog of NCBI NO: 17064856 NR Description: Unknown protein [Arabidopsis thaliana]
  misc_feature (271)..(506): Homolog of NCBI NO: 34905662 NR Description: P0475H04.14 [Oryza sativa (japonica
  misc_feature (83)..(292): Homolog of NCBI NO: 34905662 NR Description: P0475H04.14 [Oryza sativa (japonica
  misc_feature (139)..(456): Homolog of NCBI NO: 25403429 NR Description: protein F12K21.12 [imported] - Arabidopsis >gi|8778248|gb|AAF79257.1|AC023279_6 F12K21.12 [Arabidopsis
  misc_feature (139)..(456): Homolog of NCBI NO: 15233955 NR Description: putative protein; protein id: At4g09630.1
  misc_feature (106)..(465): Homolog of NCBI NO: 15227062 NR Description: unknown protein; protein id: At2g02910.1
  misc_feature (107)..(445): Homolog of NCBI NO: 18420250 NR Description: putative protein; protein id: At4g38500.1, by cDNA: gi_15010783 [Arabidopsis thaliana] AT4g38500/F20M13_60 [Arabidopsis thaliana]
MLLLLSLAFVVFVLGSYTINKESNSPNIHQSIETMDFGSNQTPISRELTSFYTKESDNDHVRDPFLWNGIGGSDVDVNHPPPFLPSWHHHPCDSFSFPPPPPPGMRRPGPRPCPVCYLPPEEALAHMPKYPFESPLLKNLTYIREESPVKPEESEGGSEFGGYPSLEHRTNSFDIKESMTVHCGFIKGTKPGHQTGFDIDEDILHELDQSHDVIVASAIFGKYDIIQEPVNISEMARKNIPFYMFVDEETHLYLKNTSSYTDDNKRVGLWRIIVVHNVPYTDARRNGKVPKLLLHRLFPNVRYSIWVDAKLQLVVDPYQILERFLWRTNSSFAISRHYRRFDVFVEAEANKAARKYDNASIDYQVEFYKKEGLTPYTEAKLPITSDVPEGCTIIREHIPITNLFTCVWFNEVDRFTSRDQLSFAIARDKIREKVDWSINMFLDCERRNFVKQVYHRDVLLTMKPPRASSRVLPEPLVLPRGRLAGGRATPGKKTPGQRGKRRHRKVSAGGRNM

SEQ ID NO: 86002 - protein, 479 aa, Arabidopsis thaliana
  peptide (1)..(479): Ceres Seq. ID no. 12685121
  misc_feature (105)..(421): Pfam Name: Protein of unknown function (DUF616) Pfam Description: Protein of unknown function (DUF616)
  misc_feature (1)..(479): Homolog of NCBI NO: 30695403 NR Description: expressed protein [Arabidopsis thaliana]
  misc_feature (1)..(479): Homolog of NCBI NO: 25405617 NR Description: hypothetical protein F8L10.10 [imported] - thaliana >gi|9454542|gb|AAF87865.1|AC022520_9 Unknown protein
  misc_feature (1)..(473): Homolog of NCBI NO: 15217874 NR Description: unknown protein; protein id: At1g28240.1,
  misc_feature (1)..(473): Homolog of NCBI NO: 17064856 NR Description: Unknown protein [Arabidopsis thaliana]
  misc_feature (237)..(472): Homolog of NCBI NO: 34905662 NR Description: P0475H04.14 [Oryza sativa (japonica
  misc_feature (49)..(258): Homolog of NCBI NO: 34905662 NR Description: P0475H04.14 [Oryza sativa (japonica
  misc_feature (105)..(422): Homolog of NCBI NO: 25403429 NR Description: protein F12K21.12 [imported] - Arabidopsis >gi|8778248|gb|AAF79257.1|AC023279_6 F12K21.12 [Arabidopsis
  misc_feature (105)..(422): Homolog of NCBI NO: 15233955 NR Description: putative protein; protein id: At4g09630.1
  misc_feature (72)..(431): Homolog of NCBI NO: 15227062 NR Description: unknown protein; protein id: At2g02910.1
  misc_feature (73)..(411): Homolog of NCBI NO: 18420250 NR Description: putative protein; protein id: At4g38500.1, by cDNA: gi_15010783 [Arabidopsis thaliana] AT4g38500/F20M13_60 [Arabidopsis thaliana]
MDFGSNQTPISRELTSFYTKESDNDHVRDPFLWNGIGGSDVDVNHPPPFLPSWHHHPCDSFSFPPPPPPGMRRPGPRPCPVCYLPPEEALAHMPKYPFESPLLKNLTYIREESPVKPEESEGGSEFGGYPSLEHRTNSFDIKESMTVHCGFIKGTKPGHQTGFDIDEDILHELDQSHDVIVASAIFGKYDIIQEPVNISEMARKNIPFYMFVDEETHLYLKNTSSYTDDNKRVGLWRIIVVHNVPYTDARRNGKVPKLLLHRLFPNVRYSIWVDAKLQLVVDPYQILERFLWRTNSSFAISRHYRRFDVFVEAEANKAARKYDNASIDYQVEFYKKEGLTPYTEAKLPITSDVPEGCTIIREHIPITNLFTCVWFNEVDRFTSRDQLSFAIARDKIREKVDWSINMFLDCERRNFVKQVYHRDVLLTMKPPRASSRVLPEPLVLPRGRLAGGRATPGKKTPGQRGKRRHRKVSAGGRNM

SEQ ID NO: 86003 - DNA, 1317 bp, Arabidopsis thaliana
  misc_feature (1)..(1317): Ceres Seq. ID no. 12685248
  misc_feature: MA Experiment ID: 20000438 Result: Down-regulated in Transcription
  misc_feature: MA Experiment 20000438 PARAMETER Experiment Name: At_Shoots__P Parameter: Age (day) Value: 14
  misc_feature: MA Experiment 20000438 PARAMETER Experiment Name: At_Shoots__P Parameter: Tissue Value: Shoots vs. Whole Plant
  misc_feature: MA Experiment ID: 20000794 Result: Up-regulated in Transcription
  misc_feature: MA Experiment 20000794 PARAMETER Experiment Name: At_Petals_P Parameter: Age (day) Value: 23-25 days
  misc_feature: MA Experiment 20000794 PARAMETER Experiment Name: At_Petals_P Parameter: Plant Line Value: WS
  misc_feature: MA Experiment 20000794 PARAMETER Experiment Name: At_Petals_P Parameter: Tissue Value: Petals vs. Whole plant
  misc_feature: MA Experiment ID: 20001773 Result: Up-regulated in Transcription
  misc_feature: MA Experiment 20001773 PARAMETER Experiment Name: At_Far-red-enriched-adult_P Parameter: Age (day) Value: 30
  misc_feature: MA Experiment 20001773 PARAMETER Experiment Name: At_Far-red-enriched-adult_P Parameter: Light Value: Far-red enriched vs. White
  misc_feature: MA Experiment 20001773 PARAMETER Experiment Name: At_Far-red-enriched-adult_P Parameter: Organism Value: A. thaliana
  misc_feature: MA Experiment 20001773 PARAMETER Experiment Name: At_Far-red-enriched-adult_P Parameter: Plant Line Value: Columbia
  misc_feature: MA Experiment 20001773 PARAMETER Experiment Name: At_Far-red-enriched-adult_P Parameter: Timepoint (hr) Value: 48
  misc_feature: MA Experiment 20001773 PARAMETER Experiment Name: At_Far-red-enriched-adult_P Parameter: Tissue Value: Aerial
  misc_feature: MA Experiment ID: 20001911 Result: Down-regulated in Transcription
  misc_feature: MA Experiment 20001911 PARAMETER Experiment Name: At_Drought_Reproduction_P Parameter: Age (day) Value: 40
  misc_feature: MA Experiment 20001911 PARAMETER Experiment Name: At_Drought_Reproduction_P Parameter: Organism Value: A. thaliana
  misc_feature: MA Experiment 20001911 PARAMETER Experiment Name: At_Drought_Reproduction_P Parameter: Plant Line Value: WS
  misc_feature: MA Experiment 20001911 PARAMETER Experiment Name: At_Drought_Reproduction_P Parameter: Timepoint (day) Value: 10
  misc_feature: MA Experiment 20001911 PARAMETER Experiment Name: At_Drought_Reproduction_P Parameter: Tissue Value: Flowers
  misc_feature: MA Experiment 20001911 PARAMETER Experiment Name: At_Drought_Reproduction_P Parameter: Treatment Value: Drought vs. No Drought
ctctctctctctctttttctaatcatacgaacacaatctgcttcaagaattagggttttgatcagacacaaaaagtatctctctccggtcttgtgtcaaggttatgcaagaagcggcactaggtatgatgggagccaccgtaggcggagacggagacaccgcggtcgtggcggagcagaatagacagttgaaaggtgagatagcgacacatccgatgtatgagcaattattagccgcacacgtggcgtgtttaagagtagctactccaatagatcaacttccgatcattgaagctcagctttctcaatctcatcatcttctccgttcttacgcttccacggccgttggataccatcatgatcgtcacgagctcgataatttcttggcacaatatgtaatggtgttgtgtagcttcaaagaacagctgcaacagcacgtgagggttcatgccgtcgaagctgttatggcttgccgtgaaattgagaacaaccttcattctcttacaggagcaactttaggagaagggtcgggtgcgactatgtcggaggatgaggatgatcttccgatggatttctcgtcagataattccggcgttgattttagcggcggccacgatatgacgggatttggtccgttgctaccgactgaatcggaaagatcccttatggaaagagtcagacaagaactcaaactagaactcaaacagggttttaaatcgagaatcgaagatgtaagagaagagataatgaggaagagaagggctgggaaattgccaggagacacaactactgtcttgaaaaattggtggcaacaacattgcaaatggccttaccctacggaagatgacaaggcaaaattggtggaggagacaggattgcagttgaagcaaatcaacaattggttcattaaccaacgcaagaggaattggcacaacaactctcactccctcacttccttgaagtccaagcgcaaacactaatctcttcttactatattagttactacctctacatatattcatactaattacactgctaagacatgcatgatacatacgtaattcatgttactgataataacgaggtgtgatcattaatatcatgtacttacttagcttattagatccaccgactactatatgatttgtgcgttgcgtgattactggttgttactagattgtaattcattttgtttgtattgtgcattcaaatttatctttttggtaagaacactgattttgtaacgtgttttccgtggatgactagaccatcatttggaaatataaagtaatgatgccgacaaaaaaggcagtgtttt

SEQ ID NO: 86004 - protein, 291 aa, Arabidopsis thaliana
  peptide (1)..(291): Ceres Seq. ID no. 12685249
  misc_feature (80)..(135): Pfam Name: KNOX2 domain Pfam Description: KNOX2 domain
  misc_feature (1)..(291): Homolog of NCBI NO: 18407708 NR Description: homeodomain-containing protein HD1, putative; id: At1g62990.1, supported by cDNA: 106887., supported by cDNA: [Arabidopsis thaliana] >gi|11878230|gb|AAG40858.1|AF308451_1
  misc_feature (8)..(291): Homolog of NCBI NO: 26451690 NR Description: putative homeodomain transcription factor KNAT6
  misc_feature (9)..(291): Homolog of NCBI NO: 25386223 NR Description: hypothetical protein F16P17.16 [imported] - thaliana >gi|8493589|gb|AAF75812.1|AC011000_15 Strong similarity Homeobox Protein HD1 from Brassica napus gi|1170191, and contains
  misc_feature (9)..(291): Homolog of NCBI NO: 21618231 NR Description: homeodomain-containing protein HD1, putative
  misc_feature (1)..(291): Homolog of NCBI NO: 1170191 NR Description: Homeobox protein HD1 >gi|1076449|pir||S47535
  misc_feature (28)..(290): Homolog of NCBI NO: 4098246 NR Description: homeobox 2 protein [Lycopersicon esculentum]
  misc_feature (20)..(290): Homolog of NCBI NO: 14149141 NR Description: KNOX family class 2 homeodomain protein [Oryza
  misc_feature (14)..(290): Homolog of NCBI NO: 3023961 NR Description: Homeobox protein knotted-1 like 3 (KNAP3)
  misc_feature (15)..(290): Homolog of NCBI NO: 15238743 NR Description: KNAT3 homeodomain protein; protein id:
  misc_feature (15)..(290): Homolog of NCBI NO: 21554222 NR Description: KNAT3 homeodomain protein [Arabidopsis thaliana]
MQEAALGMMGATVGGDGDTAVVAEQNRQLKGEIATHPMYEQLLAAHVACLRVATPIDQLPIIEAQLSQSHHLLRSYASTAVGYHHDRHELDNFLAQYVMVLCSFKEQLQQHVRVHAVEAVMACREIENNLHSLTGATLGEGSGATMSEDEDDLPMDFSSDNSGVDFSGGHDMTGFGPLLPTESERSLMERVRQELKLELKQGFKSRIEDVREEIMRKRRAGKLPGDTTTVLKNWWQQHCKWPYPTEDDKAKLVEETGLQLKQINNWFINQRKRNWHNNSHSLTSLKSKRKH

SEQ ID NO: 86005 - protein, 284 aa, Arabidopsis thaliana; identical to SEQ ID NO: 39455
  peptide (1)..(284): Ceres Seq. ID no. 12685250
  misc_feature (73)..(128): Pfam Name: KNOX2 domain Pfam Description: KNOX2 domain
  misc_feature (1)..(284): Homolog of NCBI NO: 18407708 NR Description: homeodomain-containing protein HD1, putative; id: At1g62990.1, supported by cDNA: 106887., supported by cDNA: [Arabidopsis thaliana] >gi|11878230|gb|AAG40858.1|AF308451_1
  misc_feature (1)..(284): Homolog of NCBI NO: 26451690 NR Description: putative homeodomain transcription factor KNAT6
  misc_feature (2)..(284): Homolog of NCBI NO: 25386223 NR Description: hypothetical protein F16P17.16 [imported] - thaliana >gi|8493589|gb|AAF75812.1|AC011000_15 Strong similarity Homeobox Protein HD1 from Brassica napus gi|1170191, and contains
  misc_feature (2)..(284): Homolog of NCBI NO: 21618231 NR Description: homeodomain-containing protein HD1, putative
  misc_feature (1)..(284): Homolog of NCBI NO: 1170191 NR Description: Homeobox protein HD1 >gi|1076449|pir||S47535
  misc_feature (21)..(283): Homolog of NCBI NO: 4098246 NR Description: homeobox 2 protein [Lycopersicon esculentum]
  misc_feature (13)..(283): Homolog of NCBI NO: 14149141 NR Description: KNOX family class 2 homeodomain protein [Oryza
  misc_feature (7)..(283): Homolog of NCBI NO: 3023961 NR Description: Homeobox protein knotted-1 like 3 (KNAP3)
  misc_feature (8)..(283): Homolog of NCBI NO: 15238743 NR Description: KNAT3 homeodomain protein; protein id:
  misc_feature (8)..(283): Homolog of NCBI NO: 21554222 NR Description: KNAT3 homeodomain protein [Arabidopsis thaliana]

SEQ ID NO: 86006 - protein, 283 aa, Arabidopsis thaliana; identical to SEQ ID NO: 39456
  peptide (1)..(283): Ceres Seq. ID no. 12685251
  misc_feature (72)..(127): Pfam Name: KNOX2 domain Pfam Description: KNOX2 domain
  misc_feature (1)..(283): Homolog of NCBI NO: 18407708 NR Description: homeodomain-containing protein HD1, putative; id: At1g62990.1, supported by cDNA: 106887., supported by cDNA: [Arabidopsis thaliana] >gi|11878230|gb|AAG40858.1|AF308451_1
  misc_feature (1)..(283): Homolog of NCBI NO: 26451690 NR Description: putative homeodomain transcription factor KNAT6
  misc_feature (1)..(283): Homolog of NCBI NO: 25386223 NR Description: hypothetical protein F16P17.16 [imported] - thaliana >gi|8493589|gb|AAF75812.1|AC011000_15 Strong similarity Homeobox Protein HD1 from Brassica napus gi|1170191, and contains
  misc_feature (1)..(283): Homolog of NCBI NO: 21618231 NR Description: homeodomain-containing protein HD1, putative
  misc_feature (1)..(283): Homolog of NCBI NO: 1170191 NR Description: Homeobox protein HD1 >gi|1076449|pir||S47535
  misc_feature (20)..(282): Homolog of NCBI NO: 4098246 NR Description: homeobox 2 protein [Lycopersicon esculentum]
  misc_feature (12)..(282): Homolog of NCBI NO: 14149141 NR Description: KNOX family class 2 homeodomain protein [Oryza
  misc_feature (6)..(282): Homolog of NCBI NO: 3023961 NR Description: Homeobox protein knotted-1 like 3 (KNAP3)
  misc_feature (7)..(282): Homolog of NCBI NO: 15238743 NR Description: KNAT3 homeodomain protein; protein id:
  misc_feature (7)..(282): Homolog of NCBI NO: 21554222 NR Description: KNAT3 homeodomain protein [Arabidopsis thaliana]

SEQ ID NO: 86007 - DNA, 1845 bp, Arabidopsis thaliana
  misc_feature (1)..(1845): Ceres Seq. ID no. 12685271
  misc_feature: MA Experiment ID: 20000315 Result: Down-regulated in Transcription
  misc_feature: MA Experiment 20000315 PARAMETER Experiment Name: At_14day_Shoots-Roots_Sub_P Parameter: Age (day) Value: 14
  misc_feature: MA Experiment 20000315 PARAMETER Experiment Name: At_14day_Shoots-Roots_Sub_P Parameter: Organism Value: A. thaliana
  misc_feature: MA Experiment 20000315 PARAMETER Experiment Name: At_14day_Shoots-Roots_Sub_P Parameter: Plant Line Value: WS
  misc_feature: MA Experiment 20000315 PARAMETER Experiment Name: At_14day_Shoots-Roots_Sub_P Parameter: Tissue Value: Shoots vs. Whole Plant
  misc_feature: MA Experiment ID: 20000327 Result: Down-regulated in Transcription
  misc_feature: MA Experiment 20000327 PARAMETER Experiment Name: At_42deg_Heat_Sub_P Parameter: Age (day) Value: 14
  misc_feature: MA Experiment 20000327 PARAMETER Experiment Name: At_42deg_Heat_Sub_P Parameter: Organism Value: A. thaliana
  misc_feature: MA Experiment 20000327 PARAMETER Experiment Name: At_42deg_Heat_Sub_P Parameter: Plant Line Value: WS
  misc_feature: MA Experiment 20000327 PARAMETER Experiment Name: At_42deg_Heat_Sub_P Parameter: Temperature (deg C) Value: 42 vs. 22
  misc_feature: MA Experiment 20000327 PARAMETER Experiment Name: At_42deg_Heat_Sub_P Parameter: Timepoint (hr) Value: 1
  misc_feature: MA Experiment 20000327 PARAMETER Experiment Name: At_42deg_Heat_Sub_P Parameter: Tissue Value: Aerial
  misc_feature: MA Experiment ID: 20000328 Result: Down-regulated in Transcription
  misc_feature: MA Experiment 20000328 PARAMETER Experiment Name: At_42deg_Heat_Sub_P Parameter: Age (day) Value: 14
  misc_feature: MA Experiment 20000328 PARAMETER Experiment Name: At_42deg_Heat_Sub_P Parameter: Organism Value: A. thaliana
  misc_feature: MA Experiment 20000328 PARAMETER Experiment Name: At_42deg_Heat_Sub_P Parameter: Plant Line Value: WS
  misc_feature: MA Experiment 20000328 PARAMETER Experiment Name: At_42deg_Heat_Sub_P Parameter: Temperature (deg C) Value: 42 vs. 22
  misc_feature: MA Experiment 20000328 PARAMETER Experiment Name: At_42deg_Heat_Sub_P Parameter: Timepoint (hr) Value: 6
  misc_feature: MA Experiment 20000328 PARAMETER Experiment Name: At_42deg_Heat_Sub_P Parameter: Tissue Value: Aerial
  misc_feature: MA Experiment ID: 20000440 Result: Up-regulated in Transcription
  misc_feature: MA Experiment 20000440 PARAMETER Experiment Name: At_Closed-Flower__Sub_P Parameter: Tissue Value: Closed Flower vs. Whole Plant
atgagtttggcgaagagatttgttcacctgaggaaagcttctccatcgttttgccttcgaggtatctatttctctggtttgagttatgatggctacagagagaaattgagtagaaatgcgttactccatttgaagttagatgaagctgttgatctgttcggtgaaatggtcaaatctcgcccctttccttccattgttgagttcagtaaattgttgagtgctattgctaagatgaagaagttcgatcttgtcatctccttcggggagaagatggagattttaggagtttcacataatctctatacttacaatattatgattaactgtttatgccgccgctctcaactctcatttgctttagcaattcttggcaagatgatgaaacttggctatgggcccagcattgttaccctgaactcgcttctcaatggtttctgtcacgggaataggatatccgaggctgttgctttggttgatcagatggtggaaatgggatatcaacctgataccgtcacatttacaactttggttcatgggctttttcaacacaacaaagcttccgaagctgtggctttagttgaacggatggttgtgaaaggttgtcaaccagatctggttacttatggtgcggtaattaatggattatgtaagagaggtgaacctgatttggctttaaatctgctcaacaagatggagaaagggaaaatagaggctgatgttgtgatctacagcacagtcatagatagtctctgcaaatatagacatgtggatgatgcactcaatctgttcactgaaatggataacaaaggtattagaccagatgtttttacctacagctccctcataagttgcctttgtaattacggaagatggagtgatgcttctcgactactcagtgatatgcttgagaggaaaatcaatccaaatgtagtcactttcaactcattgatcgatgcgtttgcgaaggaggggaagcttatagaggctgagaaattgtttgatgagatgatccaaaggtctatagatcctaatattgtcacttacaattcattgatcaacgggttttgtatgcatgatcgtctagatgaggcccagcagatttttactttgatggttagcaaagattgtctgccagacgtagtaacttataatacacttataaatggattttgtaaggctaagaaagtggtggatggtatggaacttttccgggacatgtctcgaagaggattggttggcaacacagtcacttacaccactcttatccatggattttttcaagctagtgattgtgataatgcccaaatggttttcaaacagatggtttctgatggtgtgcatcccaatattatgacatacaacactctgttagatggactttgtaaaaatgggaagctagagaaagcaatggttgtattcgagtatctgcaaaagagtaaaatggaacctgatatttacacatataatattatgagtgaagggatgtgcaaggcagggaaggtggaagatgggtgggatctattttgtagcctcagccttaaaggagtgaaacctgatgttatagcctacaatacaatgatctcaggattctgtaagaaaggtttaaaggaggaagcatataccttgttcataaagatgaaagaagacgggcctcttccagatagtggtacatataatacgcttatcagggcacatctgagagatggtgacaaagcagcatcagctgaactcatcaaagaaatgaggagttgcaggtttgctggcgatgcttcaacttatggcttggtcacagatatgttgcatgatgggagattggacaaaggatttttggaagtgctttcttaa

SEQ ID NO: 86008 - protein, 614 aa, Arabidopsis thaliana
  peptide (1)..(614): Ceres Seq. ID no. 12685272
  misc_feature (486)..(520): Pfam Name: PPR repeat Pfam Description: PPR repeat
  misc_feature (1)..(614): Homolog of NCBI NO: 25404380 NR Description: hypothetical protein F16P17.7 [imported] - thaliana >gi|8493580|gb|AAF75803.1|AC011000_6 Contains weak to leaf protein from Ipomea nil gb|D85101 and contains a RepB
  misc_feature (2)..(614): Homolog of NCBI NO: 15221691 NR Description: unknown protein; protein id: At1g63130.1
  misc_feature (15)..(614): Homolog of NCBI NO: 25404377 NR Description: hypothetical protein F16P17.5 [imported] - thaliana >gi|8493578|gb|AAF75801.1|AC011000_4 Contains a RepB protein domain and multiple PPR PF|01535 repeats. [Arabidopsis
  misc_feature (1)..(597): Homolog of NCBI NO: 15221635 NR Description: unknown protein; protein id: At1g62930.1
  misc_feature (2)..(614): Homolog of NCBI NO: 15221549 NR Description: PPR-repeat protein; protein id: At1g62670.1
  misc_feature (24)..(614): Homolog of NCBI NO: 6630464 NR Description: F23N19.4 [Arabidopsis thaliana]
  misc_feature (15)..(595): Homolog of NCBI NO: 15221621 NR Description: unknown protein; protein id: At1g62910.1
  misc_feature (18)..(614): Homolog of NCBI NO: 15221515 NR Description: putative membrane-associated salt-inducible (AL021637); similar to EST gb|AA728420; protein id: At1g62590.1
  misc_feature (18)..(614): Homolog of NCBI NO: 22531122 NR Description: putative membrane-associated salt-inducible
  misc_feature (26)..(514): Homolog of NCBI NO: 15221621 NR Description: unknown protein; protein id: At1g62910.1
MSLAKRFVHLRKASPSFCLRGIYFSGLSYDGYREKLSRNALLHLKLDEAVDLFGEMVKSRPFPSIVEFSKLLSAIAKMKKFDLVISFGEKMEILGVSHNLYTYNIMINCLCRRSQLSFALAILGKMMKLGYGPSIVTLNSLLNGFCHGNRISEAVALVDQMVEMGYQPDTVTFTTLVHGLFQHNKASEAVALVERMVVKGCQPDLVTYGAVINGLCKRGEPDLALNLLNKMEKGKIEADVVIYSTVIDSLCKYRHVDDALNLFTEMDNKGIRPDVFTYSSLISCLCNYGRWSDASRLLSDMLERKINPNVVTFNSLIDAFAKEGKLIEAEKLFDEMIQRSIDPNIVTYNSLINGFCMHDRLDEAQQIFTLMVSKDCLPDVVTYNTLINGFCKAKKVVDGMELFRDMSRRGLVGNTVTYTTLIHGFFQASDCDNAQMVFKQMVSDGVHPNIMTYNTLLDGLCKNGKLEKAMVVFEYLQKSKMEPDIYTYNIMSEGMCKAGKVEDGWDLFCSLSLKGVKPDVIAYNTMISGFCKKGLKEEAYTLFIKMKEDGPLPDSGTYNTLIRAHLRDGDKAASAELIKEMRSCRFAGDASTYGLVTDMLHDGRLDKGFLEVLS

SEQ ID NO: 86009 - protein, 559 aa, Arabidopsis thaliana
  peptide (1)..(559): Ceres Seq. ID no. 12685273
  misc_feature (431)..(465): Pfam Name: PPR repeat Pfam Description: PPR repeat
  misc_feature (1)..(559): Homolog of NCBI NO: 25404380 NR Description: hypothetical protein F16P17.7 [imported] - thaliana >gi|8493580|gb|AAF75803.1|AC011000_6 Contains weak to leaf protein from Ipomea nil gb|D85101 and contains a RepB
  misc_feature (1)..(559): Homolog of NCBI NO: 15221691 NR Description: unknown protein; protein id: At1g63130.1
  misc_feature (1)..(559): Homolog of NCBI NO: 25404377 NR Description: hypothetical protein F16P17.5 [imported] - thaliana >gi|8493578|gb|AAF75801.1|AC011000_4 Contains a RepB protein domain and multiple PPR PF|01535 repeats. [Arabidopsis
  misc_feature (1)..(542): Homolog of NCBI NO: 15221635 NR Description: unknown protein; protein id: At1g62930.1
  misc_feature (1)..(559): Homolog of NCBI NO: 15221549 NR Description: PPR-repeat protein; protein id: At1g62670.1
  misc_feature (1)..(559): Homolog of NCBI NO: 6630464 NR Description: F23N19.4 [Arabidopsis thaliana]
  misc_feature (1)..(540): Homolog of NCBI NO: 15221621 NR Description: unknown protein; protein id: At1g62910.1
  misc_feature (1)..(559): Homolog of NCBI NO: 15221515 NR Description: putative membrane-associated salt-inducible (AL021637); similar to EST gb|AA728420; protein id: At1g62590.1
  misc_feature (1)..(559): Homolog of NCBI NO: 22531122 NR Description: putative membrane-associated salt-inducible
  misc_feature (1)..(459): Homolog of NCBI NO: 15221621 NR Description: unknown protein; protein id: At1g62910.1
MVKSRPFPSIVEFSKLLSAIAKMKKFDLVISFGEKMEILGVSHNLYTYNIMINCLCRRSQLSFALAILGKMMKLGYGPSIVTLNSLLNGFCHGNRISEAVALVDQMVEMGYQPDTVTFTTLVHGLFQHNKASEAVALVERMVVKGCQPDLVTYGAVINGLCKRGEPDLALNLLNKMEKGKIEADVVIYSTVIDSLCKYRHVDDALNLFTEMDNKGIRPDVFTYSSLISCLCNYGRWSDASRLLSDMLERKINPNVVTFNSLIDAFAKEGKLIEAEKLFDEMIQRSIDPNIVTYNSLINGFCMHDRLDEAQQIFTLMVSKDCLPDVVTYNTLINGFCKAKKVVDGMELFRDMSRRGLVGNTVTYTTLIHGFFQASDCDNAQMVFKQMVSDGVHPNIMTYNTLLDGLCKNGKLEKAMVVFEYLQKSKMEPDIYTYNIMSEGMCKAGKVEDGWDLFCSLSLKGVKPDVIAYNTMISGFCKKGLKEEAYTLFIKMKEDGPLPDSGTYNTLIRAHLRDGDKAASAELIKEMRSCRFAGDASTYGLVTDMLHDGRLDKGFLEVLS

SEQ ID NO: 86010 - protein, 537 aa, Arabidopsis thaliana
  peptide (1)..(537): Ceres Seq. ID no. 12685274
  misc_feature (409)..(443): Pfam Name: PPR repeat Pfam Description: PPR repeat
  misc_feature (1)..(537): Homolog of NCBI NO: 25404380 NR Description: hypothetical protein F16P17.7 [imported] - thaliana >gi|8493580|gb|AAF75803.1|AC011000_6 Contains weak to leaf protein from Ipomea nil gb|D85101 and contains a RepB
  misc_feature (1)..(537): Homolog of NCBI NO: 15221691 NR Description: unknown protein; protein id: At1g63130.1
  misc_feature (1)..(537): Homolog of NCBI NO: 25404377 NR Description: hypothetical protein F16P17.5 [imported] - thaliana >gi|8493578|gb|AAF75801.1|AC011000_4 Contains a RepB protein domain and multiple PPR PF|01535 repeats. [Arabidopsis
  misc_feature (1)..(520): Homolog of NCBI NO: 15221635 NR Description: unknown protein; protein id: At1g62930.1
  misc_feature (1)..(537): Homolog of NCBI NO: 15221549 NR Description: PPR-repeat protein; protein id: At1g62670.1
  misc_feature (1)..(537): Homolog of NCBI NO: 6630464 NR Description: F23N19.4 [Arabidopsis thaliana]
  misc_feature (1)..(518): Homolog of NCBI NO: 15221621 NR Description: unknown protein; protein id: At1g62910.1
  misc_feature (1)..(537): Homolog of NCBI NO: 15221515 NR Description: putative membrane-associated salt-inducible (AL021637); similar to EST gb|AA728420; protein id: At1g62590.1
  misc_feature (1)..(537): Homolog of NCBI NO: 22531122 NR Description: putative membrane-associated salt-inducible
  misc_feature (1)..(437): Homolog of NCBI NO: 15221621 NR Description: unknown protein; protein id: At1g62910.1
MKKFDLVISFGEKMEILGVSHNLYTYNIMINCLCRRSQLSFALAILGKMMKLGYGPSIVTLNSLLNGFCHGNRISEAVALVDQMVEMGYQPDTVTFTTLVHGLFQHNKASEAVALVERMVVKGCQPDLVTYGAVINGLCKRGEPDLALNLLNKMEKGKIEADVVIYSTVIDSLCKYRHVDDALNLFTEMDNKGIRPDVFTYSSLISCLCNYGRWSDASRLLSDMLERKINPNVVTFNSLIDAFAKEGKLIEAEKLFDEMIQRSIDPNIVTYNSLINGFCMHDRLDEAQQIFTLMVSKDCLPDVVTYNTLINGFCKAKKVVDGMELFRDMSRRGLVGNTVTYTTLIHGFFQASDCDNAQMVFKQMVSDGVHPNIMTYNTLLDGLCKNGKLEKAMVVFEYLQKSKMEPDIYTYNIMSEGMCKAGKVEDGWDLFCSLSLKGVKPDVIAYNTMISGFCKKGLKEEAYTLFIKMKEDGPLPDSGTYNTLIRAHLRDGDKAASAELIKEMRSCRFAGDASTYGLVTDMLHDGRLDKGFLEVLS

SEQ ID NO: 86011 - DNA, 954 bp, Arabidopsis thaliana
  misc_feature (1)..(954): Ceres Seq. ID no. 12685275
  misc_feature: MA Experiment ID: 20000315 Result: Down-regulated in Transcription
  misc_feature: MA Experiment 20000315 PARAMETER Experiment Name: At_14day_Shoots-Roots_Sub_P Parameter: Age (day) Value: 14
  misc_feature: MA Experiment 20000315 PARAMETER Experiment Name: At_14day_Shoots-Roots_Sub_P Parameter: Organism Value: A. thaliana
  misc_feature: MA Experiment 20000315 PARAMETER Experiment Name: At_14day_Shoots-Roots_Sub_P Parameter: Plant Line Value: WS
  misc_feature: MA Experiment 20000315 PARAMETER Experiment Name: At_14day_Shoots-Roots_Sub_P Parameter: Tissue Value: Shoots vs. Whole Plant
  misc_feature: MA Experiment ID: 20000355 Result: Down-regulated in Transcription
  misc_feature: MA Experiment 20000355 PARAMETER Experiment Name: At_Siliques_Sub_P Parameter: Age (day) Value: 21
  misc_feature: MA Experiment 20000355 PARAMETER Experiment Name: At_Siliques_Sub_P Parameter: Organism Value: A. thaliana
  misc_feature: MA Experiment 20000355 PARAMETER Experiment Name: At_Siliques_Sub_P Parameter: Plant Line Value: WS
  misc_feature: MA Experiment 20000355 PARAMETER Experiment Name: At_Siliques_Sub_P Parameter: Tissue Value: Less Than 5mm Siliques vs. Whole Plant
atggcgaacagagatgtggagagagtagggaagaaaaacagaggagctaataacaattatttctacgaggagtcttctggtgaaactcattggacttcatggctgattccggcgattgtagtggcaaatctcgctgtctttatcgctgttatgttcgttaatgattgtcctaagaaaatcaccggacctaacaaagagtgtgttgctagattcctcggaagattctcgtttcaaccacttaaagagaatcctctctttggtccttcttcttcaacattggagaaaatgggagcattggaatggaggaaagtagtacatgaacatcaaggatggagacttctctcttgtatgtggcttcacgctggtatcattcatcttcttacaaacatgttgagtttgatcttcattggtatccgccttgagcagcaatttggcttcataagagtcgggttgatatacttaatatcgggtctcggtggaagcatactttcgtcgcttttccttcaagaaagtatctctgttggtgcttcgggtgctctctttggacttcttggagcaatgttatctgaacttcttaccaattggactatctatgccaacaaggcggctgctctgatcacacttctgttcatcatcgcaatcaacttagcattaggcatgcttcctcgggttgacaactttgcacacattggagggtttttaaccggattctgcctcgggtttgtcctccttgtccgacctcagtacggttgggaagcttcccgcaccaacacttcgcgaaccaaacgaaagtatagcatgtaccagtacgtgctgtttgtagtttcagtggtgctacttgtggttgggctaacggttgcattagtgatgcttttcaaaggagagaatgggaacaaacattgcaaatggtgtcattaccttagctgtttcccaacttctaaatggacctgctaa

SEQ ID NO: 86012 - protein, 317 aa, Arabidopsis thaliana; identical to SEQ ID NO: 22106
  peptide (1)..(317): Ceres Seq. ID no. 12685276
  misc_feature (1)..(317): Homolog of NCBI NO: 15221690 NR Description: membrane protein, putative; protein id: [Arabidopsis thaliana] >gi|25404407|pir||F96656 probable membrane
  misc_feature (1)..(317): Homolog of NCBI NO: 15222058 NR Description: membrane protein, putative; protein id: supported by cDNA: gi_17529033 [Arabidopsis thaliana] putative membrane protein [Arabidopsis thaliana]
  misc_feature (27)..(317): Homolog of NCBI NO: 25402744 NR Description: protein T12C24.28 [imported] - Arabidopsis >gi|9502383|gb|AAF88090.1|AC025417_18 T12C24.28 [Arabidopsis
  misc_feature (22)..(317): Homolog of NCBI NO: 15240744 NR Description: membrane protein; protein id: At5g07250.1, by cDNA: gi_16648761, supported by cDNA: gi_20466142 [Arabidopsis
  misc_feature (15)..(317): Homolog of NCBI NO: 294845 NR Description: membrane protein [Saccharum hybrid cultivar
  misc_feature (31)..(317): Homolog of NCBI NO: 30693911 NR Description: membrane protein, Rhomboid family [Arabidopsis
  misc_feature (20)..(317): Homolog of NCBI NO: 38344377 NR Description: OSJNBb0032E06.11 [Oryza sativa (japonica
  misc_feature (2)..(317): Homolog of NCBI NO: 37536172 NR Description: putative membrane protein [Oryza sativa (japonica group)] >gi|22122915|gb|AAM92298.1| putative membrane protein
  misc_feature (31)..(317): Homolog of NCBI NO: 11357824 NR Description: hypothetical protein F5K20.80 - Arabidopsis >gi|7629998|emb|CAB88340.1| putative protein [Arabidopsis
  misc_feature (13)..(316): Homolog of NCBI NO: 15236387 NR Description: putative membrane protein; protein id: At4g23070.1

SEQ ID NO: 86013 - protein, 267 aa, Arabidopsis thaliana; identical to SEQ ID NO: 22107
  peptide (1)..(267): Ceres Seq. ID no. 12685277
  misc_feature (1)..(267): Homolog of NCBI NO: 15221690 NR Description: membrane protein, putative; protein id: [Arabidopsis thaliana] >gi|25404407|pir||F96656 probable membrane
  misc_feature (1)..(267): Homolog of NCBI NO: 15222058 NR Description: membrane protein, putative; protein id: supported by cDNA: gi_17529033 [Arabidopsis thaliana] putative membrane protein [Arabidopsis thaliana]
  misc_feature (1)..(267): Homolog of NCBI NO: 25402744 NR Description: protein T12C24.28 [imported] - Arabidopsis >gi|9502383|gb|AAF88090.1|AC025417_18 T12C24.28 [Arabidopsis
  misc_feature (1)..(267): Homolog of NCBI NO: 15240744 NR Description: membrane protein; protein id: At5g07250.1, by cDNA: gi_16648761, supported by cDNA: gi_20466142 [Arabidopsis
  misc_feature (1)..(267): Homolog of NCBI NO: 294845 NR Description: membrane protein [Saccharum hybrid cultivar
  misc_feature (1)..(267): Homolog of NCBI NO: 30693911 NR Description: membrane protein, Rhomboid family [Arabidopsis
  misc_feature (1)..(267): Homolog of NCBI NO: 38344377 NR Description: OSJNBb0032E06.11 [Oryza sativa (japonica
  misc_feature (1)..(267): Homolog of NCBI NO: 37536172 NR Description: putative membrane protein [Oryza sativa (japonica group)] >gi|22122915|gb|AAM92298.1| putative membrane protein
  misc_feature (1)..(267): Homolog of NCBI NO: 11357824 NR Description: hypothetical protein F5K20.80 - Arabidopsis >gi|7629998|emb|CAB88340.1| putative protein [Arabidopsis
  misc_feature (1)..(266): Homolog of NCBI NO: 15236387 NR Description: putative membrane protein; protein id: At4g23070.1

SEQ ID NO: 86014 - protein, 222 aa, Arabidopsis thaliana; identical to SEQ ID NO: 22108
  peptide (1)..(222): Ceres Seq. ID no. 12685278
  misc_feature (1)..(222): Homolog of NCBI NO: 15221690 NR Description: membrane protein, putative; protein id: [Arabidopsis thaliana] >gi|25404407|pir||F96656 probable membrane
  misc_feature (1)..(222): Homolog of NCBI NO: 15222058 NR Description: membrane protein, putative; protein id: supported by cDNA: gi_17529033 [Arabidopsis thaliana] putative membrane protein [Arabidopsis thaliana]
  misc_feature (1)..(222): Homolog of NCBI NO: 25402744 NR Description: protein T12C24.28 [imported] - Arabidopsis >gi|9502383|gb|AAF88090.1|AC025417_18 T12C24.28 [Arabidopsis
  misc_feature (1)..(222): Homolog of NCBI NO: 15240744 NR Description: membrane protein; protein id: At5g07250.1, by cDNA: gi_16648761, supported by cDNA: gi_20466142 [Arabidopsis
  misc_feature (1)..(222): Homolog of NCBI NO: 294845 NR Description: membrane protein [Saccharum hybrid cultivar
  misc_feature (1)..(222): Homolog of NCBI NO: 30693911 NR Description: membrane protein, Rhomboid family [Arabidopsis
  misc_feature (1)..(222): Homolog of NCBI NO: 38344377 NR Description: OSJNBb0032E06.11 [Oryza sativa (japonica
  misc_feature (1)..(222): Homolog of NCBI NO: 37536172 NR Description: putative membrane protein [Oryza sativa (japonica group)] >gi|22122915|gb|AAM92298.1| putative membrane protein
  misc_feature (1)..(222): Homolog of NCBI NO: 11357824 NR Description: hypothetical protein F5K20.80 - Arabidopsis >gi|7629998|emb|CAB88340.1| putative protein [Arabidopsis
  misc_feature (1)..(221): Homolog of NCBI NO: 15236387 NR Description: putative membrane protein; protein id: At4g23070.1

SEQ ID NO: 86015 - DNA, 1146 bp, Arabidopsis thaliana
  misc_feature (1)..(1146): Ceres Seq. ID no. 12685279
atggagaaccatcttcaacattccttaaccatcattcctaaaccggatctaatcaaagaagaacaacgttatcacgaagatacggtgagcttgcaagcggagaggattttgcatgccatgaccttccccatggttctcaaaactgctttggagcttggcgttatcgacatgatcacttctgtagatgacggcgtgtggctctcgccttctgagatcgctcttggtctcccaaccaagcccaccaatccggaggcaccagtattgctggaccggatgctagttttgttagccagccactcaatcttgaagtaccgtacggtagaaaccggagataacattggaagtagaaagaccgagagggtctatgcagctgaaccggtttgcacgtttttcttgaaccgcggagatggcttgggctctctcgccactttgttcatggtactccaaggggaagtctgtatgaagccttgggaacatctcaaagacatgatattagaaggaaaagatgcattcacctctgctcatggcatgaggtttttcgaactcattggttcgaacgaacaattcgctgaaatgtttaaccgggcaatgtcggaagcttccacattgattatgaagaaggttttagaagtttacaaaggattcgaagatgtaaatactttggtggatgtgggaggaggaattggaacaatcataggtcaagtgacttccaagtatcctcatattaaaggcatcaatttcgatctagcatcggttttagcccatgctccttttaataaaggagtggagcatgtttcaggagatatgtttaaagaaattccaaaaggagatgccatcttcatgaaatggatactacatgattggactgacgaagattgtgtaaagatcctaaaaaattattggaaaagtcttcccgagaaaggaaaagtgataatagtcgaggtggttacgcccgaggaaccaaagattaacgacatttcttctaacattgtgttcggtatggacatgctgatgttagcagtaagctcaggtggtaaggagaggtctctttcccaattcgagactctagcctctgattcgggttttcttcgttgtgaaatcatttgtcatgccttctcatatagtgttatcgaattacacaaatag

SEQ ID NO: 86016 - protein, 381 aa, Arabidopsis thaliana
  peptide (1)..(381): Ceres Seq. ID no. 12685280
  misc_feature (115)..(358): Pfam Name: O-methyltransferase Pfam Description: O-methyltransferase
  misc_feature (1)..(381): Homolog of NCBI NO: 25315953 NR Description: hypothetical protein F16M19.12 [imported] -
  misc_feature (1)..(282): Homolog of NCBI NO: 30696806 NR Description: O-methyltransferase 1, putative [Arabidopsis
  misc_feature (1)..(381): Homolog of NCBI NO: 27808586 NR Description: At1g77520 [Arabidopsis thaliana]
  misc_feature (1)..(381): Homolog of NCBI NO: 15223976 NR Description: O-methyltransferase, family 2 family; protein id:
  misc_feature (1)..(381): Homolog of NCBI NO: 15223977 NR Description: O-methyltransferase, family 2 family; protein id: [Arabidopsis thaliana] >gi|25315960|pir||G96804 hypothetical
  misc_feature (44)..(381): Homolog of NCBI NO: 21593350 NR Description: putative caffeic acid 3-O-methyltransferase
  misc_feature (1)..(381): Homolog of NCBI NO: 21618183 NR Description: caffeic acid 3-O-methyltransferase-like protein
  misc_feature (1)..(381): Homolog of NCBI NO: 15238847 NR Description: O-methyltransferase 1, putative; protein id: supported by cDNA: 99784. [Arabidopsis thaliana]
  misc_feature (185)..(381): Homolog of NCBI NO: 15240132 NR Description: O-methyltransferase, family 2 family; protein id:
  misc_feature (64)..(126): Homolog of NCBI NO: 15240132 NR Description: O-methyltransferase, family 2 family; protein id:
MENHLQHSLTIIPKPDLIKEEQRYHEDTVSLQAERILHAMTFPMVLKTALELGVIDMITSVDDGVWLSPSEIALGLPTKPTNPEAPVLLDRMLVLLASHSILKYRTVETGDNIGSRKTERVYAAEPVCTFFLNRGDGLGSLATLFMVLQGEVCMKPWEHLKDMILEGKDAFTSAHGMRFFELIGSNEQFAEMFNRAMSEASTLIMKKVLEVYKGFEDVNTLVDVGGGIGTIIGQVTSKYPHIKGINFDLASVLAHAPFNKGVEHVSGDMFKEIPKGDAIFMKWILHDWTDEDCVKILKNYWKSLPEKGKVIIVEVVTPEEPKINDISSNIVFGMDMLMLAVSSGGKERSLSQFETLASDSGFLRCEIICHAFSYSVIELHK

SEQ ID NO: 86017 - protein, 342 aa, Arabidopsis thaliana
  peptide (1)..(342): Ceres Seq. ID no. 12685281
  misc_feature (76)..(319): Pfam Name: O-methyltransferase Pfam Description: O-methyltransferase
  misc_feature (1)..(342): Homolog of NCBI NO: 25315953 NR Description: hypothetical protein F16M19.12 [imported] -
  misc_feature (1)..(243): Homolog of NCBI NO: 30696806 NR Description: O-methyltransferase 1, putative [Arabidopsis
  misc_feature (1)..(342): Homolog of NCBI NO: 27808586 NR Description: At1g77520 [Arabidopsis thaliana]
  misc_feature (1)..(342): Homolog of NCBI NO: 15223976 NR Description: O-methyltransferase, family 2 family; protein id:
  misc_feature (1)..(342): Homolog of NCBI NO: 15223977 NR Description: O-methyltransferase, family 2 family; protein id: [Arabidopsis thaliana] >gi|25315960|pir||G96804 hypothetical
  misc_feature (5)..(342): Homolog of NCBI NO: 21593350 NR Description: putative caffeic acid 3-O-methyltransferase
  misc_feature (1)..(342): Homolog of NCBI NO: 21618183 NR Description: caffeic acid 3-O-methyltransferase-like protein
  misc_feature (1)..(342): Homolog of NCBI NO: 15238847 NR Description: O-methyltransferase 1, putative; protein id: supported by cDNA: 99784. [Arabidopsis thaliana]
  misc_feature (146)..(342): Homolog of NCBI NO: 15240132 NR Description: O-methyltransferase, family 2 family; protein id:
  misc_feature (25)..(87): Homolog of NCBI NO: 15240132 NR Description: O-methyltransferase, family 2 family; protein id:
MTFPMVLKTALELGVIDMITSVDDGVWLSPSEIALGLPTKPTNPEAPVLLDRMLVLLASHSILKYRTVETGDNIGSRKTERVYAAEPVCTFFLNRGDGLGSLATLFMVLQGEVCMKPWEHLKDMILEGKDAFTSAHGMRFFELIGSNEQFAEMFNRAMSEASTLIMKKVLEVYKGFEDVNTLVDVGGGIGTIIGQVTSKYPHIKGINFDLASVLAHAPFNKGVEHVSGDMFKEIPKGDAIFMKWILHDWTDEDCVKILKNYWKSLPEKGKVIIVEVVTPEEPKINDISSNIVFGMDMLMLAVSSGGKERSLSQFETLASDSGFLRCEIICHAFSYSVIELHK

SEQ ID NO: 86018 - protein, 338 aa, Arabidopsis thaliana
  peptide (1)..(338): Ceres Seq. ID no. 12685282
  misc_feature (72)..(315): Pfam Name: O-methyltransferase Pfam Description: O-methyltransferase
  misc_feature (1)..(338): Homolog of NCBI NO: 25315953 NR Description: hypothetical protein F16M19.12 [imported] -
  misc_feature (1)..(239): Homolog of NCBI NO: 30696806 NR Description: O-methyltransferase 1, putative [Arabidopsis
  misc_feature (1)..(338): Homolog of NCBI NO: 27808586 NR Description: At1g77520 [Arabidopsis thaliana]
  misc_feature (1)..(338): Homolog of NCBI NO: 15223976 NR Description: O-methyltransferase, family 2 family; protein id:
  misc_feature (1)..(338): Homolog of NCBI NO: 15223977 NR Description: O-methyltransferase, family 2 family; protein id: [Arabidopsis thaliana] >gi|25315960|pir||G96804 hypothetical
  misc_feature (1)..(338): Homolog of NCBI NO: 21593350 NR Description: putative caffeic acid 3-O-methyltransferase
  misc_feature (1)..(338): Homolog of NCBI NO: 21618183 NR Description: caffeic acid 3-O-methyltransferase-like protein
  misc_feature (1)..(338): Homolog of NCBI NO: 15238847 NR Description: O-methyltransferase 1, putative; protein id: supported by cDNA: 99784. [Arabidopsis thaliana]
  misc_feature (142)..(338): Homolog of NCBI NO: 15240132 NR Description: O-methyltransferase, family 2 family; protein id:
  misc_feature (21)..(83): Homolog of NCBI NO: 15240132 NR Description: O-methyltransferase, family 2 family; protein id:
MVLKTALELGVIDMITSVDDGVWLSPSEIALGLPTKPTNPEAPVLLDRMLVLLASHSILKYRTVETGDNIGSRKTERVYAAEPVCTFFLNRGDGLGSLATLFMVLQGEVCMKPWEHLKDMILEGKDAFTSAHGMRFFELIGSNEQFAEMFNRAMSEASTLIMKKVLEVYKGFEDVNTLVDVGGGIGTIIGQVTSKYPHIKGINFDLASVLAHAPFNKGVEHVSGDMFKEIPKGDAIFMKWILHDWTDEDCVKILKNYWKSLPEKGKVIIVEVVTPEEPKINDISSNIVFGMDMLMLAVSSGGKERSLSQFETLASDSGFLRCEIICHAFSYSVIELHK

SEQ ID NO: 86019 - DNA, 1734 bp, Arabidopsis thaliana
  misc_feature (1)..(1734): Ceres Seq. ID no. 12685322
  misc_feature: MA Experiment ID: 20000315 Result: Down-regulated in Transcription
  misc_feature: MA Experiment 20000315 PARAMETER Experiment Name: At_14day_Shoots-Roots_Sub_P Parameter: Age (day) Value: 14
  misc_feature: MA Experiment 20000315 PARAMETER Experiment Name: At_14day_Shoots-Roots_Sub_P Parameter: Organism Value: A. thaliana
  misc_feature: MA Experiment 20000315 PARAMETER Experiment Name: At_14day_Shoots-Roots_Sub_P Parameter: Plant Line Value: WS
  misc_feature: MA Experiment 20000315 PARAMETER Experiment Name: At_14day_Shoots-Roots_Sub_P Parameter: Tissue Value: Shoots vs. Whole Plant
  misc_feature: MA Experiment ID: 20000327 Result: Down-regulated in Transcription
  misc_feature: MA Experiment 20000327 PARAMETER Experiment Name: At_42deg_Heat_Sub_P Parameter: Age (day) Value: 14
  misc_feature: MA Experiment 20000327 PARAMETER Experiment Name: At_42deg_Heat_Sub_P Parameter: Organism Value: A. thaliana
  misc_feature: MA Experiment 20000327 PARAMETER Experiment Name: At_42deg_Heat_Sub_P Parameter: Plant Line Value: WS
  misc_feature: MA Experiment 20000327 PARAMETER Experiment Name: At_42deg_Heat_Sub_P Parameter: Temperature (deg C) Value: 42 vs. 22
  misc_feature: MA Experiment 20000327 PARAMETER Experiment Name: At_42deg_Heat_Sub_P Parameter: Timepoint (hr) Value: 1
  misc_feature: MA Experiment 20000327 PARAMETER Experiment Name: At_42deg_Heat_Sub_P Parameter: Tissue Value: Aerial
  misc_feature: MA Experiment ID: 20000328 Result: Down-regulated in Transcription
  misc_feature: MA Experiment 20000328 PARAMETER Experiment Name: At_42deg_Heat_Sub_P Parameter: Age (day) Value: 14
  misc_feature: MA Experiment 20000328 PARAMETER Experiment Name: At_42deg_Heat_Sub_P Parameter: Organism Value: A. thaliana
  misc_feature: MA Experiment 20000328 PARAMETER Experiment Name: At_42deg_Heat_Sub_P Parameter: Plant Line Value: WS
  misc_feature: MA Experiment 20000328 PARAMETER Experiment Name: At_42deg_Heat_Sub_P Parameter: Temperature (deg C) Value: 42 vs. 22
  misc_feature: MA Experiment 20000328 PARAMETER Experiment Name: At_42deg_Heat_Sub_P Parameter: Timepoint (hr) Value: 6
  misc_feature: MA Experiment 20000328 PARAMETER Experiment Name: At_42deg_Heat_Sub_P Parameter: Tissue Value: Aerial
  misc_feature: MA Experiment ID: 20000440 Result: Up-regulated in Transcription
  misc_feature: MA Experiment 20000440 PARAMETER Experiment Name: At_Closed-Flower__Sub_P Parameter: Tissue Value: Closed Flower vs. Whole Plant
atgaggatctcaatttcgagtgtagtttcatcgacgacgagtagatttgttcatcggaatcttcaggggaaaggtaatcctcgaattgctccttcttccattgatctttgcgggatgtgttactggggacgagctttttctagtggcagtggtgattacagagagatattgagaaatgggttacatagtatgaagttagatgatgcaattggtttgttcggtggcatggtcaagtcacgtcctttaccttccatttttgagttcaataaactgttgagtgccattgctaagatgaaaaagtttgatcttgtcatctctctaggtgagaagatgcagaggttaggaatttcacataatctatatacttacaatattttgatcaactgtttctgccgacgctctcaaatctctcttgctttagctcttcttggcaagatgatgaaactcggctatgagcccagcattgtcacgctttcttctcttctcaatggatactgtcacggtaagaggatttcagatgctgtagctttggttgatcaaatggtggaaatggggtatagacctgacacaatcacatttacaactttgattcatgggctttttctccacaacaaagcttctgaagctgtggcgttagttgatcgaatggttcaaagaggctgtcaaccaaatctggttacttatggagtggtagtaaatggattatgtaagagaggtgatattgatttggcttttaatctgctcaacaagatggaagctgcgaaaatagaggccaatgttgtgatctacagcacagtcatagatagtctctgcaaatatagacatgaggatgatgcactcaacttgttcactgaaatggaaaacaaaggagttagaccaaatgttattacctacagctccctcataagttgcctttgtaattacgaaagatggagtgatgcttctcgactactcagtgatatgattgagaggaaaatcaatccaaatgtagtcactttcaacgcattgattgatgcatttgtgaaggaggggaagcttgtagaggctgagaaattgtacgacgagatgatcaaaaggtctatagatcctgatattttcacttatagttcactgatcaatgggttttgtatgcacgatcgtttagacgaggccaagcacatgtttgagttgatgattagcaaggactgtttcccaaacgtagtgacttacaatactcttattaacggattttgtaaggctaagagaatagacgaaggtgtggaactcttccgcgagatgtctcaaagaggattggttggcaacacagtcacttacaccactcttatccatggattttttcaagctagagattgtgataatgcccaaatggtgttcaaacagatggtttctgatggtgtgcatcccaatattatgacatacaacactctgttagatggactttgtaaaaatgggaagctagagaaagcaatggttgtattcgagtatctgcaaaggagtaaaatggaacctactatttacacatataatattatgattgaagggatgtgcaaggcagggaaggtggaagatgggtgggatctattttgtagcctcagccttaaaggagtgaaacctgatgtaataatttacaatactatgatctcaggattttgtaggaaaggtttaaaggaagaagcagatgccttgttcagaaaaatgagagaagatgggcctcttccagatagcggtacataa

SEQ ID NO: 86020 - protein, 577 aa, Arabidopsis thaliana
  peptide (1)..(577): Ceres Seq. ID no. 12685323
  misc_feature (366)..(400): Pfam Name: PPR repeat Pfam Description: PPR repeat
  misc_feature (1)..(577): Homolog of NCBI NO: 15222409 NR Description: PPR-repeat protein; protein id: At1g63400.1
  misc_feature (1)..(577): Homolog of NCBI NO: 15221515 NR Description: putative membrane-associated salt-inducible (AL021637); similar to EST gb|AA728420; protein id: At1g62590.1
  misc_feature (9)..(577): Homolog of NCBI NO: 15221621 NR Description: unknown protein; protein id: At1g62910.1
  misc_feature (9)..(577): Homolog of NCBI NO: 25404377 NR Description: hypothetical protein F16P17.5 [imported] - thaliana >gi|8493578|gb|AAF75801.1|AC011000_4 Contains a RepB protein domain and multiple PPR PF|01535 repeats. [Arabidopsis
  misc_feature (9)..(577): Homolog of NCBI NO: 15221691 NR Description: unknown protein; protein id: At1g63130.1
  misc_feature (39)..(577): Homolog of NCBI NO: 22531122 NR Description: putative membrane-associated salt-inducible
  misc_feature (1)..(576): Homolog of NCBI NO: 15221549 NR Description: PPR-repeat protein; protein id: At1g62670.1
  misc_feature (40)..(577): Homolog of NCBI NO: 15221674 NR Description: unknown protein; protein id: At1g63080.1
  misc_feature (43)..(577): Homolog of NCBI NO: 15221635 NR Description: unknown protein; protein id: At1g62930.1
  misc_feature (43)..(577): Homolog of NCBI NO: 25404380 NR Description: hypothetical protein F16P17.7 [imported] - thaliana >gi|8493580|gb|AAF75803.1|AC011000_6 Contains weak to leaf protein from Ipomea nil gb|D85101 and contains a RepB
MRISISSVVSSTTSRFVHRNLQGKGNPRIAPSSIDLCGMCYWGRAFSSGSGDYREILRNGLHSMKLDDAIGLFGGMVKSRPLPSIFEFNKLLSAIAKMKKFDLVISLGEKMQRLGISHNLYTYNILINCFCRRSQISLALALLGKMMKLGYEPSIVTLSSLLNGYCHGKRISDAVALVDQMVEMGYRPDTITFTTLIHGLFLHNKASEAVALVDRMVQRGCQPNLVTYGVVVNGLCKRGDIDLAFNLLNKMEAAKIEANVVIYSTVIDSLCKYRHEDDALNLFTEMENKGVRPNVITYSSLISCLCNYERWSDASRLLSDMIERKINPNVVTFNALIDAFVKEGKLVEAEKLYDEMIKRSIDPDIFTYSSLINGFCMHDRLDEAKHMFELMISKDCFPNVVTYNTLINGFCKAKRIDEGVELFREMSQRGLVGNTVTYTTLIHGFFQARDCDNAQMVFKQMVSDGVHPNIMTYNTLLDGLCKNGKLEKAMVVFEYLQRSKMEPTIYTYNIMIEGMCKAGKVEDGWDLFCSLSLKGVKPDVIIYNTMISGFCRKGLKEEADALFRKMREDGPLPDSGT

SEQ ID NO: 86021 - protein, 539 aa, Arabidopsis thaliana
  peptide (1)..(539): Ceres Seq. ID no. 12685324
  misc_feature (328)..(362): Pfam Name: PPR repeat Pfam Description: PPR repeat
  misc_feature (1)..(539): Homolog of NCBI NO: 15222409 NR Description: PPR-repeat protein; protein id: At1g63400.1
  misc_feature (1)..(539): Homolog of NCBI NO: 15221515 NR Description: putative membrane-associated salt-inducible (AL021637); similar to EST gb|AA728420; protein id: At1g62590.1
  misc_feature (1)..(539): Homolog of NCBI NO: 15221621 NR Description: unknown protein; protein id: At1g62910.1
  misc_feature (1)..(539): Homolog of NCBI NO: 25404377 NR Description: hypothetical protein F16P17.5 [imported] - thaliana >gi|8493578|gb|AAF75801.1|AC011000_4 Contains a RepB protein domain and multiple PPR PF|01535 repeats. [Arabidopsis
  misc_feature (1)..(539): Homolog of NCBI NO: 15221691 NR Description: unknown protein; protein id: At1g63130.1
  misc_feature (1)..(539): Homolog of NCBI NO: 22531122 NR Description: putative membrane-associated salt-inducible
  misc_feature (1)..(538): Homolog of NCBI NO: 15221549 NR Description: PPR-repeat protein; protein id: At1g62670.1
  misc_feature (2)..(539): Homolog of NCBI NO: 15221674 NR Description: unknown protein; protein id: At1g63080.1
  misc_feature (5)..(539): Homolog of NCBI NO: 15221635 NR Description: unknown protein; protein id: At1g62930.1
  misc_feature (5)..(539): Homolog of NCBI NO: 25404380 NR Description: hypothetical protein F16P17.7 [imported] - thaliana >gi|8493580|gb|AAF75803.1|AC011000_6 Contains weak to leaf protein from Ipomea nil gb|D85101 and contains a RepB
MCYWGRAFSSGSGDYREILRNGLHSMKLDDAIGLFGGMVKSRPLPSIFEFNKLLSAIAKMKKFDLVISLGEKMQRLGISHNLYTYNILINCFCRRSQISLALALLGKMMKLGYEPSIVTLSSLLNGYCHGKRISDAVALVDQMVEMGYRPDTITFTTLIHGLFLHNKASEAVALVDRMVQRGCQPNLVTYGVVVNGLCKRGDIDLAFNLLNKMEAAKIEANVVIYSTVIDSLCKYRHEDDALNLFTEMENKGVRPNVITYSSLISCLCNYERWSDASRLLSDMIERKINPNVVTFNALIDAFVKEGKLVEAEKLYDEMIKRSIDPDIFTYSSLINGFCMHDRLDEAKHMFELMISKDCFPNVVTYNTLINGFCKAKRIDEGVELFREMSQRGLVGNTVTYTTLIHGFFQARDCDNAQMVFKQMVSDGVHPNIMTYNTLLDGLCKNGKLEKAMVVFEYLQRSKMEPTIYTYNIMIEGMCKAGKVEDGWDLFCSLSLKGVKPDVIIYNTMISGFCRKGLKEEADALFRKMREDGPLPDSGT

SEQ ID NO: 86022 - protein, 514 aa, Arabidopsis thaliana
  peptide (1)..(514): Ceres Seq. ID no. 12685325
  misc_feature (303)..(337): Pfam Name: PPR repeat Pfam Description: PPR repeat
  misc_feature (1)..(514): Homolog of NCBI NO: 15222409 NR Description: PPR-repeat protein; protein id: At1g63400.1
  misc_feature (1)..(514): Homolog of NCBI NO: 15221515 NR Description: putative membrane-associated salt-inducible (AL021637); similar to EST gb|AA728420; protein id: At1g62590.1
  misc_feature (1)..(514): Homolog of NCBI NO: 15221621 NR Description: unknown protein; protein id: At1g62910.1
  misc_feature (1)..(514): Homolog of NCBI NO: 25404377 NR Description: hypothetical protein F16P17.5 [imported] - thaliana >gi|8493578|gb|AAF75801.1|AC011000_4 Contains a RepB protein domain and multiple PPR PF|01535 repeats. [Arabidopsis
  misc_feature (1)..(514): Homolog of NCBI NO: 15221691 NR Description: unknown protein; protein id: At1g63130.1
  misc_feature (1)..(514): Homolog of NCBI NO: 22531122 NR Description: putative membrane-associated salt-inducible
  misc_feature (1)..(513): Homolog of NCBI NO: 15221549 NR Description: PPR-repeat protein; protein id: At1g62670.1
  misc_feature (1)..(514): Homolog of NCBI NO: 15221674 NR Description: unknown protein; protein id: At1g63080.1
  misc_feature (1)..(514): Homolog of NCBI NO: 15221635 NR Description: unknown protein; protein id: At1g62930.1
  misc_feature (1)..(514): Homolog of NCBI NO: 25404380 NR Description: hypothetical protein F16P17.7 [imported] - thaliana >gi|8493580|gb|AAF75803.1|AC011000_6 Contains weak to leaf protein from Ipomea nil gb|D85101 and contains a RepB
MKLDDAIGLFGGMVKSRPLPSIFEFNKLLSAIAKMKKFDLVISLGEKMQRLGISHNLYTYNILINCFCRRSQISLALALLGKMMKLGYEPSIVTLSSLLNGYCHGKRISDAVALVDQMVEMGYRPDTITFTTLIHGLFLHNKASEAVALVDRMVQRGCQPNLVTYGVVVNGLCKRGDIDLAFNLLNKMEAAKIEANVVIYSTVIDSLCKYRHEDDALNLFTEMENKGVRPNVITYSSLISCLCNYERWSDASRLLSDMIERKINPNVVTFNALIDAFVKEGKLVEAEKLYDEMIKRSIDPDIFTYSSLINGFCMHDRLDEAKHMFELMISKDCFPNVVTYNTLINGFCKAKRIDEGVELFREMSQRGLVGNTVTYTTLIHGFFQARDCDNAQMVFKQMVSDGVHPNIMTYNTLLDGLCKNGKLEKAMVVFEYLQRSKMEPTIYTYNIMIEGMCKAGKVEDGWDLFCSLSLKGVKPDVIIYNTMISGFCRKGLKEEADALFRKMREDGPLPDSGT

SEQ ID NO: 86023 - DNA, 1524 bp, Arabidopsis thaliana
  misc_feature (1)..(1524): Ceres Seq. ID no. 12685418
  misc_feature: MA Experiment ID: 20000355 Result: Up-regulated in Transcription
  misc_feature: MA Experiment 20000355 PARAMETER Experiment Name: At_Siliques_Sub_P Parameter: Age (day) Value: 21
  misc_feature: MA Experiment 20000355 PARAMETER Experiment Name: At_Siliques_Sub_P Parameter: Organism Value: A. thaliana
  misc_feature: MA Experiment 20000355 PARAMETER Experiment Name: At_Siliques_Sub_P Parameter: Plant Line Value: WS
  misc_feature: MA Experiment 20000355 PARAMETER Experiment Name: At_Siliques_Sub_P Parameter: Tissue Value: Less Than 5mm Siliques vs. Whole Plant
atgtcagaagaaataaacggaaaagttaaaaagatgatagctcgacgattcgcaatagtacgttactttcgttcaaggatgaatccaaagatgactatacaaaaactttgcacatcgtctaaaacagcagatctttctctccgaaagatggatccgaaccgaagaacgcaaaaattcagcaaaccacaagtcattgcaagtccctctctgcgagaagcaatgaagaagcgaaacgacgatttggtccttacggaacaaaaattaaaaggaagaaccaaaaacttagcacatcagaaatcgcagagcccttctctagcactcaacacgaagaaaaagcaaaagatggattctttgcaagaacttcttgacaagaagcaatacgacgaagaagcaaaacgtccatgtcaagaagcgatgaagaagcaaaacgacgttgctcttttccttgcgggggaagtaatctctgccgcagacaaaaactctaacgtcgtcttctctcctgcatctatcaactccgttctcaccatggccgctgctacctccgacagtgaagcactaaaatcttgcatcctctccttccttaggtcttcttccaccgacgagctcaacgacatcttccgcgaaatagcttccgtcgtcctcgtcgacggaagcaaaacaggtggccccaaaatcacggtggttaatggagtgtggagagagcaatcacttccgtgtagtcccgagtcgaaagatctctttgagaatttctacaagtctgctttcgctcaagttgatttccgatccaagtttgaagaagtgcgtgaggaggtgaattcttgggcattacgtcacaccaatggtatcatcaaagatcttctacctcctggatccgttacaagcgaaaccttgtggatttatggaaacgcattgtacttcaaaggagcctgggaagacaaattctataagtcaatgacgaaacacaaacctttctaccttgtcaatggcaaacaagtacatgtgccattcatgcaaagctcacaaagtcaatatgttaaggcttacgatggtttcaaggtccttagacaaccataccgacaaggcgttaatgatacaagtcgccaattctcaatgtgtacctatctcccggacgagaaagatggattggataatcttgtggagaaaatgacatctactgatggattcttggacagtcacattccgagttggagagttgaagttggtgaattcagaattccaaagtttaagattgaattcggttttgaagcttcaagcgttttcaatgactttgcgcttgatgtatcattataccaaaaagctatgattgagattgatgaagaaggtactgaagctgcggctgctactgctctagttggtgcttgtggctgcagcctttataggcctcctcctcccatagattttgtggcagatcatccattttttttctttattagagaagacaaaaccggaactgttttgttcgctggtcaaatcttcgatccttccttatcttcttctgcttaa

SEQ ID NO: 86024 - protein, 507 aa, Arabidopsis thaliana
  peptide (1)..(507): Ceres Seq. ID no. 12685419
  misc_feature (77)..(507): Homolog of NCBI NO: 6692102 NR Description: F22C12.21 [Arabidopsis thaliana]
  misc_feature (1)..(84): Homolog of NCBI NO: 6692102 NR Description: F22C12.21 [Arabidopsis thaliana]
  misc_feature (107)..(507): Homolog of NCBI NO: 15225956 NR Description: putative serpin; protein id: At2g14540.1, by cDNA: gi_18175862 [Arabidopsis thaliana]
  misc_feature (85)..(502): Homolog of NCBI NO: 15220721 NR Description: phloem serpin-1, putative; protein id:
  misc_feature (137)..(502): Homolog of NCBI NO: 25404364 NR Description: hypothetical protein F19K23.10 [imported] - thaliana >gi|2160141|gb|AAB60763.1| Strong similarity to Triticum
  misc_feature (136)..(502): Homolog of NCBI NO: 15222606 NR Description: hypothetical protein; protein id: At1g64030.1
  misc_feature (136)..(494): Homolog of NCBI NO: 25404920 NR Description: protein F22C12.22 [imported] - Arabidopsis >gi|6692103|gb|AAF24568.1|AC007764_10 F22C12.22 [Arabidopsis
  misc_feature (136)..(354): Homolog of NCBI NO: 7438226 NR Description: hypothetical protein T8F5.17 - Arabidopsis >gi|3335344|gb|AAC27146.1|AAC27146 Similar to serpin gene homolog
  misc_feature (390)..(502): Homolog of NCBI NO: 7438226 NR Description: hypothetical protein T8F5.17 - Arabidopsis >gi|3335344|gb|AAC27146.1|AAC27146 Similar to serpin gene homolog
  misc_feature (136)..(461): Homolog of NCBI NO: 15220298 NR Description: serpin, putative; protein id: At1g47710.1
MSEEINGKVKKMIARRFAIVRYFRSRMNPKMTIQKLCTSSKTADLSLRKMDPNRRTQKFSKPQVIASPSLREAMKKRNDDLVLTEQKLKGRTKNLAHQKSQSPSLALNTKKKQKMDSLQELLDKKQYDEEAKRPCQEAMKKQNDVALFLAGEVISAADKNSNVVFSPASINSVLTMAAATSDSEALKSCILSFLRSSSTDELNDIFREIASVVLVDGSKTGGPKITVVNGVWREQSLPCSPESKDLFENFYKSAFAQVDFRSKFEEVREEVNSWALRHTNGIIKDLLPPGSVTSETLWIYGNALYFKGAWEDKFYKSMTKHKPFYLVNGKQVHVPFMQSSQSQYVKAYDGFKVLRQPYRQGVNDTSRQFSMCTYLPDEKDGLDNLVEKMTSTDGFLDSHIPSWRVEVGEFRIPKFKIEFGFEASSVFNDFALDVSLYQKAMIEIDEEGTEAAAATALVGACGCSLYRPPPPIDFVADHPFFFFIREDKTGTVLFAGQIFDPSLSSSA

SEQ ID NO: 86025 - protein, 496 aa, Arabidopsis thaliana
  peptide (1)..(496): Ceres Seq. ID no. 12685420
  misc_feature (66)..(496): Homolog of NCBI NO: 6692102 NR Description: F22C12.21 [Arabidopsis thaliana]
  misc_feature (1)..(73): Homolog of NCBI NO: 6692102 NR Description: F22C12.21 [Arabidopsis thaliana]
  misc_feature (96)..(496): Homolog of NCBI NO: 15225956 NR Description: putative serpin; protein id: At2g14540.1, by cDNA: gi_18175862 [Arabidopsis thaliana]
  misc_feature (74)..(491): Homolog of NCBI NO: 15220721 NR Description: phloem serpin-1, putative; protein id:
  misc_feature (126)..(491): Homolog of NCBI NO: 25404364 NR Description: hypothetical protein F19K23.10 [imported] - thaliana >gi|2160141|gb|AAB60763.1| Strong similarity to Triticum
  misc_feature (125)..(491): Homolog of NCBI NO: 15222606 NR Description: hypothetical protein; protein id: At1g64030.1
  misc_feature (125)..(483): Homolog of NCBI NO: 25404920 NR Description: protein F22C12.22 [imported] - Arabidopsis >gi|6692103|gb|AAF24568.1|AC007764_10 F22C12.22 [Arabidopsis
  misc_feature (125)..(343): Homolog of NCBI NO: 7438226 NR Description: hypothetical protein T8F5.17 - Arabidopsis >gi|3335344|gb|AAC27146.1|AAC27146 Similar to serpin gene homolog
  misc_feature (379)..(491): Homolog of NCBI NO: 7438226 NR Description: hypothetical protein T8F5.17 - Arabidopsis >gi|3335344|gb|AAC27146.1|AAC27146 Similar to serpin gene homolog
  misc_feature (125)..(450): Homolog of NCBI NO: 15220298 NR Description: serpin, putative; protein id: At1g47710.1
MIARRFAIVRYFRSRMNPKMTIQKLCTSSKTADLSLRKMDPNRRTQKFSKPQVIASPSLREAMKKRNDDLVLTEQKLKGRTKNLAHQKSQSPSLALNTKKKQKMDSLQELLDKKQYDEEAKRPCQEAMKKQNDVALFLAGEVISAADKNSNVVFSPASINSVLTMAAATSDSEALKSCILSFLRSSSTDELNDIFREIASVVLVDGSKTGGPKITVVNGVWREQSLPCSPESKDLFENFYKSAFAQVDFRSKFEEVREEVNSWALRHTNGIIKDLLPPGSVTSETLWIYGNALYFKGAWEDKFYKSMTKHKPFYLVNGKQVHVPFMQSSQSQYVKAYDGFKVLRQPYRQGVNDTSRQFSMCTYLPDEKDGLDNLVEKMTSTDGFLDSHIPSWRVEVGEFRIPKFKIEFGFEASSVFNDFALDVSLYQKAMIEIDEEGTEAAAATALVGACGCSLYRPPPPIDFVADHPFFFFIREDKTGTVLFAGQIFDPSLSSSA

SEQ ID NO: 86026 - protein, 481 aa, Arabidopsis thaliana
  peptide (1)..(481): Ceres Seq. ID no. 12685421
  misc_feature (51)..(481): Homolog of NCBI NO: 6692102 NR Description: F22C12.21 [Arabidopsis thaliana]
  misc_feature (1)..(58): Homolog of NCBI NO: 6692102 NR Description: F22C12.21 [Arabidopsis thaliana]
  misc_feature (81)..(481): Homolog of NCBI NO: 15225956 NR Description: putative serpin; protein id: At2g14540.1, by cDNA: gi_18175862 [Arabidopsis thaliana]
  misc_feature (59)..(476): Homolog of NCBI NO: 15220721 NR Description: phloem serpin-1, putative; protein id:
  misc_feature (111)..(476): Homolog of NCBI NO: 25404364 NR Description: hypothetical protein F19K23.10 [imported] - thaliana >gi|2160141|gb|AAB60763.1| Strong similarity to Triticum
  misc_feature (110)..(476): Homolog of NCBI NO: 15222606 NR Description: hypothetical protein; protein id: At1g64030.1
  misc_feature (110)..(468): Homolog of NCBI NO: 25404920 NR Description: protein F22C12.22 [imported] - Arabidopsis >gi|6692103|gb|AAF24568.1|AC007764_10 F22C12.22 [Arabidopsis
  misc_feature (110)..(328): Homolog of NCBI NO: 7438226 NR Description: hypothetical protein T8F5.17 - Arabidopsis >gi|3335344|gb|AAC27146.1|AAC27146 Similar to serpin gene homolog
  misc_feature (364)..(476): Homolog of NCBI NO: 7438226 NR Description: hypothetical protein T8F5.17 - Arabidopsis >gi|3335344|gb|AAC27146.1|AAC27146 Similar to serpin gene homolog
  misc_feature (110)..(435): Homolog of NCBI NO: 15220298 NR Description: serpin, putative; protein id: At1g47710.1
MNPKMTIQKLCTSSKTADLSLRKMDPNRRTQKFSKPQVIASPSLREAMKKRNDDLVLTEQKLKGRTKNLAHQKSQSPSLALNTKKKQKMDSLQELLDKKQYDEEAKRPCQEAMKKQNDVALFLAGEVISAADKNSNVVFSPASINSVLTMAAATSDSEALKSCILSFLRSSSTDELNDIFREIASVVLVDGSKTGGPKITVVNGVWREQSLPCSPESKDLFENFYKSAFAQVDFRSKFEEVREEVNSWALRHTNGIIKDLLPPGSVTSETLWIYGNALYFKGAWEDKFYKSMTKHKPFYLVNGKQVHVPFMQSSQSQYVKAYDGFKVLRQPYRQGVNDTSRQFSMCTYLPDEKDGLDNLVEKMTSTDGFLDSHIPSWRVEVGEFRIPKFKIEFGFEASSVFNDFALDVSLYQKAMIEIDEEGTEAAAATALVGACGCSLYRPPPPIDFVADHPFFFFIREDKTGTVLFAGQIFDPSLSSSA

SEQ ID NO: 86027 - DNA, 3591 bp, Arabidopsis thaliana
  misc_feature (1)..(3591): Ceres Seq. ID no. 12685472
  misc_feature: MA Experiment ID: 20000355 Result: Up-regulated in Transcription
  misc_feature: MA Experiment 20000355 PARAMETER Experiment Name: At_Siliques_Sub_P Parameter: Age (day) Value: 21
  misc_feature: MA Experiment 20000355 PARAMETER Experiment Name: At_Siliques_Sub_P Parameter: Organism Value: A. thaliana
  misc_feature: MA Experiment 20000355 PARAMETER Experiment Name: At_Siliques_Sub_P Parameter: Plant Line Value: WS
  misc_feature: MA Experiment 20000355 PARAMETER Experiment Name: At_Siliques_Sub_P Parameter: Tissue Value: Less Than 5mm Siliques vs. Whole Plant
  misc_feature: MA Experiment ID: 20000440 Result: Up-regulated in Transcription
  misc_feature: MA Experiment 20000440 PARAMETER Experiment Name: At_Closed-Flower__Sub_P Parameter: Tissue Value: Closed Flower vs. Whole Plant
atggcctcgcagacgcagttacgtttgattatctatgagttcacgaggaaaattcaaacgagattgaatacccagaagctgcatagctttgttaccaagtccaaactcgcgcgcgacccatatttcgcgacgcaacttgccagattctatgcgttaaacgatgatcttatatctgctcgcaaactgttcgacgtatttcctgagagaagtgttttcctttggaactctattattcgagcttatgctaaagctcatcaatttactactgttttgtcactcttctctcaaatactgcgttctgatacaagacctgataacttcacctatgcgtgcttagctcgtggcttttcagagagttttgatacaaagggactgagatgtattcatgggattgcaattgtgtctggtcttggttttgatcaaatttgtggcagtgcaattgttaaagcttattcaaaagctggacttatcgttgaagcaagtaagttgttttgttcaataccagatccagatcttgctctttggaatgttatgattcttggatatggatgctgtggattttgggataaaggaatcaatttgtttaacttgatgcaacatcgaggacaccaacctaattgttatacaatggtagccctaacaagtggtttgattgatcctagtttgttactcgttgcttggtctgttcatgcattttgcttgaaaatcaatttagattctcattcttatgttggttgtgctttagtgaacatgtactcgagatgcatgtgcattgcttctgcttgtagtgtgtttaatagcatctctgagcctgatttagttgcgtgttcttctttgataactggttattcgagatgcgggaatcacaaggaggctttgcatctgtttgctgagctgagaatgagtggtaagaagccagattgtgttcttgtggcgattgtattggggtcttgtgctgagttatcggattcagtctccggaaaagaagtgcacagttatgttattcgactaggactagaacttgatataaaggtttgctctgctcttatagacatgtactcaaaatgtgggcttctaaaatgcgcgatgagtcttttcgcaggaattccagagaaaaacattgtttctttcaactcccttattttgggtcttggcttgcacggttttgcttccactgcgtttgaaaagttcactgagatccttgagatgggattgataccggacgagatcactttctctgctcttctttgtacttgttgccattcaggtcttttaaacaaaggtcaagagatctttgagaggatgaagagtgagtttggtattgagccgcaaacagagcattatgtttacatggttaagctaatgggaatggcaggaaaactagaagaagcatttgagtttgtaatgtcattacaaaaaccaattgattcaggaattttgggagcactattgtcatgttgcgaagttcatgagaacactcatttggctgaagttgtagcagagaatatacacaagaatggagaagagagaagaagtgtttacaaagtgatgctctctaatgtgtatgcaagatatgggagatgggatgaagtagaaaggcttagagatggaatatcagaaagctatggagggaaattgccaggcattagttgctttccaaggaaggcgaagaaacaactattcgatctcacacctgaggcgagaacgaggatcgtaagaatggagcgagcaaaaacagaagtggagaagaaagtttcaagacttttaaagttcatccaaaacaaaaacaggattccaagggattcaaagagagagcttctagggattgttaacgatcttcaagagcagtgtcagtctctctattctctatgtgataatttccaacaagatttagatccgaaaagtggtggcagaagaaaagggatatcacgtgttgcttcatcgagttcggatttggaatattactcttcagaggaaatagataatgttgttgaggaaggaaatgatatttgtgagcttcaaagcaagattgaggcattgaggaatgaggctgaagagaaacaacgagaattgactttgcgtgtgaaggagctagaacgagagctaggtaatgcaaaagctgagtgtgatcggaaaggaaatttagaagaagagattgcgatgaaagctactgaaagtaagcaattaggagagaagaacaaagggctaagatctcagatctccggtttggaatcggttttgaaagagaaaggggatgagatctcaacacttgtgaacaagtttgggaatagtgagttgggtttaacatcaagaatcgaagatttgaaatgccaactaaaaaatttagaacaagaaatcggtttccttcgtgctcgaaatgcgggtttggctggaaatttagaagttacgaaagttgaagagaaagaacgcgttaagggattaatggatcaggtaaatggtatgaaacatgagcttgaatcattgcggagccagaaagacgaatctgaagcaaagttggagaagaaagtagaagaagttacagagacgaagatgcaattgaaaagtctgaaagaagaaacagaggaagagaggaatagactgagtgaagagattgaccaacttaaaggagaaaatcagatgctgcatagaagaatctcagagcttgattcattacatatggagatgaagacgaagagcgctcatgaaatggaagatgcgagcaagaaattggacactgaagtttctgatcagaagaaattggtcaaggaacaagatgatataattcgcaggctatcggcaaaaatcaaggatcagcagaggcttctcaaagaacaaaaagacaccatagacaagttcgctgaagatcagaagcaatcgaaacgttggtcatttggttcgagcagggatttgaaactgaatccaaatgcgttagagaggaaaatggaagaattagctgaagatttccggatgaagatagaagatcatattaggatactatacaggaggatccatgtagctgaacaaatacacttagagagcaagaacgagtatatcaaaacacgagacatgcttaaagaaaacaaggaaaacagagaaagtttgatgtttttcgaaacccaattcaataaaatgaaagacgcattggaaaaagggtacacaggatccgaaaccgcgatgaagaaactagaagaagcagaggaagtcacgaaccgagttgctagaatagggaaagagatggagtcagcgaagctttgggtgagtgagaagaagagcgaagtagagactctaaccgcaaagctagaatgcagcgaagctcaagagacattgttgaaggagaagttatcaaagctagagaagaagcttgcggaagaaggaacagagaaactgaaactagcaaaggttttgagcaaatttgaaacgagaataaaagagctagaggtgaaggtgaagggaagagaagtagaattgttgagtttaggagaagagaagagagaagccataagacaactctgtattcttgttgattatcatcaagatcgatacaatcaactcaagaaatcaatcttaaaggttgatgatcttaaaacctaa

SEQ ID NO: 86028 - protein, 1196 aa, Arabidopsis thaliana
  peptide (1)..(1196): Ceres Seq. ID no. 12685473
  misc_feature (501)..(1159): Pfam Name: Myosin tail Pfam Description: Myosin tail
  misc_feature (1)..(552): Homolog of NCBI NO: 15222662 NR Description: hypothetical protein; protein id: At1g64310.1
  misc_feature (721)..(1196): Homolog of NCBI NO: 15222664 NR Description: bZIP transcription factor, putative; protein id: [Arabidopsis thaliana] >gi|25404470|pir||B96667 hypothetical
  misc_feature (672)..(1191): Homolog of NCBI NO: 15238179 NR Description: putative protein; protein id: At5g41780.1 thaliana] >gi|10177362|dbj|BAB10653.1|
  misc_feature (102)..(550): Homolog of NCBI NO: 34913768 NR Description: OSJNBa0051H17.34 [Oryza sativa (japonica
  misc_feature (27)..(622): Homolog of NCBI NO: 34897884 NR Description: Similar to Arabidopsis thaliana DNA chromosome 4,
  misc_feature (25)..(591): Homolog of NCBI NO: 15234006 NR Description: putative protein; protein id: At4g18750.1
  misc_feature (27)..(543): Homolog of NCBI NO: 38567725 NR Description: B1358B12.23 [Oryza sativa (japonica
  misc_feature (27)..(543): Homolog of NCBI NO: 38347057 NR Description: OSJNBa0060P14.4 [Oryza sativa (japonica
  misc_feature (17)..(561): Homolog of NCBI NO: 15233590 NR Description: putative protein; protein id: At4g21300.1
  misc_feature (39)..(550): Homolog of NCBI NO: 39546235 NR Description: OSJNBa0089N06.5 [Oryza sativa (japonica
MASQTQLRLIIYEFTRKIQTRLNTQKLHSFVTKSKLARDPYFATQLARFYALNDDLISARKLFDVFPERSVFLWNSIIRAYAKAHQFTTVLSLFSQILRSDTRPDNFTYACLARGFSESFDTKGLRCIHGIAIVSGLGFDQICGSAIVKAYSKAGLIVEASKLFCSIPDPDLALWNVMILGYGCCGFWDKGINLFNLMQHRGHQPNCYTMVALTSGLIDPSLLLVAWSVHAFCLKINLDSHSYVGCALVNMYSRCMCIASACSVFNSISEPDLVACSSLITGYSRCGNHKEALHLFAELRMSGKKPDCVLVAIVLGSCAELSDSVSGKEVHSYVIRLGLELDIKVCSALIDMYSKCGLLKCAMSLFAGIPEKNIVSFNSLILGLGLHGFASTAFEKFTEILEMGLIPDEITFSALLCTCCHSGLLNKGQEIFERMKSEFGIEPQTEHYVYMVKLMGMAGKLEEAFEFVMSLQKPIDSGILGALLSCCEVHENTHLAEVVAENIHKNGEERRSVYKVMLSNVYARYGRWDEVERLRDGISESYGGKLPGISCFPRKAKKQLFDLTPEARTRIVRMERAKTEVEKKVSRLLKFIQNKNRIPRDSKRELLGIVNDLQEQCQSLYSLCDNFQQDLDPKSGGRRKGISRVASSSSDLEYYSSEEIDNVVEEGNDICELQSKIEALRNEAEEKQRELTLRVKELERELGNAKAECDRKGNLEEEIAMKATESKQLGEKNKGLRSQISGLESVLKEKGDEISTLVNKFGNSELGLTSRIEDLKCQLKNLEQEIGFLRARNAGLAGNLEVTKVEEKERVKGLMDQVNGMKHELESLRSQKDESEAKLEKKVEEVTETKMQLKSLKEETEEERNRLSEEIDQLKGENQMLHRRISELDSLHMEMKTKSAHEMEDASKKLDTEVSDQKKLVKEQDDIIRRLSAKIKDQQRLLKEQKDTIDKFAEDQKQSKRWSFGSSRDLKLNPNALERKMEELAEDFRMKIEDHIRILYRRIHVAEQIHLESKNEYIKTRDMLKENKENRESLMFFETQFNKMKDALEKGYTGSETAMKKLEEAEEVTNRVARIGKEMESAKLWVSEKKSEVETLTAKLECSEAQETLLKEKLSKLEKKLAEEGTEKLKLAKVLSKFETRIKELEVKVKGREVELLSLGEEKREAIRQLCILVDYHQDRYNQLKKSILKVDDLKT

SEQ ID NO: 86029 - protein, 1019 aa, Arabidopsis thaliana
  peptide (1)..(1019): Ceres Seq. ID no. 12685474
  misc_feature (324)..(982): Pfam Name: Myosin tail Pfam Description: Myosin tail
  misc_feature (1)..(375): Homolog of NCBI NO: 15222662 NR Description: hypothetical protein; protein id: At1g64310.1
  misc_feature (544)..(1019): Homolog of NCBI NO: 15222664 NR Description: bZIP transcription factor, putative; protein id: [Arabidopsis thaliana] >gi|25404470|pir||B96667 hypothetical
  misc_feature (495)..(1014): Homolog of NCBI NO: 15238179 NR Description: putative protein; protein id: At5g41780.1 thaliana] >gi|10177362|dbj|BAB10653.1|
  misc_feature (1)..(373): Homolog of NCBI NO: 34913768 NR Description: OSJNBa0051H17.34 [Oryza sativa (japonica
  misc_feature (1)..(445): Homolog of NCBI NO: 34897884 NR Description: Similar to Arabidopsis thaliana DNA chromosome 4,
  misc_feature (1)..(414): Homolog of NCBI NO: 15234006 NR Description: putative protein; protein id: At4g18750.1
  misc_feature (1)..(366): Homolog of NCBI NO: 38567725 NR Description: B1358B12.23 [Oryza sativa (japonica
  misc_feature (1)..(366): Homolog of NCBI NO: 38347057 NR Description: OSJNBa0060P14.4 [Oryza sativa (japonica
  misc_feature (1)..(384): Homolog of NCBI NO: 15233590 NR Description: putative protein; protein id: At4g21300.1
  misc_feature (1)..(373): Homolog of NCBI NO: 39546235 NR Description: OSJNBa0089N06.5 [Oryza sativa (japonica
MILGYGCCGFWDKGINLFNLMQHRGHQPNCYTMVALTSGLIDPSLLLVAWSVHAFCLKINLDSHSYVGCALVNMYSRCMCIASACSVFNSISEPDLVACSSLITGYSRCGNHKEALHLFAELRMSGKKPDCVLVAIVLGSCAELSDSVSGKEVHSYVIRLGLELDIKVCSALIDMYSKCGLLKCAMSLFAGIPEKNIVSFNSLILGLGLHGFASTAFEKFTEILEMGLIPDEITFSALLCTCCHSGLLNKGQEIFERMKSEFGIEPQTEHYVYMVKLMGMAGKLEEAFEFVMSLQKPIDSGILGALLSCCEVHENTHLAEVVAENIHKNGEERRSVYKVMLSNVYARYGRWDEVERLRDGISESYGGKLPGISCFPRKAKKQLFDLTPEARTRIVRMERAKTEVEKKVSRLLKFIQNKNRIPRDSKRELLGIVNDLQEQCQSLYSLCDNFQQDLDPKSGGRRKGISRVASSSSDLEYYSSEEIDNVVEEGNDICELQSKIEALRNEAEEKQRELTLRVKELERELGNAKAECDRKGNLEEEIAMKATESKQLGEKNKGLRSQISGLESVLKEKGDEISTLVNKFGNSELGLTSRIEDLKCQLKNLEQEIGFLRARNAGLAGNLEVTKVEEKERVKGLMDQVNGMKHELESLRSQKDESEAKLEKKVEEVTETKMQLKSLKEETEEERNRLSEEIDQLKGENQMLHRRISELDSLHMEMKTKSAHEMEDASKKLDTEVSDQKKLVKEQDDIIRRLSAKIKDQQRLLKEQKDTIDKFAEDQKQSKRWSFGSSRDLKLNPNALERKMEELAEDFRMKIEDHIRILYRRIHVAEQIHLESKNEYIKTRDMLKENKENRESLMFFETQFNKMKDALEKGYTGSETAMKKLEEAEEVTNRVARIGKEMESAKLWVSEKKSEVETLTAKLECSEAQETLLKEKLSKLEKKLAEEGTEKLKLAKVLSKFETRIKELEVKVKGREVELLSLGEEKREAIRQLCILVDYHQDRYNQLKKSILKVDDLKT

SEQ ID NO: 86030 - protein, 999 aa, Arabidopsis thaliana
  peptide (1)..(999): Ceres Seq. ID no. 12685475
  misc_feature (304)..(962): Pfam Name: Myosin tail Pfam Description: Myosin tail
  misc_feature (1)..(355): Homolog of NCBI NO: 15222662 NR Description: hypothetical protein; protein id: At1g64310.1
  misc_feature (524)..(999): Homolog of NCBI NO: 15222664 NR Description: bZIP transcription factor, putative; protein id: [Arabidopsis thaliana] >gi|25404470|pir||B96667 hypothetical
  misc_feature (475)..(994): Homolog of NCBI NO: 15238179 NR Description: putative protein; protein id: At5g41780.1 thaliana] >gi|10177362|dbj|BAB10653.1|
  misc_feature (1)..(353): Homolog of NCBI NO: 34913768 NR Description: OSJNBa0051H17.34 [Oryza sativa (japonica
  misc_feature (1)..(425): Homolog of NCBI NO: 34897884 NR Description: Similar to Arabidopsis thaliana DNA chromosome 4,
  misc_feature (1)..(394): Homolog of NCBI NO: 15234006 NR Description: putative protein; protein id: At4g18750.1
  misc_feature (1)..(346): Homolog of NCBI NO: 38567725 NR Description: B1358B12.23 [Oryza sativa (japonica
  misc_feature (1)..(346): Homolog of NCBI NO: 38347057 NR Description: OSJNBa0060P14.4 [Oryza sativa (japonica
  misc_feature (1)..(364): Homolog of NCBI NO: 15233590 NR Description: putative protein; protein id: At4g21300.1
  misc_feature (1)..(353): Homolog of NCBI NO: 39546235 NR Description: OSJNBa0089N06.5 [Oryza sativa (japonica
MQHRGHQPNCYTMVALTSGLIDPSLLLVAWSVHAFCLKINLDSHSYVGCALVNMYSRCMCIASACSVFNSISEPDLVACSSLITGYSRCGNHKEALHLFAELRMSGKKPDCVLVAIVLGSCAELSDSVSGKEVHSYVIRLGLELDIKVCSALIDMYSKCGLLKCAMSLFAGIPEKNIVSFNSLILGLGLHGFASTAFEKFTEILEMGLIPDEITFSALLCTCCHSGLLNKGQEIFERMKSEFGIEPQTEHYVYMVKLMGMAGKLEEAFEFVMSLQKPIDSGILGALLSCCEVHENTHLAEVVAENIHKNGEERRSVYKVMLSNVYARYGRWDEVERLRDGISESYGGKLPGISCFPRKAKKQLFDLTPEARTRIVRMERAKTEVEKKVSRLLKFIQNKNRIPRDSKRELLGIVNDLQEQCQSLYSLCDNFQQDLDPKSGGRRKGISRVASSSSDLEYYSSEEIDNVVEEGNDICELQSKIEALRNEAEEKQRELTLRVKELERELGNAKAECDRKGNLEEEIAMKATESKQLGEKNKGLRSQISGLESVLKEKGDEISTLVNKFGNSELGLTSRIEDLKCQLKNLEQEIGFLRARNAGLAGNLEVTKVEEKERVKGLMDQVNGMKHELESLRSQKDESEAKLEKKVEEVTETKMQLKSLKEETEEERNRLSEEIDQLKGENQMLHRRISELDSLHMEMKTKSAHEMEDASKKLDTEVSDQKKLVKEQDDIIRRLSAKIKDQQRLLKEQKDTIDKFAEDQKQSKRWSFGSSRDLKLNPNALERKMEELAEDFRMKIEDHIRILYRRIHVAEQIHLESKNEYIKTRDMLKENKENRESLMFFETQFNKMKDALEKGYTGSETAMKKLEEAEEVTNRVARIGKEMESAKLWVSEKKSEVETLTAKLECSEAQETLLKEKLSKLEKKLAEEGTEKLKLAKVLSKFETRIKELEVKVKGREVELLSLGEEKREAIRQLCILVDYHQDRYNQLKKSILKVDDLKT

SEQ ID NO: 86031 - DNA, 989 bp, Arabidopsis thaliana
  misc_feature (1)..(989): Ceres Seq. ID no. 12685603
  misc_feature: MA Experiment ID: 108434 Result: Down-regulated in Transcription
  misc_feature: MA Experiment 108434 PARAMETER Experiment Name: At_Root_Tips_cDNA_P Parameter: Tissue Value: Root Tips
  misc_feature: MA Experiment ID: 108462 Result: Up-regulated in Transcription
  misc_feature: MA Experiment 108462 PARAMETER Experiment Name: At_Germinating_Seeds_cDNA_P Parameter: Age (day) Value: 2 vs. 0
  misc_feature: MA Experiment 108462 PARAMETER Experiment Name: At_Germinating_Seeds_cDNA_P Parameter: Tissue Value: Germinating Seeds
  misc_feature: MA Experiment ID: 108463 Result: Up-regulated in Transcription
  misc_feature: MA Experiment 108463 PARAMETER Experiment Name: At_Germinating_Seeds_cDNA_P Parameter: Age (day) Value: 3 vs. 0
  misc_feature: MA Experiment 108463 PARAMETER Experiment Name: At_Germinating_Seeds_cDNA_P Parameter: Tissue Value: Germinating Seeds
  misc_feature: MA Experiment ID: 108464 Result: Up-regulated in Transcription
  misc_feature: MA Experiment 108464 PARAMETER Experiment Name: At_Germinating_Seeds_cDNA_P Parameter: Age (day) Value: 4 vs. 0
  misc_feature: MA Experiment 108464 PARAMETER Experiment Name: At_Germinating_Seeds_cDNA_P Parameter: Tissue Value: Germinating Seeds
  misc_feature: MA Experiment ID: 108473 Result: Up-regulated in Transcription
  misc_feature: MA Experiment 108473 PARAMETER Experiment Name: At_Drought_Flowers_cDNA_P Parameter: Timepoint (hr) Value: 7 d
  misc_feature: MA Experiment 108473 PARAMETER Experiment Name: At_Drought_Flowers_cDNA_P Parameter: Tissue Value: Flower
  misc_feature: MA Experiment 108473 PARAMETER Experiment Name: At_Drought_Flowers_cDNA_P Parameter: Treatment Value: Drought vs. No Drought
  misc_feature: MA Experiment ID: 108488 Result: Down-regulated in Transcription
  misc_feature: MA Experiment ID: 108561 Result: Up-regulated in Transcription
  misc_feature: MA Experiment 108561 PARAMETER Experiment Name: At_100uM_ABA_cDNA_P Parameter: Timepoint (hr) Value: 6
  misc_feature: MA Experiment 108561 PARAMETER Experiment Name: At_100uM_ABA_cDNA_P Parameter: Tissue Value: Aerial
  misc_feature: MA Experiment 108561 PARAMETER Experiment Name: At_100uM_ABA_cDNA_P Parameter: Treatment Value: 100uM ABA vs. No Treatment
  misc_feature: MA Experiment ID: 108573 Result: Up-regulated in Transcription
  misc_feature: MA Experiment 108573 PARAMETER Experiment Name: At_Drought_cDNA_P Parameter: Timepoint (hr) Value: 6
  misc_feature: MA Experiment 108573 PARAMETER Experiment Name: At_Drought_cDNA_P Parameter: Tissue Value: Aerial
  misc_feature: MA Experiment 108573 PARAMETER Experiment Name: At_Drought_cDNA_P Parameter: Treatment Value: Drought vs. No Drought
  misc_feature: MA Experiment ID: 108574 Result: Up-regulated in Transcription
  misc_feature: MA Experiment 108574 PARAMETER Experiment Name: At_Wounding__cDNA_P Parameter: Timepoint (hr) Value: 1
  misc_feature: MA Experiment 108574 PARAMETER Experiment Name: At_Wounding__cDNA_P Parameter: Tissue Value: Aerial
  misc_feature: MA Experiment 108574 PARAMETER Experiment Name: At_Wounding__cDNA_P Parameter: Treatment Value: Wounding vs. No Wounding
  misc_feature: MA Experiment ID: 108577 Result: Down-regulated in Transcription
  misc_feature: MA Experiment 108577 PARAMETER Experiment Name: At_42deg_Heat_cDNA_P Parameter: Temperature (deg C) Value: 42 vs. 22
  misc_feature: MA Experiment 108577 PARAMETER Experiment Name: At_42deg_Heat_cDNA_P Parameter: Timepoint (hr) Value: 6
  misc_feature: MA Experiment 108577 PARAMETER Experiment Name: At_42deg_Heat_cDNA_P Parameter: Tissue Value: Aerial
  misc_feature: MA Experiment ID: 108579 Result: Up-regulated in Transcription
  misc_feature: MA Experiment 108579 PARAMETER Experiment Name: At_4deg_Cold_cDNA_P Parameter: Temperature (deg C) Value: 4 vs. 22
  misc_feature: MA Experiment 108579 PARAMETER Experiment Name: At_4deg_Cold_cDNA_P Parameter: Timepoint (hr) Value: 6
  misc_feature: MA Experiment 108579 PARAMETER Experiment Name: At_4deg_Cold_cDNA_P Parameter: Tissue Value: Aerial
  misc_feature: MA Experiment ID: 108594 Result: Up-regulated in Transcription
  misc_feature: MA Experiment 108594 PARAMETER Experiment Name: At_Ler-rhl_Root_cDNA_P Parameter: Plant Line Value: null
  misc_feature: MA Experiment ID: 108595 Result: Up-regulated in Transcription
  misc_feature: MA Experiment 108595 PARAMETER Experiment Name: At_Ler-pi_Ovule_cDNA_P Parameter: Plant Line Value: null
  misc_feature: MA Experiment ID: 108605 Result: Up-regulated in Transcription
  misc_feature: MA Experiment 108605 PARAMETER Experiment Name: At_100uM_ABA_cDNA_P Parameter: Timepoint (hr) Value: 6
  misc_feature: MA Experiment 108605 PARAMETER Experiment Name: At_100uM_ABA_cDNA_P Parameter: Tissue Value: Aerial
  misc_feature: MA Experiment 108605 PARAMETER Experiment Name: At_100uM_ABA_cDNA_P Parameter: Treatment Value: 100uM ABA vs. No Treatment
  misc_feature: MA Experiment ID: 108607 Result: Up-regulated in Transcription
  misc_feature: MA Experiment 108607 PARAMETER Experiment Name: At_100uM_ABA_cDNA_P Parameter: Timepoint (hr) Value: 4
  misc_feature: MA Experiment 108607 PARAMETER Experiment Name: At_100uM_ABA_cDNA_P Parameter: Tissue Value: Aerial
  misc_feature: MA Experiment 108607 PARAMETER Experiment Name: At_100uM_ABA_cDNA_P Parameter: Treatment Value: 100uM ABA vs. No Treatment
  misc_feature: MA Experiment ID: 108608 Result: Up-regulated in Transcription
  misc_feature: MA Experiment 108608 PARAMETER Experiment Name: At_100uM_ABA_cDNA_P Parameter: Timepoint (hr) Value: 1
  misc_feature: MA Experiment 108608 PARAMETER Experiment Name: At_100uM_ABA_cDNA_P Parameter: Tissue Value: Aerial
  misc_feature: MA Experiment 108608 PARAMETER Experiment Name: At_100uM_ABA_cDNA_P Parameter: Treatment Value: 100uM ABA vs. No Treatment
  misc_feature: MA Experiment ID: 108609 Result: Up-regulated in Transcription
  misc_feature: MA Experiment 108609 PARAMETER Experiment Name: At_100uM_ABA_cDNA_P Parameter: Timepoint (hr) Value: 24
  misc_feature: MA Experiment 108609 PARAMETER Experiment Name: At_100uM_ABA_cDNA_P Parameter: Tissue Value: Aerial
  misc_feature: MA Experiment 108609 PARAMETER Experiment Name: At_100uM_ABA_cDNA_P Parameter: Treatment Value: 100uM ABA vs. No Treatment
  misc_feature: MA Experiment ID: 108667 Result: Up-regulated in Transcription
  misc_feature: MA Experiment 108667 PARAMETER Experiment Name: At_2mM_SA_cDNA_P Parameter: Plant Line Value: WS
  misc_feature: MA Experiment 108667 PARAMETER Experiment Name: At_2mM_SA_cDNA_P Parameter: Timepoint (hr) Value: 1
  misc_feature: MA Experiment 108667 PARAMETER Experiment Name: At_2mM_SA_cDNA_P Parameter: Treatment Value: 2mM SA vs. No Treatment
  misc_feature: MA Experiment ID: 20000069 Result: Up-regulated in Transcription
  misc_feature: MA Experiment 20000069 PARAMETER Experiment Name: At_100uM_ABA_Mutants_cDNA_P Parameter: Plant Line Value: CS23
  misc_feature: MA Experiment 20000069 PARAMETER Experiment Name: At_100uM_ABA_Mutants_cDNA_P Parameter: Timepoint (hr) Value: 6
  misc_feature: MA Experiment 20000069 PARAMETER Experiment Name: At_100uM_ABA_Mutants_cDNA_P Parameter: Tissue Value: Aerial
  misc_feature: MA Experiment 20000069 PARAMETER Experiment Name: At_100uM_ABA_Mutants_cDNA_P Parameter: Treatment Value: 100uM ABA vs. No Treatment
  misc_feature: MA Experiment ID: 20000070 Result: Up-regulated in Transcription
  misc_feature: MA Experiment 20000070 PARAMETER Experiment Name: At_100uM_ABA_Mutants_cDNA_P Parameter: Plant Line Value: CS24
  misc_feature: MA Experiment 20000070 PARAMETER Experiment Name: At_100uM_ABA_Mutants_cDNA_P Parameter: Timepoint (hr) Value: 6
  misc_feature: MA Experiment 20000070 PARAMETER Experiment Name: At_100uM_ABA_Mutants_cDNA_P Parameter: Tissue Value: Aerial
  misc_feature: MA Experiment 20000070 PARAMETER Experiment Name: At_100uM_ABA_Mutants_cDNA_P Parameter: Treatment Value: 100uM ABA vs. No Treatment
  misc_feature: MA Experiment ID: 20000071 Result: Up-regulated in Transcription
  misc_feature: MA Experiment 20000071 PARAMETER Experiment Name: At_100uM_ABA_Mutants_cDNA_P Parameter: Plant Line Value: CS8104
  misc_feature: MA Experiment 20000071 PARAMETER Experiment Name: At_100uM_ABA_Mutants_cDNA_P Parameter: Timepoint (hr) Value: 6
  misc_feature: MA Experiment 20000071 PARAMETER Experiment Name: At_100uM_ABA_Mutants_cDNA_P Parameter: Tissue Value: Aerial
  misc_feature: MA Experiment 20000071 PARAMETER Experiment Name: At_100uM_ABA_Mutants_cDNA_P Parameter: Treatment Value: 100uM ABA vs. No Treatment
  misc_feature: MA Experiment ID: 20000072 Result: Up-regulated in Transcription
  misc_feature: MA Experiment 20000072 PARAMETER Experiment Name: At_100uM_ABA_Mutants_cDNA_P Parameter: Plant Line Value: CS8105
  misc_feature: MA Experiment 20000072 PARAMETER Experiment Name: At_100uM_ABA_Mutants_cDNA_P Parameter: Timepoint (hr) Value: 6
  misc_feature: MA Experiment 20000072 PARAMETER Experiment Name: At_100uM_ABA_Mutants_cDNA_P Parameter: Tissue Value: Aerial
  misc_feature: MA Experiment 20000072 PARAMETER Experiment Name: At_100uM_ABA_Mutants_cDNA_P Parameter: Treatment Value: 100uM ABA vs. No Treatment
  misc_feature: MA Experiment ID: 20000086 Result: Up-regulated in Transcription
  misc_feature: MA Experiment 20000086 PARAMETER Experiment Name: At_100uM_ABA_Mutants_cDNA_P Parameter: Plant Line Value: CS22
  misc_feature: MA Experiment 20000086 PARAMETER Experiment Name: At_100uM_ABA_Mutants_cDNA_P Parameter: Timepoint (hr) Value: 6
  misc_feature: MA Experiment 20000086 PARAMETER Experiment Name: At_100uM_ABA_Mutants_cDNA_P Parameter: Tissue Value: Aerial
  misc_feature: MA Experiment 20000086 PARAMETER Experiment Name: At_100uM_ABA_Mutants_cDNA_P Parameter: Treatment Value: 100uM ABA vs. No Treatment
  misc_feature: MA Experiment ID: 20000087 Result: Up-regulated in Transcription
  misc_feature: MA Experiment 20000087 PARAMETER Experiment Name: At_100uM_ABA_Mutants_cDNA_P Parameter: Plant Line Value: WS
  misc_feature: MA Experiment 20000087 PARAMETER Experiment Name: At_100uM_ABA_Mutants_cDNA_P Parameter: Timepoint (hr) Value: 6
  misc_feature: MA Experiment 20000087 PARAMETER Experiment Name: At_100uM_ABA_Mutants_cDNA_P Parameter: Tissue Value: Aerial
  misc_feature: MA Experiment 20000087 PARAMETER Experiment Name: At_100uM_ABA_Mutants_cDNA_P Parameter: Treatment Value: 100uM ABA vs. No Treatment
  misc_feature: MA Experiment ID: 20000088 Result: Up-regulated in Transcription
  misc_feature: MA Experiment 20000088 PARAMETER Experiment Name: At_100uM_ABA_Mutants_cDNA_P Parameter: Plant Line Value: Landsberg
  misc_feature: MA Experiment 20000088 PARAMETER Experiment Name: At_100uM_ABA_Mutants_cDNA_P Parameter: Timepoint (hr) Value: 6
  misc_feature: MA Experiment 20000088 PARAMETER Experiment Name: At_100uM_ABA_Mutants_cDNA_P Parameter: Tissue Value: Aerial
  misc_feature: MA Experiment 20000088 PARAMETER Experiment Name: At_100uM_ABA_Mutants_cDNA_P Parameter: Treatment Value: 100uM ABA vs. No Treatment
  misc_feature: MA Experiment ID: 20000117 Result: Up-regulated in Transcription
  misc_feature: MA Experiment 20000117 PARAMETER Experiment Name: At_100uM_ABA_Mutants_cDNA_P Parameter: Plant Line Value: Columbia
  misc_feature: MA Experiment 20000117 PARAMETER Experiment Name: At_100uM_ABA_Mutants_cDNA_P Parameter: Timepoint (hr) Value: 6
  misc_feature: MA Experiment 20000117 PARAMETER Experiment Name: At_100uM_ABA_Mutants_cDNA_P Parameter: Tissue Value: Aerial
  misc_feature: MA Experiment 20000117 PARAMETER Experiment Name: At_100uM_ABA_Mutants_cDNA_P Parameter: Treatment Value: 100uM ABA vs. No Treatment
  misc_feature: MA Experiment ID: 20000166 Result: Up-regulated in Transcription
  misc_feature: MA Experiment 20000166 PARAMETER Experiment Name: At_100uM_ABA_P Parameter: Age (day) Value: 14
  misc_feature: MA Experiment 20000166 PARAMETER Experiment Name: At_100uM_ABA_P Parameter: Organism Value: A. thaliana
  misc_feature: MA Experiment 20000166 PARAMETER Experiment Name: At_100uM_ABA_P Parameter: Plant Line Value: WS
  misc_feature: MA Experiment 20000166 PARAMETER Experiment Name: At_100uM_ABA_P Parameter: Timepoint (hr) Value: 1
  misc_feature: MA Experiment 20000166 PARAMETER Experiment Name: At_100uM_ABA_P Parameter: Tissue Value: Aerial
  misc_feature: MA Experiment 20000166 PARAMETER Experiment Name: At_100uM_ABA_P Parameter: Treatment Value: 100uM ABA vs. No Treatment
  misc_feature: MA Experiment ID: 20000169 Result: Up-regulated in Transcription
  misc_feature: MA Experiment 20000169 PARAMETER Experiment Name: At_100uM_ABA_P Parameter: Age (day) Value: 14
  misc_feature: MA Experiment 20000169 PARAMETER Experiment Name: At_100uM_ABA_P Parameter: Organism Value: A. thaliana
  misc_feature: MA Experiment 20000169 PARAMETER Experiment Name: At_100uM_ABA_P Parameter: Plant Line Value: WS
  misc_feature: MA Experiment 20000169 PARAMETER Experiment Name: At_100uM_ABA_P Parameter: Timepoint (hr) Value: 6
  misc_feature: MA Experiment 20000169 PARAMETER Experiment Name: At_100uM_ABA_P Parameter: Tissue Value: Aerial
  misc_feature: MA Experiment 20000169 PARAMETER Experiment Name: At_100uM_ABA_P Parameter: Treatment Value: 100uM ABA vs. No Treatment
  misc_feature: MA Experiment ID: 20000179 Result: Up-regulated in Transcription
  misc_feature: MA Experiment 20000179 PARAMETER Experiment Name: At_Germinating_Seeds_P Parameter: Age (hr) Value: 6 vs. 0
  misc_feature: MA Experiment 20000179 PARAMETER Experiment Name: At_Germinating_Seeds_P Parameter: Tissue Value: Germinating Seeds
  misc_feature: MA Experiment ID: 20000184 Result: Down-regulated in Transcription
  misc_feature: MA Experiment 20000184 PARAMETER Experiment Name: At_Shoots__P Parameter: Age (day) Value: 7
  misc_feature: MA Experiment 20000184 PARAMETER Experiment Name: At_Shoots__P Parameter: Tissue Value: Shoots vs. Whole Plant
  misc_feature: MA Experiment ID: 20000185 Result: Down-regulated in Transcription
  misc_feature: MA Experiment 20000185 PARAMETER Experiment Name: At_Roots__P Parameter: Age (day) Value: 7 vs. 21
  misc_feature: MA Experiment 20000185 PARAMETER Experiment Name: At_Roots__P Parameter: Organism Value: A. thaliana
  misc_feature: MA Experiment 20000185 PARAMETER Experiment Name: At_Roots__P Parameter: Tissue Value: Roots vs. Whole Plant
  misc_feature: MA Experiment ID: 20000213 Result: Up-regulated in Transcription
  misc_feature: MA Experiment 20000213 PARAMETER Experiment Name: At_4deg_Cold_P Parameter: Timepoint (hr) Value: 2
  misc_feature: MA Experiment ID: 20000265 Result: Down-regulated in Transcription
  misc_feature: MA Experiment 20000265 PARAMETER Experiment Name: At_Open_Flower_P Parameter: Age (day) Value: 21
  misc_feature: MA Experiment 20000265 PARAMETER Experiment Name: At_Open_Flower_P Parameter: Plant Line Value: WS
  misc_feature: MA Experiment 20000265 PARAMETER Experiment Name: At_Open_Flower_P Parameter: Tissue Value: Closed Flower vs. Whole Plant
  misc_feature: MA Experiment ID: 20000268 Result: Down-regulated in Transcription
  misc_feature: MA Experiment 20000268 PARAMETER Experiment Name: At_100mM_NaCl__P Parameter: Age (day) Value: 14
  misc_feature: MA Experiment 20000268 PARAMETER Experiment Name: At_100mM_NaCl__P Parameter: Organism Value: A. thaliana
  misc_feature: MA Experiment 20000268 PARAMETER Experiment Name: At_100mM_NaCl__P Parameter: Plant Line Value: WS
  misc_feature: MA Experiment 20000268 PARAMETER Experiment Name: At_100mM_NaCl__P Parameter: Timepoint (hr) Value: 6
  misc_feature: MA Experiment 20000268 PARAMETER Experiment Name: At_100mM_NaCl__P Parameter: Tissue Value: Whole Plant
  misc_feature: MA Experiment 20000268 PARAMETER Experiment Name: At_100mM_NaCl__P Parameter: Treatment Value: 100mM NaCl vs. No Treatment
  misc_feature: MA Experiment ID: 20000437 Result: Up-regulated in Transcription
  misc_feature: MA Experiment 20000437 PARAMETER Experiment Name: At_Drought_P Parameter: Age (day) Value: 8
  misc_feature: MA Experiment 20000437 PARAMETER Experiment Name: At_Drought_P Parameter: Organism Value: A. thaliana
  misc_feature: MA Experiment 20000437 PARAMETER Experiment Name: At_Drought_P Parameter: Plant Line Value: WS
  misc_feature: MA Experiment 20000437 PARAMETER Experiment Name: At_Drought_P Parameter: Timepoint (hr) Value: 24
  misc_feature: MA Experiment 20000437 PARAMETER Experiment Name: At_Drought_P Parameter: Tissue Value: Whole Plant
  misc_feature: MA Experiment 20000437 PARAMETER Experiment Name: At_Drought_P Parameter: Treatment Value: Drought vs. No Drought
  misc_feature: MA Experiment ID: 20000438 Result: Down-regulated in Transcription
  misc_feature: MA Experiment 20000438 PARAMETER Experiment Name: At_Shoots__P Parameter: Age (day) Value: 14
  misc_feature: MA Experiment 20000438 PARAMETER Experiment Name: At_Shoots__P Parameter: Tissue Value: Shoots vs. Whole Plant
  misc_feature: MA Experiment ID: 20000439 Result: Down-regulated in Transcription
  misc_feature: MA Experiment 20000439 PARAMETER Experiment Name: At_Roots__P Parameter: Age (day) Value: 14 vs. 21
  misc_feature: MA Experiment 20000439 PARAMETER Experiment Name: At_Roots__P Parameter: Organism Value: A. thaliana
  misc_feature: MA Experiment 20000439 PARAMETER Experiment Name: At_Roots__P Parameter: Tissue Value: Roots vs. Whole Plant
  misc_feature: MA Experiment ID: 20000453 Result: Up-regulated in Transcription
  misc_feature: MA Experiment 20000453 PARAMETER Experiment Name: At_100uM_ABA_P Parameter: Age (day) Value: 15
  misc_feature: MA Experiment 20000453 PARAMETER Experiment Name: At_100uM_ABA_P Parameter: Organism Value: A. thaliana
  misc_feature: MA Experiment 20000453 PARAMETER Experiment Name: At_100uM_ABA_P Parameter: Plant Line Value: WS
  misc_feature: MA Experiment 20000453 PARAMETER Experiment Name: At_100uM_ABA_P Parameter: Timepoint (hr) Value: 24
  misc_feature: MA Experiment 20000453 PARAMETER Experiment Name: At_100uM_ABA_P Parameter: Tissue Value: Aerial
  misc_feature: MA Experiment 20000453 PARAMETER Experiment Name: At_100uM_ABA_P Parameter: Treatment Value: 100uM ABA vs. No Treatment
  misc_feature: MA Experiment ID: 20000460 Result: Up-regulated in Transcription
  misc_feature: MA Experiment 20000460 PARAMETER Experiment Name: At_10percent_PEG_P Parameter: Age (day) Value: 12
  misc_feature: MA Experiment 20000460 PARAMETER Experiment Name: At_10percent_PEG_P Parameter: Organism Value: A. thaliana
  misc_feature: MA Experiment 20000460 PARAMETER Experiment Name: At_10percent_PEG_P Parameter: Plant Line Value: WS
  misc_feature: MA Experiment 20000460 PARAMETER Experiment Name: At_10percent_PEG_P Parameter: Timepoint (day) Value: 12
  misc_feature: MA Experiment 20000460 PARAMETER Experiment Name: At_10percent_PEG_P Parameter: Tissue Value: Whole Plant
  misc_feature: MA Experiment 20000460 PARAMETER Experiment Name: At_10percent_PEG_P Parameter: Treatment Value: 10percent PEG vs. No Treatment
  misc_feature: MA Experiment ID: 20000495 Result: Down-regulated in Transcription
  misc_feature: MA Experiment 20000495 PARAMETER Experiment Name: At_Guard_Cells_P Parameter: Harvest Date Value: 8/2/2002
  misc_feature: MA Experiment 20000495 PARAMETER Experiment Name: At_Guard_Cells_P Parameter: Organism Value: A. thaliana
  misc_feature: MA Experiment 20000495 PARAMETER Experiment Name: At_Guard_Cells_P Parameter: Tissue Value: Guard Cells vs. Leaves
  misc_feature: MA Experiment ID: 20000527 Result: Up-regulated in Transcription
  misc_feature: MA Experiment 20000527 PARAMETER Experiment Name: At_10percent_PEG_P Parameter: Age (day) Value: 20
  misc_feature: MA Experiment 20000527 PARAMETER Experiment Name: At_10percent_PEG_P Parameter: Organism Value: A. thaliana
  misc_feature: MA Experiment 20000527 PARAMETER Experiment Name: At_10percent_PEG_P Parameter: Plant Line Value: WS
  misc_feature: MA Experiment 20000527 PARAMETER Experiment Name: At_10percent_PEG_P Parameter: Timepoint (day) Value: 20
  misc_feature: MA Experiment 20000527 PARAMETER Experiment Name: At_10percent_PEG_P Parameter: Tissue Value: Whole Plant
  misc_feature: MA Experiment 20000527 PARAMETER Experiment Name: At_10percent_PEG_P Parameter: Treatment Value: 10percent PEG vs. No Treatment
  misc_feature: MA Experiment ID: 20000794 Result: Up-regulated in Transcription
  misc_feature: MA Experiment 20000794 PARAMETER Experiment Name: At_Petals_P Parameter: Age (day) Value: 23-25 days
  misc_feature: MA Experiment 20000794 PARAMETER Experiment Name: At_Petals_P Parameter: Plant Line Value: WS
  misc_feature: MA Experiment 20000794 PARAMETER Experiment Name: At_Petals_P Parameter: Tissue Value: Petals vs. Whole plant
  misc_feature: MA Experiment ID: 20001248 Result: Up-regulated in Transcription
  misc_feature: MA Experiment 20001248 PARAMETER Experiment Name: At_Far-red-induction_P Parameter: Age (day) Value: 7
  misc_feature: MA Experiment 20001248 PARAMETER Experiment Name: At_Far-red-induction_P Parameter: Light Value: Far-red vs. White
  misc_feature: MA Experiment 20001248 PARAMETER Experiment Name: At_Far-red-induction_P Parameter: Organism Value: A. thaliana
  misc_feature: MA Experiment 20001248 PARAMETER Experiment Name: At_Far-red-induction_P Parameter: Plant Line Value: Columbia
  misc_feature: MA Experiment 20001248 PARAMETER Experiment Name: At_Far-red-induction_P Parameter: Timepoint (hr) Value: 4
  misc_feature: MA Experiment 20001248 PARAMETER Experiment Name: At_Far-red-induction_P Parameter: Tissue Value: Whole Plant
  misc_feature: MA Experiment ID: 20001450 Result: Up-regulated in Transcription
  misc_feature: MA Experiment 20001450 PARAMETER Experiment Name: At_Far-red-induction_P Parameter: Age (day) Value: 7
  misc_feature: MA Experiment 20001450 PARAMETER Experiment Name: At_Far-red-induction_P Parameter: Light Value: Far-red vs. White
  misc_feature: MA Experiment 20001450 PARAMETER Experiment Name: At_Far-red-induction_P Parameter: Organism Value: A. thaliana
  misc_feature: MA Experiment 20001450 PARAMETER Experiment Name: At_Far-red-induction_P Parameter: Plant Line Value: Columbia
  misc_feature: MA Experiment 20001450 PARAMETER Experiment Name: At_Far-red-induction_P Parameter: Timepoint (hr) Value: 8
  misc_feature: MA Experiment 20001450 PARAMETER Experiment Name: At_Far-red-induction_P Parameter: Tissue Value: Whole Plant
  misc_feature: MA Experiment ID: 20001554 Result: Down-regulated in Transcription
  misc_feature: MA Experiment 20001554 PARAMETER Experiment Name: At_Drought_Soil_Dry_P Parameter: Age (day) Value: 21
  misc_feature: MA Experiment 20001554 PARAMETER Experiment Name: At_Drought_Soil_Dry_P Parameter: Organism Value: A. thaliana
  misc_feature: MA Experiment 20001554 PARAMETER Experiment Name: At_Drought_Soil_Dry_P Parameter: Plant Line Value: WS
  misc_feature: MA Experiment 20001554 PARAMETER Experiment Name: At_Drought_Soil_Dry_P Parameter: Post Timepoint (hr) Value: None
  misc_feature: MA Experiment 20001554 PARAMETER Experiment Name: At_Drought_Soil_Dry_P Parameter: Post-Treatment Value: None
  misc_feature: MA Experiment 20001554 PARAMETER Experiment Name: At_Drought_Soil_Dry_P Parameter: Timepoint (day) Value: 7
  misc_feature: MA Experiment 20001554 PARAMETER Experiment Name: At_Drought_Soil_Dry_P Parameter: Treatment Value: Drought vs. No Drought
  misc_feature: MA Experiment ID: 20001555 Result: Down-regulated in Transcription
  misc_feature: MA Experiment 20001555 PARAMETER Experiment Name: At_Drought_Soil_Dry_P Parameter: Age (day) Value: 24
  misc_feature: MA Experiment 20001555 PARAMETER Experiment Name: At_Drought_Soil_Dry_P Parameter: Organism Value: A. thaliana
  misc_feature: MA Experiment 20001555 PARAMETER Experiment Name: At_Drought_Soil_Dry_P Parameter: Plant Line Value: WS
  misc_feature: MA Experiment 20001555 PARAMETER Experiment Name: At_Drought_Soil_Dry_P Parameter: Post Timepoint (hr) Value: None
  misc_feature: MA Experiment 20001555 PARAMETER Experiment Name: At_Drought_Soil_Dry_P Parameter: Post-Treatment Value: None
  misc_feature: MA Experiment 20001555 PARAMETER Experiment Name: At_Drought_Soil_Dry_P Parameter: Timepoint (day) Value: 10
  misc_feature: MA Experiment 20001555 PARAMETER Experiment Name: At_Drought_Soil_Dry_P Parameter: Treatment Value: Drought vs. No Drought
  misc_feature: MA Experiment ID: 20001556 Result: Down-regulated in Transcription
  misc_feature: MA Experiment 20001556 PARAMETER Experiment Name: At_Drought_Soil_Dry_P Parameter: Age (day) Value: 26
  misc_feature: MA Experiment 20001556 PARAMETER Experiment Name: At_Drought_Soil_Dry_P Parameter: Organism Value: A. thaliana
  misc_feature: MA Experiment 20001556 PARAMETER Experiment Name: At_Drought_Soil_Dry_P Parameter: Plant Line Value: WS
  misc_feature: MA Experiment 20001556 PARAMETER Experiment Name: At_Drought_Soil_Dry_P Parameter: Post Timepoint (hr) Value: None
  misc_feature: MA Experiment 20001556 PARAMETER Experiment Name: At_Drought_Soil_Dry_P Parameter: Post-Treatment Value: None
  misc_feature: MA Experiment 20001556 PARAMETER Experiment Name: At_Drought_Soil_Dry_P Parameter: Timepoint (day) Value: 12
  misc_feature: MA Experiment 20001556 PARAMETER Experiment Name: At_Drought_Soil_Dry_P Parameter: Treatment Value: Drought vs. No Drought
  misc_feature: MA Experiment ID: 20001557 Result: Up-regulated in Transcription
  misc_feature: MA Experiment 20001557 PARAMETER Experiment Name: At_Drought_Soil_Dry_P Parameter: Age (day) Value: 27
  misc_feature: MA Experiment 20001557 PARAMETER Experiment Name: At_Drought_Soil_Dry_P Parameter: Organism Value: A. thaliana
  misc_feature: MA Experiment 20001557 PARAMETER Experiment Name: At_Drought_Soil_Dry_P Parameter: Plant Line Value: WS
  misc_feature: MA Experiment 20001557 PARAMETER Experiment Name: At_Drought_Soil_Dry_P Parameter: Post Timepoint (hr) Value: 3
  misc_feature: MA Experiment 20001557 PARAMETER Experiment Name: At_Drought_Soil_Dry_P Parameter: Post-Treatment Value: Re-Water vs. No Drought
  misc_feature: MA Experiment 20001557 PARAMETER Experiment Name: At_Drought_Soil_Dry_P Parameter: Timepoint (day) Value: 13
  misc_feature: MA Experiment 20001557 PARAMETER Experiment Name: At_Drought_Soil_Dry_P Parameter: Treatment Value: Drought vs. No Drought
  misc_feature: MA Experiment ID: 20001558 Result: Up-regulated in Transcription
  misc_feature: MA Experiment 20001558 PARAMETER Experiment Name: At_Drought_Soil_Dry_P Parameter: Age (day) Value: 27
  misc_feature: MA Experiment 20001558 PARAMETER Experiment Name: At_Drought_Soil_Dry_P Parameter: Organism Value: A. thaliana
  misc_feature: MA Experiment 20001558 PARAMETER Experiment Name: At_Drought_Soil_Dry_P Parameter: Plant Line Value: WS
  misc_feature: MA Experiment 20001558 PARAMETER Experiment Name: At_Drought_Soil_Dry_P Parameter: Post Timepoint (hr) Value: 6
  misc_feature: MA Experiment 20001558 PARAMETER Experiment Name: At_Drought_Soil_Dry_P Parameter: Post-Treatment Value: Re-Water vs. No Drought
  misc_feature: MA Experiment 20001558 PARAMETER Experiment Name: At_Drought_Soil_Dry_P Parameter: Timepoint (day) Value: 13
  misc_feature: MA Experiment 20001558 PARAMETER Experiment Name: At_Drought_Soil_Dry_P Parameter: Treatment Value: Drought vs. No Drought
  misc_feature: MA Experiment ID: 20001560 Result: Up-regulated in Transcription
  misc_feature: MA Experiment 20001560 PARAMETER Experiment Name: At_Drought_Soil_Dry_P Parameter: Age (day) Value: 28
  misc_feature: MA Experiment 20001560 PARAMETER Experiment Name: At_Drought_Soil_Dry_P Parameter: Organism Value: A. thaliana
  misc_feature: MA Experiment 20001560 PARAMETER Experiment Name: At_Drought_Soil_Dry_P Parameter: Plant Line Value: WS
  misc_feature: MA Experiment 20001560 PARAMETER Experiment Name: At_Drought_Soil_Dry_P Parameter: Post Timepoint (hr) Value: None
  misc_feature: MA Experiment 20001560 PARAMETER Experiment Name: At_Drought_Soil_Dry_P Parameter: Post-Treatment Value: None
  misc_feature: MA Experiment 20001560 PARAMETER Experiment Name: At_Drought_Soil_Dry_P Parameter: Timepoint (day) Value: 14
  misc_feature: MA Experiment 20001560 PARAMETER Experiment Name: At_Drought_Soil_Dry_P Parameter: Treatment Value: Drought vs. No Drought
  misc_feature: MA Experiment ID: 20001772 Result: Up-regulated in Transcription
  misc_feature: MA Experiment 20001772 PARAMETER Experiment Name: At_Far-red-enriched-adult_P Parameter: Age (day) Value: 29
  misc_feature: MA Experiment 20001772 PARAMETER Experiment Name: At_Far-red-enriched-adult_P Parameter: Light Value: Far-red enriched vs. White
  misc_feature: MA Experiment 20001772 PARAMETER Experiment Name: At_Far-red-enriched-adult_P Parameter: Organism Value: A. thaliana
  misc_feature: MA Experiment 20001772 PARAMETER Experiment Name: At_Far-red-enriched-adult_P Parameter: Plant Line Value: Columbia
  misc_feature: MA Experiment 20001772 PARAMETER Experiment Name: At_Far-red-enriched-adult_P Parameter: Timepoint (hr) Value: 24
  misc_feature: MA Experiment 20001772 PARAMETER Experiment Name: At_Far-red-enriched-adult_P Parameter: Tissue Value: Aerial
acatgtaaattcacatatctctctctcttatttgatcataaagatattattgcttcttcaagtaaacaaaaaatgggaagctttctcttcctcatcgtagtcatcttcctcttctcttcatccgttaacgcttgtgatcgatgtcttcaccgttctaaagcagcttatttctcctctgcctctgctctctcttctggagcttgtgcttatggctctatggctacgagtttcttcgccggacatatcgctgcagctatcccttctatctacaaagacggtgctggctgtggagcttgctttcaagtcagatgcaagaaccctaagctgtgtagcactaaaggaaccattgtgatgatcacagacttaaacaagagtaaccaaaccgatcttgtccttagtagcagagcttttagagctatggctaaacctattgttggtgctgacaaagaccttctcaaacaaggcattgtcgacatcgaataccaaagagttccttgcgattacggcaacaagaacatgaacgtgagagtagaagaagcaagcaagaaaccaaactacttagagataaagcttttataccaaggaggtcaaacagaagtagtatccatcgacattgctcaagtcggttcatcgccaaattggggttacatgacaagaagccacggagctgtttgggtaactgacaaagtacccaccggagctatccagttcaggttcgtagtaaccggtggatacgacggtaaaatgatttggtcacagagtgttcttccatccaattgggaagctgggaaaatttacgacgccggtgttcaaatcactgacattgctcaagaaggttgtgatccttgcgatgctcacatctggaactaagttatttagtggcacacaaacaaacatctttcataggtttatatataatgtgtgacagaggttattaatgaacatagttaaagaatgcttaatctaatgattctcatgattctacattg

SEQ ID NO: 86032 - protein, 289 aa, Arabidopsis thaliana; identical to SEQ ID NO: 20845
  peptide (1)..(289): Ceres Seq. ID no. 12685604
  misc_feature (173)..(257): Pfam Name: Pollen allergen Pfam Description: Pollen allergen
  misc_feature (25)..(289): Homolog of NCBI NO: 15231303 NR Description: putative protein; protein id: At3g45970.1, by cDNA: 27534., supported by cDNA: gi_14190436, supported by
  misc_feature (25)..(289): Homolog of NCBI NO: 21555265 NR Description: Expansin-like 1 precursor (At-EXPL1)
  misc_feature (28)..(289): Homolog of NCBI NO: 15233841 NR Description: putative pollen allergen; protein id: supported by cDNA: gi_14190354, supported by cDNA: gi_15215878
  misc_feature (25)..(289): Homolog of NCBI NO: 20138389 NR Description: Expansin-like 3 precursor (At-EXPL3)
  misc_feature (73)..(289): Homolog of NCBI NO: 30692657 NR Description: expansin protein family (EXPL3) [Arabidopsis >gi|26449323|dbj|BAC41789.1| unknown protein [Arabidopsis
  misc_feature (27)..(288): Homolog of NCBI NO: 33111959 NR Description: expansin-like protein [Quercus robur]
  misc_feature (21)..(288): Homolog of NCBI NO: 37536544 NR Description: putative pollen allergen [Oryza sativa (japonica group)] >gi|10140765|gb|AAG13596.1| putative pollen allergen sativa] >gi|31433332|gb|AAP54861.1| putative pollen allergen
  misc_feature (29)..(288): Homolog of NCBI NO: 21654743 NR Description: expansin-like protein 1 [Oryza sativa]
  misc_feature (29)..(288): Homolog of NCBI NO: 20502989 NR Description: Putative pollen allergen [Oryza sativa (japonica
  misc_feature (27)..(288): Homolog of NCBI NO: 34901594 NR Description: P0571D04.11 [Oryza sativa (japonica

SEQ ID NO: 86033 - protein, 265 aa, Arabidopsis thaliana; identical to SEQ ID NO: 20846
  peptide (1)..(265): Ceres Seq. ID no. 12685605
  misc_feature (149)..(233): Pfam Name: Pollen allergen Pfam Description: Pollen allergen
  misc_feature (1)..(265): Homolog of NCBI NO: 15231303 NR Description: putative protein; protein id: At3g45970.1, by cDNA: 27534., supported by cDNA: gi_14190436, supported by
  misc_feature (1)..(265): Homolog of NCBI NO: 21555265 NR Description: Expansin-like 1 precursor (At-EXPL1)
  misc_feature (4)..(265): Homolog of NCBI NO: 15233841 NR Description: putative pollen allergen; protein id: supported by cDNA: gi_14190354, supported by cDNA: gi_15215878
  misc_feature (1)..(265): Homolog of NCBI NO: 20138389 NR Description: Expansin-like 3 precursor (At-EXPL3)
  misc_feature (49)..(265): Homolog of NCBI NO: 30692657 NR Description: expansin protein family (EXPL3) [Arabidopsis >gi|26449323|dbj|BAC41789.1| unknown protein [Arabidopsis
  misc_feature (3)..(264): Homolog of NCBI NO: 33111959 NR Description: expansin-like protein [Quercus robur]
  misc_feature (1)..(264): Homolog of NCBI NO: 37536544 NR Description: putative pollen allergen [Oryza sativa (japonica group)] >gi|10140765|gb|AAG13596.1| putative pollen allergen sativa] >gi|31433332|gb|AAP54861.1| putative pollen allergen
  misc_feature (5)..(264): Homolog of NCBI NO: 21654743 NR Description: expansin-like protein 1 [Oryza sativa]
  misc_feature (5)..(264): Homolog of NCBI NO: 20502989 NR Description: Putative pollen allergen [Oryza sativa (japonica
  misc_feature (3)..(264): Homolog of NCBI NO: 34901594 NR Description: P0571D04.11 [Oryza sativa (japonica

SEQ ID NO: 86034 - protein, 217 aa, Arabidopsis thaliana; identical to SEQ ID NO: 20847
  peptide (1)..(217): Ceres Seq. ID no. 12685606
  misc_feature (101)..(185): Pfam Name: Pollen allergen Pfam Description: Pollen allergen
  misc_feature (1)..(217): Homolog of NCBI NO: 15231303 NR Description: putative protein; protein id: At3g45970.1, by cDNA: 27534., supported by cDNA: gi_14190436, supported by
  misc_feature (1)..(217): Homolog of NCBI NO: 21555265 NR Description: Expansin-like 1 precursor (At-EXPL1)
  misc_feature (1)..(217): Homolog of NCBI NO: 15233841 NR Description: putative pollen allergen; protein id: supported by cDNA: gi_14190354, supported by cDNA: gi_15215878
  misc_feature (1)..(217): Homolog of NCBI NO: 20138389 NR Description: Expansin-like 3 precursor (At-EXPL3)
  misc_feature (1)..(217): Homolog of NCBI NO: 30692657 NR Description: expansin protein family (EXPL3) [Arabidopsis >gi|26449323|dbj|BAC41789.1| unknown protein [Arabidopsis
  misc_feature (1)..(216): Homolog of NCBI NO: 33111959 NR Description: expansin-like protein [Quercus robur]
  misc_feature (1)..(216): Homolog of NCBI NO: 37536544 NR Description: putative pollen allergen [Oryza sativa (japonica group)] >gi|10140765|gb|AAG13596.1| putative pollen allergen sativa] >gi|31433332|gb|AAP54861.1| putative pollen allergen
  misc_feature (1)..(216): Homolog of NCBI NO: 21654743 NR Description: expansin-like protein 1 [Oryza sativa]
  misc_feature (1)..(216): Homolog of NCBI NO: 20502989 NR Description: Putative pollen allergen [Oryza sativa (japonica
  misc_feature (1)..(216): Homolog of NCBI NO: 34901594 NR Description: P0571D04.11 [Oryza sativa (japonica

SEQ ID NO: 86035 - DNA, 1839 bp, Arabidopsis thaliana
  misc_feature (1)..(1839): Ceres Seq. ID no. 12685671
  misc_feature: MA Experiment ID: 108434 Result: Up-regulated in Transcription
  misc_feature: MA Experiment 108434 PARAMETER Experiment Name: At_Root_Tips_cDNA_P Parameter: Tissue Value: Root Tips
  misc_feature: MA Experiment ID: 108461 Result: Down-regulated in Transcription
  misc_feature: MA Experiment 108461 PARAMETER Experiment Name: At_Germinating_Seeds_cDNA_P Parameter: Age (day) Value: 1 vs. 0
  misc_feature: MA Experiment 108461 PARAMETER Experiment Name: At_Germinating_Seeds_cDNA_P Parameter: Tissue Value: Germinating Seeds
  misc_feature: MA Experiment ID: 108462 Result: Down-regulated in Transcription
  misc_feature: MA Experiment 108462 PARAMETER Experiment Name: At_Germinating_Seeds_cDNA_P Parameter: Age (day) Value: 2 vs. 0
  misc_feature: MA Experiment 108462 PARAMETER Experiment Name: At_Germinating_Seeds_cDNA_P Parameter: Tissue Value: Germinating Seeds
  misc_feature: MA Experiment ID: 108463 Result: Down-regulated in Transcription
  misc_feature: MA Experiment 108463 PARAMETER Experiment Name: At_Germinating_Seeds_cDNA_P Parameter: Age (day) Value: 3 vs. 0
  misc_feature: MA Experiment 108463 PARAMETER Experiment Name: At_Germinating_Seeds_cDNA_P Parameter: Tissue Value: Germinating Seeds
  misc_feature: MA Experiment ID: 108464 Result: Down-regulated in Transcription
  misc_feature: MA Experiment 108464 PARAMETER Experiment Name: At_Germinating_Seeds_cDNA_P Parameter: Age (day) Value: 4 vs. 0
  misc_feature: MA Experiment 108464 PARAMETER Experiment Name: At_Germinating_Seeds_cDNA_P Parameter: Tissue Value: Germinating Seeds
  misc_feature: MA Experiment ID: 108469 Result: Up-regulated in Transcription
  misc_feature: MA Experiment ID: 108489 Result: Down-regulated in Transcription
  misc_feature: MA Experiment ID: 108561 Result: Up-regulated in Transcription
  misc_feature: MA Experiment 108561 PARAMETER Experiment Name: At_100uM_ABA_cDNA_P Parameter: Timepoint (hr) Value: 6
  misc_feature: MA Experiment 108561 PARAMETER Experiment Name: At_100uM_ABA_cDNA_P Parameter: Tissue Value: Aerial
  misc_feature: MA Experiment 108561 PARAMETER Experiment Name: At_100uM_ABA_cDNA_P Parameter: Treatment Value: 100uM ABA vs. No Treatment
  misc_feature: MA Experiment ID: 108576 Result: Up-regulated in Transcription
  misc_feature: MA Experiment 108576 PARAMETER Experiment Name: At_42deg_Heat_cDNA_P Parameter: Temperature (deg C) Value: 42 vs. 22
  misc_feature: MA Experiment 108576 PARAMETER Experiment Name: At_42deg_Heat_cDNA_P Parameter: Timepoint (hr) Value: 1
  misc_feature: MA Experiment 108576 PARAMETER Experiment Name: At_42deg_Heat_cDNA_P Parameter: Tissue Value: Aerial
  misc_feature: MA Experiment ID: 108577 Result: Up-regulated in Transcription
  misc_feature: MA Experiment 108577 PARAMETER Experiment Name: At_42deg_Heat_cDNA_P Parameter: Temperature (deg C) Value: 42 vs. 22
  misc_feature: MA Experiment 108577 PARAMETER Experiment Name: At_42deg_Heat_cDNA_P Parameter: Timepoint (hr) Value: 6
  misc_feature: MA Experiment 108577 PARAMETER Experiment Name: At_42deg_Heat_cDNA_P Parameter: Tissue Value: Aerial
  misc_feature: MA Experiment ID: 108609 Result: Up-regulated in Transcription
  misc_feature: MA Experiment 108609 PARAMETER Experiment Name: At_100uM_ABA_cDNA_P Parameter: Timepoint (hr) Value: 24
  misc_feature: MA Experiment 108609 PARAMETER Experiment Name: At_100uM_ABA_cDNA_P Parameter: Tissue Value: Aerial
  misc_feature: MA Experiment 108609 PARAMETER Experiment Name: At_100uM_ABA_cDNA_P Parameter: Treatment Value: 100uM ABA vs. No Treatment
  misc_feature: MA Experiment ID: 108667 Result: Up-regulated in Transcription
  misc_feature: MA Experiment 108667 PARAMETER Experiment Name: At_2mM_SA_cDNA_P Parameter: Plant Line Value: WS
  misc_feature: MA Experiment 108667 PARAMETER Experiment Name: At_2mM_SA_cDNA_P Parameter: Timepoint (hr) Value: 1
  misc_feature: MA Experiment 108667 PARAMETER Experiment Name: At_2mM_SA_cDNA_P Parameter: Treatment Value: 2mM SA vs. No Treatment
  misc_feature: MA Experiment ID: 108668 Result: Up-regulated in Transcription
  misc_feature: MA Experiment 108668 PARAMETER Experiment Name: At_2mM_SA_cDNA_P Parameter: Plant Line Value: WS
  misc_feature: MA Experiment 108668 PARAMETER Experiment Name: At_2mM_SA_cDNA_P Parameter: Timepoint (hr) Value: 6
  misc_feature: MA Experiment 108668 PARAMETER Experiment Name: At_2mM_SA_cDNA_P Parameter: Treatment Value: 2mM SA vs. No Treatment
  misc_feature: MA Experiment ID: 20000069 Result: Up-regulated in Transcription
  misc_feature: MA Experiment 20000069 PARAMETER Experiment Name: At_100uM_ABA_Mutants_cDNA_P Parameter: Plant Line Value: CS23
  misc_feature: MA Experiment 20000069 PARAMETER Experiment Name: At_100uM_ABA_Mutants_cDNA_P Parameter: Timepoint (hr) Value: 6
  misc_feature: MA Experiment 20000069 PARAMETER Experiment Name: At_100uM_ABA_Mutants_cDNA_P Parameter: Tissue Value: Aerial
  misc_feature: MA Experiment 20000069 PARAMETER Experiment Name: At_100uM_ABA_Mutants_cDNA_P Parameter: Treatment Value: 100uM ABA vs. No Treatment
  misc_feature: MA Experiment ID: 20000070 Result: Up-regulated in Transcription
  misc_feature: MA Experiment 20000070 PARAMETER Experiment Name: At_100uM_ABA_Mutants_cDNA_P Parameter: Plant Line Value: CS24
  misc_feature: MA Experiment 20000070 PARAMETER Experiment Name: At_100uM_ABA_Mutants_cDNA_P Parameter: Timepoint (hr) Value: 6
  misc_feature: MA Experiment 20000070 PARAMETER Experiment Name: At_100uM_ABA_Mutants_cDNA_P Parameter: Tissue Value: Aerial
  misc_feature: MA Experiment 20000070 PARAMETER Experiment Name: At_100uM_ABA_Mutants_cDNA_P Parameter: Treatment Value: 100uM ABA vs. No Treatment
  misc_feature: MA Experiment ID: 20000087 Result: Up-regulated in Transcription
  misc_feature: MA Experiment 20000087 PARAMETER Experiment Name: At_100uM_ABA_Mutants_cDNA_P Parameter: Plant Line Value: WS
  misc_feature: MA Experiment 20000087 PARAMETER Experiment Name: At_100uM_ABA_Mutants_cDNA_P Parameter: Timepoint (hr) Value: 6
  misc_feature: MA Experiment 20000087 PARAMETER Experiment Name: At_100uM_ABA_Mutants_cDNA_P Parameter: Tissue Value: Aerial
  misc_feature: MA Experiment 20000087 PARAMETER Experiment Name: At_100uM_ABA_Mutants_cDNA_P Parameter: Treatment Value: 100uM ABA vs. No Treatment
  misc_feature: MA Experiment ID: 20000089 Result: Up-regulated in Transcription
  misc_feature: MA Experiment ID: 20000090 Result: Up-regulated in Transcription
  misc_feature: MA Experiment ID: 20000093 Result: Up-regulated in Transcription
  misc_feature: MA Experiment 20000093 PARAMETER Experiment Name: At_42deg_Heat_cDNA_P Parameter: Temperature (deg C) Value: 42 vs. 22
  misc_feature: MA Experiment 20000093 PARAMETER Experiment Name: At_42deg_Heat_cDNA_P Parameter: Timepoint (hr) Value: 0.5
  misc_feature: MA Experiment 20000093 PARAMETER Experiment Name: At_42deg_Heat_cDNA_P Parameter: Tissue Value: Aerial
  misc_feature: MA Experiment ID: 20000111 Result: Up-regulated in Transcription
  misc_feature: MA Experiment 20000111 PARAMETER Experiment Name: At_42deg_Heat_cDNA_P Parameter: Temperature (deg C) Value: 42 vs. 22
  misc_feature: MA Experiment 20000111 PARAMETER Experiment Name: At_42deg_Heat_cDNA_P Parameter: Timepoint (hr) Value: 6
  misc_feature: MA Experiment 20000111 PARAMETER Experiment Name: At_42deg_Heat_cDNA_P Parameter: Tissue Value: Aerial
  misc_feature: MA Experiment ID: 20000113 Result: Up-regulated in Transcription
  misc_feature: MA Experiment 20000113 PARAMETER Experiment Name: At_42deg_Heat_cDNA_P Parameter: Temperature (deg C) Value: 42 vs. 22
  misc_feature: MA Experiment 20000113 PARAMETER Experiment Name: At_42deg_Heat_cDNA_P Parameter: Timepoint (hr) Value: 8
  misc_feature: MA Experiment 20000113 PARAMETER Experiment Name: At_42deg_Heat_cDNA_P Parameter: Tissue Value: Aerial
  misc_feature: MA Experiment ID: 20000144 Result: Up-regulated in Transcription
  misc_feature: MA Experiment 20000144 PARAMETER Experiment Name: At_42deg_Heat_cDNA_P Parameter: Temperature (deg C) Value: 42 vs. 22
  misc_feature: MA Experiment 20000144 PARAMETER Experiment Name: At_42deg_Heat_cDNA_P Parameter: Timepoint (hr) Value: 1
  misc_feature: MA Experiment 20000144 PARAMETER Experiment Name: At_42deg_Heat_cDNA_P Parameter: Tissue Value: Aerial
  misc_feature: MA Experiment ID: 20000306 Result: Down-regulated in Transcription
  misc_feature: MA Experiment 20000306 PARAMETER Experiment Name: At_Germinating_Seeds_Sub_P Parameter: Age (hr) Value: 6 vs. 0
  misc_feature: MA Experiment 20000306 PARAMETER Experiment Name: At_Germinating_Seeds_Sub_P Parameter: Organism Value: A. thaliana
  misc_feature: MA Experiment 20000306 PARAMETER Experiment Name: At_Germinating_Seeds_Sub_P Parameter: Plant Line Value: WS
  misc_feature: MA Experiment 20000306 PARAMETER Experiment Name: At_Germinating_Seeds_Sub_P Parameter: Tissue Value: Germinating Seeds
  misc_feature: MA Experiment ID: 20000307 Result: Down-regulated in Transcription
  misc_feature: MA Experiment 20000307 PARAMETER Experiment Name: At_Germinating_Seeds_Sub_P Parameter: Age (hr) Value: 24 vs. 0
  misc_feature: MA Experiment 20000307 PARAMETER Experiment Name: At_Germinating_Seeds_Sub_P Parameter: Organism Value: A. thaliana
  misc_feature: MA Experiment 20000307 PARAMETER Experiment Name: At_Germinating_Seeds_Sub_P Parameter: Plant Line Value: WS
  misc_feature: MA Experiment 20000307 PARAMETER Experiment Name: At_Germinating_Seeds_Sub_P Parameter: Tissue Value: Germinating Seeds
  misc_feature: MA Experiment ID: 20000315 Result: Up-regulated in Transcription
  misc_feature: MA Experiment 20000315 PARAMETER Experiment Name: At_14day_Shoots-Roots_Sub_P Parameter: Age (day) Value: 14
  misc_feature: MA Experiment 20000315 PARAMETER Experiment Name: At_14day_Shoots-Roots_Sub_P Parameter: Organism Value: A. thaliana
  misc_feature: MA Experiment 20000315 PARAMETER Experiment Name: At_14day_Shoots-Roots_Sub_P Parameter: Plant Line Value: WS
  misc_feature: MA Experiment 20000315 PARAMETER Experiment Name: At_14day_Shoots-Roots_Sub_P Parameter: Tissue Value: Shoots vs. Whole Plant
  misc_feature: MA Experiment ID: 20000327 Result: Up-regulated in Transcription
  misc_feature: MA Experiment 20000327 PARAMETER Experiment Name: At_42deg_Heat_Sub_P Parameter: Age (day) Value: 14
  misc_feature: MA Experiment 20000327 PARAMETER Experiment Name: At_42deg_Heat_Sub_P Parameter: Organism Value: A. thaliana
  misc_feature: MA Experiment 20000327 PARAMETER Experiment Name: At_42deg_Heat_Sub_P Parameter: Plant Line Value: WS
  misc_feature: MA Experiment 20000327 PARAMETER Experiment Name: At_42deg_Heat_Sub_P Parameter: Temperature (deg C) Value: 42 vs. 22
  misc_feature: MA Experiment 20000327 PARAMETER Experiment Name: At_42deg_Heat_Sub_P Parameter: Timepoint (hr) Value: 1
  misc_feature: MA Experiment 20000327 PARAMETER Experiment Name: At_42deg_Heat_Sub_P Parameter: Tissue Value: Aerial
  misc_feature: MA Experiment ID: 20000328 Result: Up-regulated in Transcription
  misc_feature: MA Experiment 20000328 PARAMETER Experiment Name: At_42deg_Heat_Sub_P Parameter: Age (day) Value: 14
  misc_feature: MA Experiment 20000328 PARAMETER Experiment Name: At_42deg_Heat_Sub_P Parameter: Organism Value: A. thaliana
  misc_feature: MA Experiment 20000328 PARAMETER Experiment Name: At_42deg_Heat_Sub_P Parameter: Plant Line Value: WS
  misc_feature: MA Experiment 20000328 PARAMETER Experiment Name: At_42deg_Heat_Sub_P Parameter: Temperature (deg C) Value: 42 vs. 22
  misc_feature: MA Experiment 20000328 PARAMETER Experiment Name: At_42deg_Heat_Sub_P Parameter: Timepoint (hr) Value: 6
  misc_feature: MA Experiment 20000328 PARAMETER Experiment Name: At_42deg_Heat_Sub_P Parameter: Tissue Value: Aerial
  misc_feature: MA Experiment ID: 20000347 Result: Up-regulated in Transcription
  misc_feature: MA Experiment 20000347 PARAMETER Experiment Name: At_2mM_SA_Sub_P Parameter: Age (day) Value: 14
  misc_feature: MA Experiment 20000347 PARAMETER Experiment Name: At_2mM_SA_Sub_P Parameter: Organism Value: A. thaliana
  misc_feature: MA Experiment 20000347 PARAMETER Experiment Name: At_2mM_SA_Sub_P Parameter: Plant Line Value: WS
  misc_feature: MA Experiment 20000347 PARAMETER Experiment Name: At_2mM_SA_Sub_P Parameter: Timepoint (hr) Value: 6
  misc_feature: MA Experiment 20000347 PARAMETER Experiment Name: At_2mM_SA_Sub_P Parameter: Tissue Value: Aerial
  misc_feature: MA Experiment 20000347 PARAMETER Experiment Name: At_2mM_SA_Sub_P Parameter: Treatment Value: 2mM SA vs. No Treatment
atgggtgctgctttgctttgtcttctctactttctttccttcctaaccctctctctatccagcgtaaacatagactgtggaacgtcattgccaggcgtagacaacaacaacctaaaatgggtcggagaccaagacttcatcacatccggagactcggctactatttcgtccaccaccgttgagaaatccctcaccacacttcggtactttcccacgggcgactccaattgctactccaacattccggttacaaaaggcggaaaagttctagtgagaaccatgttttactacgggaattacgacgggaagtcctcaaccccatccttcagcgtagtgtttgaagggaaacaccgaggcaccctatcgatatcctcagcattcgaaccttaccttctggagttgatattttccccggccggtggagagaccagcgtctgttttgtacgtacttcttcatcatcaaacccttttgtgtcttccattgaagttgtcgacttggatgatggcatgtatgccgagcttggtcctggtgaaggtttattttaccaacaacgacgtgcgtatggtgcaacagaatttctaagatcggatcttcaaggtaggttttggcttccatccgagataaacatattggtgacgggaatacagtccacggctgtatccattgatacctctggtgcatcaaacaagccgcctgagtccgtcctccgtaactcttggaccggggaaggcttatcattagtcgaccctactcttccttcagcaggagttccggtgtacttggctatgtatttctcggagcctctagagtcaagtttacgatcgttcaacattttctttggtggtaagcaagttggtaggggtcctgttgtgcctttgtttggaaaagcaactcaagtggtcgtgagagatgtggtggccagttcaagcaccctactgacgctctggtccacttctagtgcgcttttaccgcccatgataaatgcggccgagctttatgtaattagtaagggtacaagcgaaagcacaggcggaaacgaaactggttccggttcaggatcaggatccggtggaagtggaggaggaggatctgggagcagtggatccggatctggtgggactagcaaaggaggaactggaggtagcaatgaagtgagtccaggtggatcaaccaatggaaagagcagtaaactgccaattatactcggtgtagtgtcaccggttgcgtttgttcttgtcgcatatgtgttcatcgctataatcttagctaatcgtcgcaaagtgaggctgcaagccttggctatgcctacgtccacagagagttctagcaaaacaaaacaaaacagagcaaacagagtaagcgaaacgatgtctctagttccgagcttttttggaggccgaagaacaaacgtgttcgacccattttcactagacgtatgggatccgttcgaaggattcttgacgcccgggttgacaaacgcacctgccaaggacgtggcagcgttcacaaacgctaaagtggactggagggagacacctgaagcgcatgtgttcaaggcggacgtgcctgggcttaagaaggaagaggtgaaggtggaggttgaagatggtaacatacttcagataagcggtgagaggagcagtgagaatgaagagaagagtgacacatggcaccgtgtggagcggtcaagtgggaagttcatgaggaggtttcggttgccagagaatgcaaaggtggaggaagtaaaggcgagtatggagaatggggtgttgtcggttacggtgccgaaagttcaggagagtaagccggaggtcaagtccgttgatatctctggttaa

SEQ ID NO: 86036 - protein, 612 aa, Arabidopsis thaliana
  peptide (1)..(612): Ceres Seq. ID no. 12685672
  misc_feature (340)..(390): Pfam Name: Serglycin Pfam Description: Serglycin
  misc_feature (199)..(445): Homolog of NCBI NO: 15231375 NR Description: putative protein; protein id: At3g46240.1
  misc_feature (20)..(182): Homolog of NCBI NO: 15231375 NR Description: putative protein; protein id: At3g46240.1
  misc_feature (1)..(445): Homolog of NCBI NO: 30692700 NR Description: expressed protein [Arabidopsis thaliana]
  misc_feature (2)..(440): Homolog of NCBI NO: 30692696 NR Description: expressed protein [Arabidopsis thaliana]
  misc_feature (2)..(439): Homolog of NCBI NO: 11357388 NR Description: hypothetical protein F12M12.240 - Arabidopsis >gi|7799015|emb|CAB90954.1| putative protein [Arabidopsis
  misc_feature (197)..(414): Homolog of NCBI NO: 9743336 NR Description: F21J9.15 [Arabidopsis thaliana]
  misc_feature (3)..(199): Homolog of NCBI NO: 9743336 NR Description: F21J9.15 [Arabidopsis thaliana]
  misc_feature (197)..(414): Homolog of NCBI NO: 15221768 NR Description: putative chloroplast membrane protein, ALBINO3;
  misc_feature (3)..(199): Homolog of NCBI NO: 15221768 NR Description: putative chloroplast membrane protein, ALBINO3;
  misc_feature (1)..(358): Homolog of NCBI NO: 11357389 NR Description: hypothetical protein F12M12.250 - Arabidopsis >gi|7799016|emb|CAB90955.1| putative protein [Arabidopsis
MGAALLCLLYFLSFLTLSLSSVNIDCGTSLPGVDNNNLKWVGDQDFITSGDSATISSTTVEKSLTTLRYFPTGDSNCYSNIPVTKGGKVLVRTMFYYGNYDGKSSTPSFSVVFEGKHRGTLSISSAFEPYLLELIFSPAGGETSVCFVRTSSSSNPFVSSIEVVDLDDGMYAELGPGEGLFYQQRRAYGATEFLRSDLQGRFWLPSEINILVTGIQSTAVSIDTSGASNKPPESVLRNSWTGEGLSLVDPTLPSAGVPVYLAMYFSEPLESSLRSFNIFFGGKQVGRGPVVPLFGKATQVVVRDVVASSSTLLTLWSTSSALLPPMINAAELYVISKGTSESTGGNETGSGSGSGSGGSGGGGSGSSGSGSGGTSKGGTGGSNEVSPGGSTNGKSSKLPIILGVVSPVAFVLVAYVFIAIILANRRKVRLQALAMPTSTESSSKTKQNRANRVSETMSLVPSFFGGRRTNVFDPFSLDVWDPFEGFLTPGLTNAPAKDVAAFTNAKVDWRETPEAHVFKADVPGLKKEEVKVEVEDGNILQISGERSSENEEKSDTWHRVERSSGKFMRRFRLPENAKVEEVKASMENGVLSVTVPKVQESKPEVKSVDISG

SEQ ID NO: 86037 - protein, 519 aa, Arabidopsis thaliana
  peptide (1)..(519): Ceres Seq. ID no. 12685673
  misc_feature (247)..(297): Pfam Name: Serglycin Pfam Description: Serglycin
  misc_feature (106)..(352): Homolog of NCBI NO: 15231375 NR Description: putative protein; protein id: At3g46240.1
  misc_feature (1)..(89): Homolog of NCBI NO: 15231375 NR Description: putative protein; protein id: At3g46240.1
  misc_feature (1)..(352): Homolog of NCBI NO: 30692700 NR Description: expressed protein [Arabidopsis thaliana]
  misc_feature (1)..(347): Homolog of NCBI NO: 30692696 NR Description: expressed protein [Arabidopsis thaliana]
  misc_feature (1)..(346): Homolog of NCBI NO: 11357388 NR Description: hypothetical protein F12M12.240 - Arabidopsis >gi|7799015|emb|CAB90954.1| putative protein [Arabidopsis
  misc_feature (104)..(321): Homolog of NCBI NO: 9743336 NR Description: F21J9.15 [Arabidopsis thaliana]
  misc_feature (1)..(106): Homolog of NCBI NO: 9743336 NR Description: F21J9.15 [Arabidopsis thaliana]
  misc_feature (104)..(321): Homolog of NCBI NO: 15221768 NR Description: putative chloroplast membrane protein, ALBINO3;
  misc_feature (1)..(106): Homolog of NCBI NO: 15221768 NR Description: putative chloroplast membrane protein, ALBINO3;
  misc_feature (1)..(265): Homolog of NCBI NO: 11357389 NR Description: hypothetical protein F12M12.250 - Arabidopsis >gi|7799016|emb|CAB90955.1| putative protein [Arabidopsis
MFYYGNYDGKSSTPSFSVVFEGKHRGTLSISSAFEPYLLELIFSPAGGETSVCFVRTSSSSNPFVSSIEVVDLDDGMYAELGPGEGLFYQQRRAYGATEFLRSDLQGRFWLPSEINILVTGIQSTAVSIDTSGASNKPPESVLRNSWTGEGLSLVDPTLPSAGVPVYLAMYFSEPLESSLRSFNIFFGGKQVGRGPVVPLFGKATQVVVRDVVASSSTLLTLWSTSSALLPPMINAAELYVISKGTSESTGGNETGSGSGSGSGGSGGGGSGSSGSGSGGTSKGGTGGSNEVSPGGSTNGKSSKLPIILGVVSPVAFVLVAYVFIAIILANRRKVRLQALAMPTSTESSSKTKQNRANRVSETMSLVPSFFGGRRTNVFDPFSLDVWDPFEGFLTPGLTNAPAKDVAAFTNAKVDWRETPEAHVFKADVPGLKKEEVKVEVEDGNILQISGERSSENEEKSDTWHRVERSSGKFMRRFRLPENAKVEEVKASMENGVLSVTVPKVQESKPEVKSVDISG

SEQ ID NO: 86038 - protein, 443 aa, Arabidopsis thaliana
  peptide (1)..(443): Ceres Seq. ID no. 12685674
  misc_feature (171)..(221): Pfam Name: Serglycin Pfam Description: Serglycin
  misc_feature (30)..(276): Homolog of NCBI NO: 15231375 NR Description: putative protein; protein id: At3g46240.1
  misc_feature (1)..(13): Homolog of NCBI NO: 15231375 NR Description: putative protein; protein id: At3g46240.1
  misc_feature (1)..(276): Homolog of NCBI NO: 30692700 NR Description: expressed protein [Arabidopsis thaliana]
  misc_feature (1)..(271): Homolog of NCBI NO: 30692696 NR Description: expressed protein [Arabidopsis thaliana]
  misc_feature (1)..(270): Homolog of NCBI NO: 11357388 NR Description: hypothetical protein F12M12.240 - Arabidopsis >gi|7799015|emb|CAB90954.1| putative protein [Arabidopsis
  misc_feature (28)..(245): Homolog of NCBI NO: 9743336 NR Description: F21J9.15 [Arabidopsis thaliana]
  misc_feature (1)..(30): Homolog of NCBI NO: 9743336 NR Description: F21J9.15 [Arabidopsis thaliana]
  misc_feature (28)..(245): Homolog of NCBI NO: 15221768 NR Description: putative chloroplast membrane protein, ALBINO3;
  misc_feature (1)..(30): Homolog of NCBI NO: 15221768 NR Description: putative chloroplast membrane protein, ALBINO3;
  misc_feature (1)..(189): Homolog of NCBI NO: 11357389 NR Description: hypothetical protein F12M12.250 - Arabidopsis >gi|7799016|emb|CAB90955.1| putative protein [Arabidopsis
MYAELGPGEGLFYQQRRAYGATEFLRSDLQGRFWLPSEINILVTGIQSTAVSIDTSGASNKPPESVLRNSWTGEGLSLVDPTLPSAGVPVYLAMYFSEPLESSLRSFNIFFGGKQVGRGPVVPLFGKATQVVVRDVVASSSTLLTLWSTSSALLPPMINAAELYVISKGTSESTGGNETGSGSGSGSGGSGGGGSGSSGSGSGGTSKGGTGGSNEVSPGGSTNGKSSKLPIILGVVSPVAFVLVAYVFIAIILANRRKVRLQALAMPTSTESSSKTKQNRANRVSETMSLVPSFFGGRRTNVFDPFSLDVWDPFEGFLTPGLTNAPAKDVAAFTNAKVDWRETPEAHVFKADVPGLKKEEVKVEVEDGNILQISGERSSENEEKSDTWHRVERSSGKFMRRFRLPENAKVEEVKASMENGVLSVTVPKVQESKPEVKSVDISG

SEQ ID NO: 86039 - DNA, 825 bp, Arabidopsis thaliana
  misc_feature (1)..(825): Ceres Seq. ID no. 12685728
  misc_feature: MA Experiment ID: 20000227 Result: Down-regulated in Transcription
  misc_feature: MA Experiment 20000227 PARAMETER Experiment Name: At_Root-Tips-vs-Tops_P Parameter: Tissue Value: Root Tips vs. Root Tops
  misc_feature: MA Experiment ID: 20000451 Result: Down-regulated in Transcription
  misc_feature: MA Experiment 20000451 PARAMETER Experiment Name: At_CS6879_Shoots-Roots_P Parameter: Age (day) Value: 14
  misc_feature: MA Experiment 20000451 PARAMETER Experiment Name: At_CS6879_Shoots-Roots_P Parameter: Organism Value: A. thaliana
  misc_feature: MA Experiment 20000451 PARAMETER Experiment Name: At_CS6879_Shoots-Roots_P Parameter: Plant Line Value: CS6879 vs. WS
  misc_feature: MA Experiment 20000451 PARAMETER Experiment Name: At_CS6879_Shoots-Roots_P Parameter: Tissue Value: Roots
atggagaacaaaactcaagaggaagcttcgaccatcaaagtttcatcccttacttgcatagatcttgccaacccgaactttcaacaatcagcggtttctcttaaacaggcatgtctagattgtggatttttctatgtcacaaatcatggtataagtgaggagttgaaggacgaggcttttgagcagagcaagaagttctttgctcttcctttggaggagaaaatgaaagtcttgagaaatgaaaagcatcgaggctattcacccgtccttgatcaaattttagatcctgagaatcaagtcgacgttgttttgccgggatggcgggcgaccatggagaaatatcatcaagaagcattgagggtttgcaaggctattgctagattattagcattggcgctcgacttggacacaaattactttgataaaccggaaatgctgggaaatcctatcgcagttatgcgtttgcttcgttacgaagggatgtctgatcccttgaaaggaatatttggatgtggagctcattctgattacggaatgctgactctcttagcaaccgatagtgtaaccgggctccagatatgcaaggataaggacgtgaagcctaggaagtgggaatatgtaccatctattaaaggagcatatatcgtcaatcttggagacttgttggagcgttggagcaacggcatttttaaatccacattgcatcgggtacttgggaatggtcaagaccgatattccattccattcttcatagaaccgagtcacgactgtctagtagaatgtctacctacctgccagtccgaaaacaaccttcccaaaagttaa

SEQ ID NO: 86040 - protein, 274 aa, Arabidopsis thaliana
  peptide (1)..(274): Ceres Seq. ID no. 12685729
  misc_feature (149)..(253): Pfam Name: 2OG-Fe(II) oxygenase superfamily Pfam Description: 2OG-Fe(II) oxygenase superfamily
  misc_feature (1)..(273): Homolog of NCBI NO: 15231441 NR Description: putative protein; protein id: At3g46480.1
  misc_feature (103)..(273): Homolog of NCBI NO: 15231442 NR Description: putative protein; protein id: At3g46490.1
  misc_feature (1)..(100): Homolog of NCBI NO: 15231442 NR Description: putative protein; protein id: At3g46490.1
  misc_feature (103)..(273): Homolog of NCBI NO: 15219523 NR Description: hyoscyamine 6-dioxygenase hydroxylase, putative; id: At1g35190.1, supported by cDNA: 2551., supported by cDNA:
  misc_feature (7)..(101): Homolog of NCBI NO: 15219523 NR Description: hyoscyamine 6-dioxygenase hydroxylase, putative; id: At1g35190.1, supported by cDNA: 2551., supported by cDNA:
  misc_feature (40)..(273): Homolog of NCBI NO: 15231443 NR Description: putative protein; protein id: At3g46500.1
  misc_feature (37)..(273): Homolog of NCBI NO: 34906368 NR Description: unnamed protein product [Oryza sativa (japonica group)] >gi|9558506|dbj|BAB03425.1| unnamed protein product
  misc_feature (89)..(273): Homolog of NCBI NO: 8919875 NR Description: hypothetical protein [Capsella rubella]
  misc_feature (14)..(96): Homolog of NCBI NO: 8919875 NR Description: hypothetical protein [Capsella rubella]
  misc_feature (89)..(273): Homolog of NCBI NO: 7594582 NR Description: hypothetical protein [Arabidopsis thaliana] AT4g16770 [Arabidopsis thaliana] >gi|14596207|gb|AAK68831.1| protein [Arabidopsis thaliana] >gi|20148323|gb|AAM10052.1|
MENKTQEEASTIKVSSLTCIDLANPNFQQSAVSLKQACLDCGFFYVTNHGISEELKDEAFEQSKKFFALPLEEKMKVLRNEKHRGYSPVLDQILDPENQVDVVLPGWRATMEKYHQEALRVCKAIARLLALALDLDTNYFDKPEMLGNPIAVMRLLRYEGMSDPLKGIFGCGAHSDYGMLTLLATDSVTGLQICKDKDVKPRKWEYVPSIKGAYIVNLGDLLERWSNGIFKSTLHRVLGNGQDRYSIPFFIEPSHDCLVECLPTCQSENNLPKS

SEQ ID NO: 86041 - protein, 200 aa, Arabidopsis thaliana
  peptide (1)..(200): Ceres Seq. ID no. 12685730
  misc_feature (75)..(179): Pfam Name: 2OG-Fe(II) oxygenase superfamily Pfam Description: 2OG-Fe(II) oxygenase superfamily
  misc_feature (1)..(199): Homolog of NCBI NO: 15231441 NR Description: putative protein; protein id: At3g46480.1
  misc_feature (29)..(199): Homolog of NCBI NO: 15231442 NR Description: putative protein; protein id: At3g46490.1
  misc_feature (1)..(26): Homolog of NCBI NO: 15231442 NR Description: putative protein; protein id: At3g46490.1
  misc_feature (29)..(199): Homolog of NCBI NO: 15219523 NR Description: hyoscyamine 6-dioxygenase hydroxylase, putative; id: At1g35190.1, supported by cDNA: 2551., supported by cDNA:
  misc_feature (1)..(27): Homolog of NCBI NO: 15219523 NR Description: hyoscyamine 6-dioxygenase hydroxylase, putative; id: At1g35190.1, supported by cDNA: 2551., supported by cDNA:
  misc_feature (1)..(199): Homolog of NCBI NO: 15231443 NR Description: putative protein; protein id: At3g46500.1
  misc_feature (1)..(199): Homolog of NCBI NO: 34906368 NR Description: unnamed protein product [Oryza sativa (japonica group)] >gi|9558506|dbj|BAB03425.1| unnamed protein product
  misc_feature (15)..(199): Homolog of NCBI NO: 8919875 NR Description: hypothetical protein [Capsella rubella]
  misc_feature (1)..(22): Homolog of NCBI NO: 8919875 NR Description: hypothetical protein [Capsella rubella]
  misc_feature (15)..(199): Homolog of NCBI NO: 7594582 NR Description: hypothetical protein [Arabidopsis thaliana] AT4g16770 [Arabidopsis thaliana] >gi|14596207|gb|AAK68831.1| protein [Arabidopsis thaliana] >gi|20148323|gb|AAM10052.1|
MKVLRNEKHRGYSPVLDQILDPENQVDVVLPGWRATMEKYHQEALRVCKAIARLLALALDLDTNYFDKPEMLGNPIAVMRLLRYEGMSDPLKGIFGCGAHSDYGMLTLLATDSVTGLQICKDKDVKPRKWEYVPSIKGAYIVNLGDLLERWSNGIFKSTLHRVLGNGQDRYSIPFFIEPSHDCLVECLPTCQSENNLPKS

SEQ ID NO: 86042 - protein, 164 aa, Arabidopsis thaliana
  peptide (1)..(164): Ceres Seq. ID no. 12685731
  misc_feature (39)..(143): Pfam Name: 2OG-Fe(II) oxygenase superfamily Pfam Description: 2OG-Fe(II) oxygenase superfamily
  misc_feature (1)..(163): Homolog of NCBI NO: 15231441 NR Description: putative protein; protein id: At3g46480.1
  misc_feature (1)..(163): Homolog of NCBI NO: 15231442 NR Description: putative protein; protein id: At3g46490.1
  misc_feature (1)..(163): Homolog of NCBI NO: 15219523 NR Description: hyoscyamine 6-dioxygenase hydroxylase, putative; id: At1g35190.1, supported by cDNA: 2551., supported by cDNA:
  misc_feature (1)..(163): Homolog of NCBI NO: 15231443 NR Description: putative protein; protein id: At3g46500.1
  misc_feature (1)..(163): Homolog of NCBI NO: 34906368 NR Description: unnamed protein product [Oryza sativa (japonica group)] >gi|9558506|dbj|BAB03425.1| unnamed protein product
  misc_feature (1)..(163): Homolog of NCBI NO: 8919875 NR Description: hypothetical protein [Capsella rubella]
  misc_feature (1)..(163): Homolog of NCBI NO: 7594582 NR Description: hypothetical protein [Arabidopsis thaliana] AT4g16770 [Arabidopsis thaliana] >gi|14596207|gb|AAK68831.1| protein [Arabidopsis thaliana] >gi|20148323|gb|AAM10052.1|
  misc_feature (1)..(163): Homolog of NCBI NO: 18414746 NR Description: gibberellin oxidase-like protein; protein id:
  misc_feature (1)..(163): Homolog of NCBI NO: 8919874 NR Description: hypothetical protein [Capsella rubella]
  misc_feature (1)..(163): Homolog of NCBI NO: 37536198 NR Description: putative gibberellin oxidase [Oryza sativa
MEKYHQEALRVCKAIARLLALALDLDTNYFDKPEMLGNPIAVMRLLRYEGMSDPLKGIFGCGAHSDYGMLTLLATDSVTGLQICKDKDVKPRKWEYVPSIKGAYIVNLGDLLERWSNGIFKSTLHRVLGNGQDRYSIPFFIEPSHDCLVECLPTCQSENNLPKS

SEQ ID NO: 86043 - DNA, 861 bp, Arabidopsis thaliana
  misc_feature (1)..(861): Ceres Seq. ID no. 12685743
  misc_feature: MA Experiment ID: 20000227 Result: Down-regulated in Transcription
  misc_feature: MA Experiment 20000227 PARAMETER Experiment Name: At_Root-Tips-vs-Tops_P Parameter: Tissue Value: Root Tips vs. Root Tops
  misc_feature: MA Experiment ID: 20000451 Result: Down-regulated in Transcription
  misc_feature: MA Experiment 20000451 PARAMETER Experiment Name: At_CS6879_Shoots-Roots_P Parameter: Age (day) Value: 14
  misc_feature: MA Experiment 20000451 PARAMETER Experiment Name: At_CS6879_Shoots-Roots_P Parameter: Organism Value: A. thaliana
  misc_feature: MA Experiment 20000451 PARAMETER Experiment Name: At_CS6879_Shoots-Roots_P Parameter: Plant Line Value: CS6879 vs. WS
  misc_feature: MA Experiment 20000451 PARAMETER Experiment Name: At_CS6879_Shoots-Roots_P Parameter: Tissue Value: Roots
atggagaacaaaactcaagaggaagcttcgaccatcaaagtttcatcccttacttgcatagatcttgccaacccgaactttcaacaatcagcggtttctcttaaacaggcatgtctagattgtggatttttctatgtcacaaatcatggtataagtgaggagttgaaggacgaggcttttgagcagagcaagaagttctttgctcttcctttggaggagaaaatgaaagtcttgagaaatgaaaagcatcgaggctattcacccgtccttgatcaaattttagatcctgagaatcaagtcgacggtgattacaaagaaagttttttcattggaatcgaagttgttttgccgggatggcgggcgaccatggagaaatatcatcaagaagcattgagggtttgcaaggctattgctagattattagcattggcgctcgacttggacacaaattactttgataaaccggaaatgctgggaaatcctatcgcagttatgcgtttgcttcgttacgaagggatgtctgatcccttgaaaggaatatttggatgtggagctcattctgattacggaatgctgactctcttagcaaccgatagtgtaaccgggctccagatatgcaaggataaggacgtgaagcctaggaagtgggaatatgtaccatctattaaaggagcatatatcgtcaatcttggagacttgttggagcgttggagcaacggcatttttaaatccacattgcatcgggtacttgggaatggtcaagaccgatattccattccattcttcatagaaccgagtcacgactgtctagtagaatgtctacctacctgccagtccgaaaacaaccttcccaaaagttaa

SEQ ID NO: 86044 - protein, 286 aa, Arabidopsis thaliana
  peptide (1)..(286): Ceres Seq. ID no. 12685744
  misc_feature (161)..(265): Pfam Name: 2OG-Fe(II) oxygenase superfamily Pfam Description: 2OG-Fe(II) oxygenase superfamily
  misc_feature (1)..(285): Homolog of NCBI NO: 15231441 NR Description: putative protein; protein id: At3g46480.1
  misc_feature (115)..(285): Homolog of NCBI NO: 15231442 NR Description: putative protein; protein id: At3g46490.1
  misc_feature (1)..(113): Homolog of NCBI NO: 15231442 NR Description: putative protein; protein id: At3g46490.1
  misc_feature (115)..(285): Homolog of NCBI NO: 15219523 NR Description: hyoscyamine 6-dioxygenase hydroxylase, putative; id: At1g35190.1, supported by cDNA: 2551., supported by cDNA:
  misc_feature (7)..(119): Homolog of NCBI NO: 15219523 NR Description: hyoscyamine 6-dioxygenase hydroxylase, putative; id: At1g35190.1, supported by cDNA: 2551., supported by cDNA:
  misc_feature (1)..(285): Homolog of NCBI NO: 15231443 NR Description: putative protein; protein id: At3g46500.1
  misc_feature (37)..(285): Homolog of NCBI NO: 34906368 NR Description: unnamed protein product [Oryza sativa (japonica group)] >gi|9558506|dbj|BAB03425.1| unnamed protein product
  misc_feature (17)..(285): Homolog of NCBI NO: 7594580 NR Description: hypothetical protein [Arabidopsis thaliana]
  misc_feature (14)..(285): Homolog of NCBI NO: 8919875 NR Description: hypothetical protein [Capsella rubella]
  misc_feature (17)..(285): Homolog of NCBI NO: 7594582 NR Description: hypothetical protein [Arabidopsis thaliana] AT4g16770 [Arabidopsis thaliana] >gi|14596207|gb|AAK68831.1| protein [Arabidopsis thaliana] >gi|20148323|gb|AAM10052.1|
MENKTQEEASTIKVSSLTCIDLANPNFQQSAVSLKQACLDCGFFYVTNHGISEELKDEAFEQSKKFFALPLEEKMKVLRNEKHRGYSPVLDQILDPENQVDGDYKESFFIGIEVVLPGWRATMEKYHQEALRVCKAIARLLALALDLDTNYFDKPEMLGNPIAVMRLLRYEGMSDPLKGIFGCGAHSDYGMLTLLATDSVTGLQICKDKDVKPRKWEYVPSIKGAYIVNLGDLLERWSNGIFKSTLHRVLGNGQDRYSIPFFIEPSHDCLVECLPTCQSENNLPKS

SEQ ID NO: 86045 - protein, 212 aa, Arabidopsis thaliana
  peptide (1)..(212): Ceres Seq. ID no. 12685745
  misc_feature (87)..(191): Pfam Name: 2OG-Fe(II) oxygenase superfamily Pfam Description: 2OG-Fe(II) oxygenase superfamily
  misc_feature (1)..(211): Homolog of NCBI NO: 15231441 NR Description: putative protein; protein id: At3g46480.1
  misc_feature (41)..(211): Homolog of NCBI NO: 15231442 NR Description: putative protein; protein id: At3g46490.1
  misc_feature (1)..(39): Homolog of NCBI NO: 15231442 NR Description: putative protein; protein id: At3g46490.1
  misc_feature (41)..(211): Homolog of NCBI NO: 15219523 NR Description: hyoscyamine 6-dioxygenase hydroxylase, putative; id: At1g35190.1, supported by cDNA: 2551., supported by cDNA:
  misc_feature (1)..(45): Homolog of NCBI NO: 15219523 NR Description: hyoscyamine 6-dioxygenase hydroxylase, putative; id: At1g35190.1, supported by cDNA: 2551., supported by cDNA:
  misc_feature (1)..(211): Homolog of NCBI NO: 15231443 NR Description: putative protein; protein id: At3g46500.1
  misc_feature (1)..(211): Homolog of NCBI NO: 34906368 NR Description: unnamed protein product [Oryza sativa (japonica group)] >gi|9558506|dbj|BAB03425.1| unnamed protein product
  misc_feature (1)..(211): Homolog of NCBI NO: 7594580 NR Description: hypothetical protein [Arabidopsis thaliana]
  misc_feature (1)..(211): Homolog of NCBI NO: 8919875 NR Description: hypothetical protein [Capsella rubella]
  misc_feature (1)..(211): Homolog of NCBI NO: 7594582 NR Description: hypothetical protein [Arabidopsis thaliana] AT4g16770 [Arabidopsis thaliana] >gi|14596207|gb|AAK68831.1| protein [Arabidopsis thaliana] >gi|20148323|gb|AAM10052.1|
MKVLRNEKHRGYSPVLDQILDPENQVDGDYKESFFIGIEVVLPGWRATMEKYHQEALRVCKAIARLLALALDLDTNYFDKPEMLGNPIAVMRLLRYEGMSDPLKGIFGCGAHSDYGMLTLLATDSVTGLQICKDKDVKPRKWEYVPSIKGAYIVNLGDLLERWSNGIFKSTLHRVLGNGQDRYSIPFFIEPSHDCLVECLPTCQSENNLPKS

SEQ ID NO: 86046 - protein, 164 aa, Arabidopsis thaliana; identical to SEQ ID NO: 86042
  peptide (1)..(164): Ceres Seq. ID no. 12685746
  misc_feature (39)..(143): Pfam Name: 2OG-Fe(II) oxygenase superfamily Pfam Description: 2OG-Fe(II) oxygenase superfamily
  misc_feature (1)..(163): Homolog of NCBI NO: 15231441 NR Description: putative protein; protein id: At3g46480.1
  misc_feature (1)..(163): Homolog of NCBI NO: 15231442 NR Description: putative protein; protein id: At3g46490.1
  misc_feature (1)..(163): Homolog of NCBI NO: 15219523 NR Description: hyoscyamine 6-dioxygenase hydroxylase, putative; id: At1g35190.1, supported by cDNA: 2551., supported by cDNA:
  misc_feature (1)..(163): Homolog of NCBI NO: 15231443 NR Description: putative protein; protein id: At3g46500.1
  misc_feature (1)..(163): Homolog of NCBI NO: 34906368 NR Description: unnamed protein product [Oryza sativa (japonica group)] >gi|9558506|dbj|BAB03425.1| unnamed protein product
  misc_feature (1)..(163): Homolog of NCBI NO: 7594580 NR Description: hypothetical protein [Arabidopsis thaliana]
  misc_feature (1)..(163): Homolog of NCBI NO: 8919875 NR Description: hypothetical protein [Capsella rubella]
  misc_feature (1)..(163): Homolog of NCBI NO: 7594582 NR Description: hypothetical protein [Arabidopsis thaliana] AT4g16770 [Arabidopsis thaliana] >gi|14596207|gb|AAK68831.1| protein [Arabidopsis thaliana] >gi|20148323|gb|AAM10052.1|
  misc_feature (1)..(163): Homolog of NCBI NO: 18414746 NR Description: gibberellin oxidase-like protein; protein id:
  misc_feature (1)..(163): Homolog of NCBI NO: 8919874 NR Description: hypothetical protein [Capsella rubella]

SEQ ID NO: 86047 - DNA, 900 bp, Arabidopsis thaliana
  misc_feature (1)..(900): Ceres Seq. ID no. 12685757
  misc_feature: MA Experiment ID: 20000227 Result: Down-regulated in Transcription
  misc_feature: MA Experiment 20000227 PARAMETER Experiment Name: At_Root-Tips-vs-Tops_P Parameter: Tissue Value: Root Tips vs. Root Tops
  misc_feature: MA Experiment ID: 20000573 Result: Up-regulated in Transcription
  misc_feature: MA Experiment 20000573 PARAMETER Experiment Name: At_100uM_ABA_Mutants__P Parameter: Organism Value: A. thaliana
  misc_feature: MA Experiment 20000573 PARAMETER Experiment Name: At_100uM_ABA_Mutants__P Parameter: Plant Line Value: CS22 vs. Ler wt
  misc_feature: MA Experiment 20000573 PARAMETER Experiment Name: At_100uM_ABA_Mutants__P Parameter: Timepoint (hr) Value: N/A
  misc_feature: MA Experiment 20000573 PARAMETER Experiment Name: At_100uM_ABA_Mutants__P Parameter: Tissue Value: Whole Plant
  misc_feature: MA Experiment 20000573 PARAMETER Experiment Name: At_100uM_ABA_Mutants__P Parameter: Treatment Value: None
  misc_feature: MA Experiment ID: 20000574 Result: Up-regulated in Transcription
  misc_feature: MA Experiment 20000574 PARAMETER Experiment Name: At_100uM_ABA_Mutants__P Parameter: Organism Value: A. thaliana
  misc_feature: MA Experiment 20000574 PARAMETER Experiment Name: At_100uM_ABA_Mutants__P Parameter: Plant Line Value: CS23 vs. Ler wt
  misc_feature: MA Experiment 20000574 PARAMETER Experiment Name: At_100uM_ABA_Mutants__P Parameter: Timepoint (hr) Value: N/A
  misc_feature: MA Experiment 20000574 PARAMETER Experiment Name: At_100uM_ABA_Mutants__P Parameter: Tissue Value: Whole Plant
  misc_feature: MA Experiment 20000574 PARAMETER Experiment Name: At_100uM_ABA_Mutants__P Parameter: Treatment Value: None
atggagaacaaaactcaagaggaagcttcgaccattaatgtttcatcccttgcttgtatagatctcgccaactccaatcttcatcgatcagctgcttcgcttaagcaggcatgtctagattgtggatttttctatgtcacaaatcatggtataagtgaggagttaaaggacgaggctttcgagcaaagcaagaagttctttgctcttcctttggacgagaagatgaaagtcttgaaaaacgaaaaacatcaaggctattcacccgtccttagtcaaatctctgataaccaaatccatggggattacaaagaaagttttttcattggaatcgaaggctccaacgatacaccattctgtcgcgctaacatttggcctaaccctgatgttttgtcgggatggcaggcgaccatggagaaatatcatcaagaagcattgagggtttgtaaggctattgctagagtattggcattggcgctcaacgtggatggagattactttgatacaccggaaatgcttggaaatcccctcacatttatgcgcttgcttcactatgaagggatgtctgatccctcaaaaggaatatatggctgcgggccacattctgattttggtatgatgactctcttaggaacggatagtgtaatggggctccagatatgcaaggatagagacgtgaagcctaggaagtgggaatatatactatcgataaaaggggcatatatcgtgaatattggtgacttgctagagcgttggagcaatggcatttttaaatccacattgcatcgggtacttgggaatggtcaagaccgatattccattgcattctttctgcaacctagtcacgactgtatagtagaatgtcttcctacctgccagtctgaaaacaaccctcccaagtaa

SEQ ID NO: 86048 - protein, 299 aa, Arabidopsis thaliana
  peptide (1)..(299): Ceres Seq. ID no. 12685758
  misc_feature (175)..(279): Pfam Name: 2OG-Fe(II) oxygenase superfamily Pfam Description: 2OG-Fe(II) oxygenase superfamily
  misc_feature (1)..(299): Homolog of NCBI NO: 15231443 NR Description: putative protein; protein id: At3g46500.1
  misc_feature (1)..(299): Homolog of NCBI NO: 15231442 NR Description: putative protein; protein id: At3g46490.1
  misc_feature (129)..(299): Homolog of NCBI NO: 15231441 NR Description: putative protein; protein id: At3g46480.1
  misc_feature (1)..(98): Homolog of NCBI NO: 15231441 NR Description: putative protein; protein id: At3g46480.1
  misc_feature (7)..(299): Homolog of NCBI NO: 15219523 NR Description: hyoscyamine 6-dioxygenase hydroxylase, putative; id: At1g35190.1, supported by cDNA: 2551., supported by cDNA:
  misc_feature (128)..(299): Homolog of NCBI NO: 34906368 NR Description: unnamed protein product [Oryza sativa (japonica group)] >gi|9558506|dbj|BAB03425.1| unnamed protein product
  misc_feature (37)..(99): Homolog of NCBI NO: 34906368 NR Description: unnamed protein product [Oryza sativa (japonica group)] >gi|9558506|dbj|BAB03425.1| unnamed protein product
  misc_feature (17)..(299): Homolog of NCBI NO: 27311283 NR Description: putative gibberellin 20-oxidase [Oryza sativa
  misc_feature (17)..(299): Homolog of NCBI NO: 37536198 NR Description: putative gibberellin oxidase [Oryza sativa
  misc_feature (13)..(299): Homolog of NCBI NO: 37536200 NR Description: putative gibberellin 20-oxidase [Oryza sativa
MENKTQEEASTINVSSLACIDLANSNLHRSAASLKQACLDCGFFYVTNHGISEELKDEAFEQSKKFFALPLDEKMKVLKNEKHQGYSPVLSQISDNQIHGDYKESFFIGIEGSNDTPFCRANIWPNPDVLSGWQATMEKYHQEALRVCKAIARVLALALNVDGDYFDTPEMLGNPLTFMRLLHYEGMSDPSKGIYGCGPHSDFGMMTLLGTDSVMGLQICKDRDVKPRKWEYILSIKGAYIVNIGDLLERWSNGIFKSTLHRVLGNGQDRYSIAFFLQPSHDCIVECLPTCQSENNPPK

SEQ ID NO: 86049 - protein, 225 aa, Arabidopsis thaliana
  peptide (1)..(225): Ceres Seq. ID no. 12685759
  misc_feature (101)..(205): Pfam Name: 2OG-Fe(II) oxygenase superfamily Pfam Description: 2OG-Fe(II) oxygenase superfamily
  misc_feature (1)..(225): Homolog of NCBI NO: 15231443 NR Description: putative protein; protein id: At3g46500.1
  misc_feature (1)..(225): Homolog of NCBI NO: 15231442 NR Description: putative protein; protein id: At3g46490.1
  misc_feature (55)..(225): Homolog of NCBI NO: 15231441 NR Description: putative protein; protein id: At3g46480.1
  misc_feature (1)..(24): Homolog of NCBI NO: 15231441 NR Description: putative protein; protein id: At3g46480.1
  misc_feature (1)..(225): Homolog of NCBI NO: 15219523 NR Description: hyoscyamine 6-dioxygenase hydroxylase, putative; id: At1g35190.1, supported by cDNA: 2551., supported by cDNA:
  misc_feature (54)..(225): Homolog of NCBI NO: 34906368 NR Description: unnamed protein product [Oryza sativa (japonica group)] >gi|9558506|dbj|BAB03425.1| unnamed protein product
  misc_feature (1)..(25): Homolog of NCBI NO: 34906368 NR Description: unnamed protein product [Oryza sativa (japonica group)] >gi|9558506|dbj|BAB03425.1| unnamed protein product
  misc_feature (1)..(225): Homolog of NCBI NO: 27311283 NR Description: putative gibberellin 20-oxidase [Oryza sativa
  misc_feature (1)..(225): Homolog of NCBI NO: 37536198 NR Description: putative gibberellin oxidase [Oryza sativa
  misc_feature (1)..(225): Homolog of NCBI NO: 37536200 NR Description: putative gibberellin 20-oxidase [Oryza sativa
MKVLKNEKHQGYSPVLSQISDNQIHGDYKESFFIGIEGSNDTPFCRANIWPNPDVLSGWQATMEKYHQEALRVCKAIARVLALALNVDGDYFDTPEMLGNPLTFMRLLHYEGMSDPSKGIYGCGPHSDFGMMTLLGTDSVMGLQICKDRDVKPRKWEYILSIKGAYIVNIGDLLERWSNGIFKSTLHRVLGNGQDRYSIAFFLQPSHDCIVECLPTCQSENNPPK

SEQ ID NO: 86050 - protein, 163 aa, Arabidopsis thaliana
  peptide (1)..(163): Ceres Seq. ID no. 12685760
  misc_feature (39)..(143): Pfam Name: 2OG-Fe(II) oxygenase superfamily Pfam Description: 2OG-Fe(II) oxygenase superfamily
  misc_feature (1)..(163): Homolog of NCBI NO: 15231443 NR Description: putative protein; protein id: At3g46500.1
  misc_feature (1)..(163): Homolog of NCBI NO: 15231442 NR Description: putative protein; protein id: At3g46490.1
  misc_feature (1)..(163): Homolog of NCBI NO: 15231441 NR Description: putative protein; protein id: At3g46480.1
  misc_feature (1)..(163): Homolog of NCBI NO: 15219523 NR Description: hyoscyamine 6-dioxygenase hydroxylase, putative; id: At1g35190.1, supported by cDNA: 2551., supported by cDNA:
  misc_feature (1)..(163): Homolog of NCBI NO: 34906368 NR Description: unnamed protein product [Oryza sativa (japonica group)] >gi|9558506|dbj|BAB03425.1| unnamed protein product
  misc_feature (1)..(163): Homolog of NCBI NO: 27311283 NR Description: putative gibberellin 20-oxidase [Oryza sativa
  misc_feature (1)..(163): Homolog of NCBI NO: 37536198 NR Description: putative gibberellin oxidase [Oryza sativa
  misc_feature (1)..(163): Homolog of NCBI NO: 37536200 NR Description: putative gibberellin 20-oxidase [Oryza sativa
  misc_feature (1)..(163): Homolog of NCBI NO: 7594580 NR Description: hypothetical protein [Arabidopsis thaliana]
  misc_feature (1)..(163): Homolog of NCBI NO: 7594582 NR Description: hypothetical protein [Arabidopsis thaliana] AT4g16770 [Arabidopsis thaliana] >gi|14596207|gb|AAK68831.1| protein [Arabidopsis thaliana] >gi|20148323|gb|AAM10052.1|
MEKYHQEALRVCKAIARVLALALNVDGDYFDTPEMLGNPLTFMRLLHYEGMSDPSKGIYGCGPHSDFGMMTLLGTDSVMGLQICKDRDVKPRKWEYILSIKGAYIVNIGDLLERWSNGIFKSTLHRVLGNGQDRYSIAFFLQPSHDCIVECLPTCQSENNPPK

SEQ ID NO: 86051 - DNA, 1329 bp, Arabidopsis thaliana
  misc_feature (1)..(1329): Ceres Seq. ID no. 12685798
  misc_feature: MA Experiment ID: 20000306 Result: Up-regulated in Transcription
  misc_feature: MA Experiment 20000306 PARAMETER Experiment Name: At_Germinating_Seeds_Sub_P Parameter: Age (hr) Value: 6 vs. 0
  misc_feature: MA Experiment 20000306 PARAMETER Experiment Name: At_Germinating_Seeds_Sub_P Parameter: Organism Value: A. thaliana
  misc_feature: MA Experiment 20000306 PARAMETER Experiment Name: At_Germinating_Seeds_Sub_P Parameter: Plant Line Value: WS
  misc_feature: MA Experiment 20000306 PARAMETER Experiment Name: At_Germinating_Seeds_Sub_P Parameter: Tissue Value: Germinating Seeds
  misc_feature: MA Experiment ID: 20000307 Result: Up-regulated in Transcription
  misc_feature: MA Experiment 20000307 PARAMETER Experiment Name: At_Germinating_Seeds_Sub_P Parameter: Age (hr) Value: 24 vs. 0
  misc_feature: MA Experiment 20000307 PARAMETER Experiment Name: At_Germinating_Seeds_Sub_P Parameter: Organism Value: A. thaliana
  misc_feature: MA Experiment 20000307 PARAMETER Experiment Name: At_Germinating_Seeds_Sub_P Parameter: Plant Line Value: WS
  misc_feature: MA Experiment 20000307 PARAMETER Experiment Name: At_Germinating_Seeds_Sub_P Parameter: Tissue Value: Germinating Seeds
  misc_feature: MA Experiment ID: 20000314 Result: Up-regulated in Transcription
  misc_feature: MA Experiment 20000314 PARAMETER Experiment Name: At_14day_Shoots-Roots_Sub_P Parameter: Age (day) Value: 14
  misc_feature: MA Experiment 20000314 PARAMETER Experiment Name: At_14day_Shoots-Roots_Sub_P Parameter: Organism Value: A. thaliana
  misc_feature: MA Experiment 20000314 PARAMETER Experiment Name: At_14day_Shoots-Roots_Sub_P Parameter: Plant Line Value: WS
  misc_feature: MA Experiment 20000314 PARAMETER Experiment Name: At_14day_Shoots-Roots_Sub_P Parameter: Tissue Value: Roots vs. Whole Plant
  misc_feature: MA Experiment ID: 20000315 Result: Down-regulated in Transcription
  misc_feature: MA Experiment 20000315 PARAMETER Experiment Name: At_14day_Shoots-Roots_Sub_P Parameter: Age (day) Value: 14
  misc_feature: MA Experiment 20000315 PARAMETER Experiment Name: At_14day_Shoots-Roots_Sub_P Parameter: Organism Value: A. thaliana
  misc_feature: MA Experiment 20000315 PARAMETER Experiment Name: At_14day_Shoots-Roots_Sub_P Parameter: Plant Line Value: WS
  misc_feature: MA Experiment 20000315 PARAMETER Experiment Name: At_14day_Shoots-Roots_Sub_P Parameter: Tissue Value: Shoots vs. Whole Plant
  misc_feature: MA Experiment ID: 20000347 Result: Up-regulated in Transcription
  misc_feature: MA Experiment 20000347 PARAMETER Experiment Name: At_2mM_SA_Sub_P Parameter: Age (day) Value: 14
  misc_feature: MA Experiment 20000347 PARAMETER Experiment Name: At_2mM_SA_Sub_P Parameter: Organism Value: A. thaliana
  misc_feature: MA Experiment 20000347 PARAMETER Experiment Name: At_2mM_SA_Sub_P Parameter: Plant Line Value: WS
  misc_feature: MA Experiment 20000347 PARAMETER Experiment Name: At_2mM_SA_Sub_P Parameter: Timepoint (hr) Value: 6
  misc_feature: MA Experiment 20000347 PARAMETER Experiment Name: At_2mM_SA_Sub_P Parameter: Tissue Value: Aerial
  misc_feature: MA Experiment 20000347 PARAMETER Experiment Name: At_2mM_SA_Sub_P Parameter: Treatment Value: 2mM SA vs. No Treatment
  misc_feature: MA Experiment ID: 20000349 Result: Up-regulated in Transcription
  misc_feature: MA Experiment 20000349 PARAMETER Experiment Name: At_100uM_ABA_Sub_P Parameter: Age (day) Value: 14
  misc_feature: MA Experiment 20000349 PARAMETER Experiment Name: At_100uM_ABA_Sub_P Parameter: Organism Value: A. thaliana
  misc_feature: MA Experiment 20000349 PARAMETER Experiment Name: At_100uM_ABA_Sub_P Parameter: Plant Line Value: WS
  misc_feature: MA Experiment 20000349 PARAMETER Experiment Name: At_100uM_ABA_Sub_P Parameter: Timepoint (hr) Value: 6
  misc_feature: MA Experiment 20000349 PARAMETER Experiment Name: At_100uM_ABA_Sub_P Parameter: Tissue Value: Aerial
  misc_feature: MA Experiment 20000349 PARAMETER Experiment Name: At_100uM_ABA_Sub_P Parameter: Treatment Value: 100uM ABA vs. No Treatment
  misc_feature: MA Experiment ID: 20000355 Result: Down-regulated in Transcription
  misc_feature: MA Experiment 20000355 PARAMETER Experiment Name: At_Siliques_Sub_P Parameter: Age (day) Value: 21
  misc_feature: MA Experiment 20000355 PARAMETER Experiment Name: At_Siliques_Sub_P Parameter: Organism Value: A. thaliana
  misc_feature: MA Experiment 20000355 PARAMETER Experiment Name: At_Siliques_Sub_P Parameter: Plant Line Value: WS
  misc_feature: MA Experiment 20000355 PARAMETER Experiment Name: At_Siliques_Sub_P Parameter: Tissue Value: Less Than 5mm Siliques vs. Whole Plant
  misc_feature: MA Experiment ID: 20000440 Result: Down-regulated in Transcription
  misc_feature: MA Experiment 20000440 PARAMETER Experiment Name: At_Closed-Flower__Sub_P Parameter: Tissue Value: Closed Flower vs. Whole Plant
atggagaaaagggtagagaagagaaggattgtgttagttccggttgctgcacaaggacatgtaaccccaatgatgcagcttgggaaagcccttcaatcaaagggcttcttaattactgttgctcagagacagttcaatcaaataggctcatcattgcaacactttcctggttttgactttgtcaccataccagaaagcttacctcagtctgaatctaagaaactaggaccagctgagtatcttatgaatctcaacaaaacaagcgaggcaagcttcaaggagtgtataagtcagttatcgatgcaacaaggcaatgatatagcatgtatcatctatgacaagcttatgtacttctgtgaagcagcagctaaggagtttaagattcctagtgttatcttcagcactagcagtgctacaattcaagtttgctactgtgttttaagtgaactcagtgccgagaagttcttgatcgacatgaaaggtttgcatcctttaaggtacaaagacctaccaacttcaggatttggaccattagagccacttttggagatgtgtagggaagtagttaacaaaagaacagcttccgctgttatcatcaacacggcgagctgtctagagagcttgtctctgtcatggctgcaacaagaacttggaattccagtgtatccattaggccctcttcacattacagcttcatcgccgggacctagtttactgcaagaggacatgagctgcattgaatggctgaacaagcagaaaccaaggtcagtcatatacataagcttgggaaccaaagctcacatggagaccaaggagatgttagagatggcctggggattgttgaatagcaaccaacctttcttatgggtcatccgacctggctctgttgcaggcttcgagtggatagagttattaccagaggaagtcattaagatggtaacagaaagaggatacatagcgaaatgggcaccgcagatagaagtacttggacatcctgcagtgggaggattctggagccactgtggatggaactcaacactcgagagtattgtggaaggagtcccaatgatttgcaggcctttacaaggcgaacaaaagttaaatgcgatgtatatagaaagtgtttggaaaatagggattcaacttgaaggtgaagtggaaagggaaggtgtagagagagctgtgaagaggttgatcatagatgaagaaggtgcagccatgagggagagggctcttgatttaaaagagaagctcaatgcctcggtaagaagtggaggctcctcatacaacgcactggatgagcttgtcaagttcttgaatacagagtga

SEQ ID NO: 86052 - protein, 442 aa, Arabidopsis thaliana
  peptide (1)..(442): Ceres Seq. ID no. 12685799
  misc_feature (9)..(437): Pfam Name: UDP-glucoronosyl and UDP-glucosyl transferase Pfam Description: UDP-glucoronosyl and UDP-glucosyl transferase
  misc_feature (1)..(442): Homolog of NCBI NO: 15232620 NR Description: glucuronosyl transferase-like protein; protein At3g46690.1 [Arabidopsis thaliana] >gi|7433909|pir||T12981
  misc_feature (1)..(442): Homolog of NCBI NO: 26449469 NR Description: putative glucuronosyl transferase [Arabidopsis
  misc_feature (1)..(439): Homolog of NCBI NO: 15232619 NR Description: glucosyltransferase-like protein; protein id: [Arabidopsis thaliana] >gi|11258173|pir||T45605
  misc_feature (1)..(442): Homolog of NCBI NO: 15232623 NR Description: glucuronosyl transferase-like protein; protein At3g46720.1 [Arabidopsis thaliana] >gi|7433908|pir||T12978
  misc_feature (1)..(442): Homolog of NCBI NO: 15232598 NR Description: glucosyltransferase-like protein; protein id:
  misc_feature (1)..(439): Homolog of NCBI NO: 30697251 NR Description: glycosyltransferase family [Arabidopsis thaliana]
  misc_feature (2)..(436): Homolog of NCBI NO: 15238467 NR Description: glucuronosyl transferase - like protein; protein
  misc_feature (1)..(441): Homolog of NCBI NO: 11258169 NR Description: glucosyltransferase-like protein - Arabidopsis
  misc_feature (1)..(441): Homolog of NCBI NO: 18408251 NR Description: glucosyltransferase-like protein; protein id: supported by cDNA: gi_15081808 [Arabidopsis thaliana]
  misc_feature (4)..(436): Homolog of NCBI NO: 34900682 NR Description: glucuronosyl transferase-like protein [Oryza
MEKRVEKRRIVLVPVAAQGHVTPMMQLGKALQSKGFLITVAQRQFNQIGSSLQHFPGFDFVTIPESLPQSESKKLGPAEYLMNLNKTSEASFKECISQLSMQQGNDIACIIYDKLMYFCEAAAKEFKIPSVIFSTSSATIQVCYCVLSELSAEKFLIDMKGLHPLRYKDLPTSGFGPLEPLLEMCREVVNKRTASAVIINTASCLESLSLSWLQQELGIPVYPLGPLHITASSPGPSLLQEDMSCIEWLNKQKPRSVIYISLGTKAHMETKEMLEMAWGLLNSNQPFLWVIRPGSVAGFEWIELLPEEVIKMVTERGYIAKWAPQIEVLGHPAVGGFWSHCGWNSTLESIVEGVPMICRPLQGEQKLNAMYIESVWKIGIQLEGEVEREGVERAVKRLIIDEEGAAMRERALDLKEKLNASVRSGGSSYNALDELVKFLNTE

SEQ ID NO: 86053 - protein, 419 aa, Arabidopsis thaliana
  peptide (1)..(419): Ceres Seq. ID no. 12685800
  misc_feature (1)..(414): Pfam Name: UDP-glucoronosyl and UDP-glucosyl transferase Pfam Description: UDP-glucoronosyl and UDP-glucosyl transferase
  misc_feature (1)..(419): Homolog of NCBI NO: 15232620 NR Description: glucuronosyl transferase-like protein; protein At3g46690.1 [Arabidopsis thaliana] >gi|7433909|pir||T12981
  misc_feature (1)..(419): Homolog of NCBI NO: 26449469 NR Description: putative glucuronosyl transferase [Arabidopsis
  misc_feature (1)..(416): Homolog of NCBI NO: 15232619 NR Description: glucosyltransferase-like protein; protein id: [Arabidopsis thaliana] >gi|11258173|pir||T45605
  misc_feature (1)..(419): Homolog of NCBI NO: 15232623 NR Description: glucuronosyl transferase-like protein; protein At3g46720.1 [Arabidopsis thaliana] >gi|7433908|pir||T12978
  misc_feature (1)..(419): Homolog of NCBI NO: 15232598 NR Description: glucosyltransferase-like protein; protein id:
  misc_feature (1)..(416): Homolog of NCBI NO: 30697251 NR Description: glycosyltransferase family [Arabidopsis thaliana]
  misc_feature (1)..(413): Homolog of NCBI NO: 15238467 NR Description: glucuronosyl transferase - like protein; protein
  misc_feature (1)..(418): Homolog of NCBI NO: 11258169 NR Description: glucosyltransferase-like protein - Arabidopsis
  misc_feature (1)..(418): Homolog of NCBI NO: 18408251 NR Description: glucosyltransferase-like protein; protein id: supported by cDNA: gi_15081808 [Arabidopsis thaliana]
  misc_feature (1)..(413): Homolog of NCBI NO: 34900682 NR Description: glucuronosyl transferase-like protein [Oryza
MMQLGKALQSKGFLITVAQRQFNQIGSSLQHFPGFDFVTIPESLPQSESKKLGPAEYLMNLNKTSEASFKECISQLSMQQGNDIACIIYDKLMYFCEAAAKEFKIPSVIFSTSSATIQVCYCVLSELSAEKFLIDMKGLHPLRYKDLPTSGFGPLEPLLEMCREVVNKRTASAVIINTASCLESLSLSWLQQELGIPVYPLGPLHITASSPGPSLLQEDMSCIEWLNKQKPRSVIYISLGTKAHMETKEMLEMAWGLLNSNQPFLWVIRPGSVAGFEWIELLPEEVIKMVTERGYIAKWAPQIEVLGHPAVGGFWSHCGWNSTLESIVEGVPMICRPLQGEQKLNAMYIESVWKIGIQLEGEVEREGVERAVKRLIIDEEGAAMRERALDLKEKLNASVRSGGSSYNALDELVKFLNTE

SEQ ID NO: 86054 - protein, 418 aa, Arabidopsis thaliana
  peptide (1)..(418): Ceres Seq. ID no. 12685801
  misc_feature (1)..(413): Pfam Name: UDP-glucoronosyl and UDP-glucosyl transferase Pfam Description: UDP-glucoronosyl and UDP-glucosyl transferase
  misc_feature (1)..(418): Homolog of NCBI NO: 15232620 NR Description: glucuronosyl transferase-like protein; protein At3g46690.1 [Arabidopsis thaliana] >gi|7433909|pir||T12981
  misc_feature (1)..(418): Homolog of NCBI NO: 26449469 NR Description: putative glucuronosyl transferase [Arabidopsis
  misc_feature (1)..(415): Homolog of NCBI NO: 15232619 NR Description: glucosyltransferase-like protein; protein id: [Arabidopsis thaliana] >gi|11258173|pir||T45605
  misc_feature (1)..(418): Homolog of NCBI NO: 15232623 NR Description: glucuronosyl transferase-like protein; protein At3g46720.1 [Arabidopsis thaliana] >gi|7433908|pir||T12978
  misc_feature (1)..(418): Homolog of NCBI NO: 15232598 NR Description: glucosyltransferase-like protein; protein id:
  misc_feature (1)..(415): Homolog of NCBI NO: 30697251 NR Description: glycosyltransferase family [Arabidopsis thaliana]
  misc_feature (1)..(412): Homolog of NCBI NO: 15238467 NR Description: glucuronosyl transferase - like protein; protein
  misc_feature (1)..(417): Homolog of NCBI NO: 11258169 NR Description: glucosyltransferase-like protein - Arabidopsis
  misc_feature (1)..(417): Homolog of NCBI NO: 18408251 NR Description: glucosyltransferase-like protein; protein id: supported by cDNA: gi_15081808 [Arabidopsis thaliana]
  misc_feature (1)..(412): Homolog of NCBI NO: 34900682 NR Description: glucuronosyl transferase-like protein [Oryza
MQLGKALQSKGFLITVAQRQFNQIGSSLQHFPGFDFVTIPESLPQSESKKLGPAEYLMNLNKTSEASFKECISQLSMQQGNDIACIIYDKLMYFCEAAAKEFKIPSVIFSTSSATIQVCYCVLSELSAEKFLIDMKGLHPLRYKDLPTSGFGPLEPLLEMCREVVNKRTASAVIINTASCLESLSLSWLQQELGIPVYPLGPLHITASSPGPSLLQEDMSCIEWLNKQKPRSVIYISLGTKAHMETKEMLEMAWGLLNSNQPFLWVIRPGSVAGFEWIELLPEEVIKMVTERGYIAKWAPQIEVLGHPAVGGFWSHCGWNSTLESIVEGVPMICRPLQGEQKLNAMYIESVWKIGIQLEGEVEREGVERAVKRLIIDEEGAAMRERALDLKEKLNASVRSGGSSYNALDELVKFLNTE

SEQ ID NO: 86055 - DNA, 1962 bp, Arabidopsis thaliana
  misc_feature (1)..(1962): Ceres Seq. ID no. 12685802
  misc_feature: MA Experiment ID: 20000227 Result: Up-regulated in Transcription
  misc_feature: MA Experiment 20000227 PARAMETER Experiment Name: At_Root-Tips-vs-Tops_P Parameter: Tissue Value: Root Tips vs. Root Tops
atgtcgcgtcaactagaccccgtcgctgagctcgaaagcttaaaaacacatgttgatcattctggaaatcctagcttctcaacacttagccagcgtcaccaatctggtgaagcttcaaagcggtcaccttctggttcaccaagaaaagaaaatgatggagaacattctcaccataagaaatctttgttctctaaaatgaaggataaggcgaaaaaactgcagcacagtctcagcaccaagaagagacatgatgaagaaggtgatgcaaccatgtcaccgttttgcagatccgaagatcatgaagttagagaagttggttatgcgtcattgtcaccacgtgacaagtcaaaagaccgtaaagtcagagaagaaggaggagaagaagaagaagaagatcctgaatatcttggagccccaatgtatgaatcaaagaaggcacctgaagagttaaaggagacagcaaggcagcatccccgagagaatcctgtgatcactgagacaaatgtcttgtctgttctcccagccaaacaggacgctgaacaagaacaaaaagattgtaatggttccaaaacagaacatcctgtgatctctgagaagaatgttttatctgatgtcaagcaagagaagcctgctgattctgacacaacaacaatagtaacagaatcgtctgagaagacaaggaaagagtgcacgagccagcaggaacctattagtccaagcaagacagtaacagaaactgtgacagagaagctagcacctggttatgctaaagtctctgacgcaactcaagctataactaagaagattcaagatatggcttttccagaaccaacagagcgagaagaagaggtaaatgatgttgcagaaatcaacactgccggaactaaccagcccactggcttcaataccaaggtatgggacaaaggcgtatcaatgaaggaatacatatcgcagaagtttgagcctagcgaagacgatagagaactttctcgagtgatatctaaagctatcagtcctcgtaaaggttcttctcagacttctagttttggtgcagccacaaacatggcacctgcttcaaattcagcagacaacaaagctcctcttgtagccaacacaaatgaaaaggctaacgggacagtctacaaaggaaagctctcttctaatgcacagattgctgtaaagagagtttctttagatgcagaacaagataccaaacaccttgtttctcagattgttggtattgggaagttaaggcacaagaaccttgtgcagctcttaggatactgcagaagaaaaggtgaattactcttggtctatgattatatgccttatggaaatcttgatgatttcttgtttaatgaggaaaggcctaatctaagttggtcacaaaggtttcatataatcaaaggagttgcttcagctcttctttatttgcatgaacagatcgttcttcaccgagatgtaaaagccgcaaatgtactcttggatgaggatttaaacgggcgactagattacggtctagcaagatttggtacaaacaggaacccaatgctaggaagcgtaggttatgtggctccagagctaataataacaggaatgccgacaaccaaagccgatgtttattcattcggagcattactacttgagtttgcttgtggaagaatgttcattgagtatccagggaagcctgaagagtttaacttaatcagctgggtgtgtcaatgctggaaaagagggaacttggttggcgcccgagacgctagattggaaggagactacgtctgcaaggagatagagatggtactaaagcttggtctactatgtgcacagtacaatccagaggataggcctagtatgtcccaagtggtaaactatcttgaaggaaatgatgttttgcctgagatgcctccagacactcctgggatcagtattccaacaccgtaccatgaagttcttgcgtag

SEQ ID NO: 86056 - protein, 653 aa, Arabidopsis thaliana
  peptide (1)..(653): Ceres Seq. ID no. 12685803
  misc_feature (1)..(374): Homolog of NCBI NO: 15232627 NR Description: hypothetical protein; protein id: At3g46750.1
  misc_feature (375)..(653): Homolog of NCBI NO: 15232629 NR Description: receptor-like protein kinase; protein id: [Arabidopsis thaliana] >gi|7434319|pir||T12973 protein kinase
  misc_feature (378)..(652): Homolog of NCBI NO: 9759248 NR Description: receptor-like protein kinase-like protein
  misc_feature (378)..(652): Homolog of NCBI NO: 15237850 NR Description: receptor-like protein kinase; protein id:
  misc_feature (378)..(652): Homolog of NCBI NO: 15237849 NR Description: receptor-like protein kinase; protein id: [Arabidopsis thaliana] >gi|9759247|dbj|BAB09771.1|
  misc_feature (378)..(647): Homolog of NCBI NO: 15230698 NR Description: receptor like protein kinase; protein id:
  misc_feature (378)..(647): Homolog of NCBI NO: 15230700 NR Description: receptor like protein kinase; protein id:
  misc_feature (378)..(647): Homolog of NCBI NO: 15230670 NR Description: receptor-like protein kinase; protein id:
  misc_feature (378)..(635): Homolog of NCBI NO: 38112427 NR Description: lectin-like receptor kinase 7;2 [Medicago
  misc_feature (378)..(639): Homolog of NCBI NO: 34899514 NR Description: putative receptor-like protein kinase [Oryza
MSRQLDPVAELESLKTHVDHSGNPSFSTLSQRHQSGEASKRSPSGSPRKENDGEHSHHKKSLFSKMKDKAKKLQHSLSTKKRHDEEGDATMSPFCRSEDHEVREVGYASLSPRDKSKDRKVREEGGEEEEEDPEYLGAPMYESKKAPEELKETARQHPRENPVITETNVLSVLPAKQDAEQEQKDCNGSKTEHPVISEKNVLSDVKQEKPADSDTTTIVTESSEKTRKECTSQQEPISPSKTVTETVTEKLAPGYAKVSDATQAITKKIQDMAFPEPTEREEEVNDVAEINTAGTNQPTGFNTKVWDKGVSMKEYISQKFEPSEDDRELSRVISKAISPRKGSSQTSSFGAATNMAPASNSADNKAPLVANTNEKANGTVYKGKLSSNAQIAVKRVSLDAEQDTKHLVSQIVGIGKLRHKNLVQLLGYCRRKGELLLVYDYMPYGNLDDFLFNEERPNLSWSQRFHIIKGVASALLYLHEQIVLHRDVKAANVLLDEDLNGRLDYGLARFGTNRNPMLGSVGYVAPELIITGMPTTKADVYSFGALLLEFACGRMFIEYPGKPEEFNLISWVCQCWKRGNLVGARDARLEGDYVCKEIEMVLKLGLLCAQYNPEDRPSMSQVVNYLEGNDVLPEMPPDTPGISIPTPYHEVLA

SEQ ID NO: 86057 - protein, 588 aa, Arabidopsis thaliana
  peptide (1)..(588): Ceres Seq. ID no. 12685804
  misc_feature (1)..(309): Homolog of NCBI NO: 15232627 NR Description: hypothetical protein; protein id: At3g46750.1
  misc_feature (310)..(588): Homolog of NCBI NO: 15232629 NR Description: receptor-like protein kinase; protein id: [Arabidopsis thaliana] >gi|7434319|pir||T12973 protein kinase
  misc_feature (313)..(587): Homolog of NCBI NO: 9759248 NR Description: receptor-like protein kinase-like protein
  misc_feature (313)..(587): Homolog of NCBI NO: 15237850 NR Description: receptor-like protein kinase; protein id:
  misc_feature (313)..(587): Homolog of NCBI NO: 15237849 NR Description: receptor-like protein kinase; protein id: [Arabidopsis thaliana] >gi|9759247|dbj|BAB09771.1|
  misc_feature (313)..(582): Homolog of NCBI NO: 15230698 NR Description: receptor like protein kinase; protein id:
  misc_feature (313)..(582): Homolog of NCBI NO: 15230700 NR Description: receptor like protein kinase; protein id:
  misc_feature (313)..(582): Homolog of NCBI NO: 15230670 NR Description: receptor-like protein kinase; protein id:
  misc_feature (313)..(570): Homolog of NCBI NO: 38112427 NR Description: lectin-like receptor kinase 7;2 [Medicago
  misc_feature (313)..(574): Homolog of NCBI NO: 34899514 NR Description: putative receptor-like protein kinase [Oryza
MKDKAKKLQHSLSTKKRHDEEGDATMSPFCRSEDHEVREVGYASLSPRDKSKDRKVREEGGEEEEEDPEYLGAPMYESKKAPEELKETARQHPRENPVITETNVLSVLPAKQDAEQEQKDCNGSKTEHPVISEKNVLSDVKQEKPADSDTTTIVTESSEKTRKECTSQQEPISPSKTVTETVTEKLAPGYAKVSDATQAITKKIQDMAFPEPTEREEEVNDVAEINTAGTNQPTGFNTKVWDKGVSMKEYISQKFEPSEDDRELSRVISKAISPRKGSSQTSSFGAATNMAPASNSADNKAPLVANTNEKANGTVYKGKLSSNAQIAVKRVSLDAEQDTKHLVSQIVGIGKLRHKNLVQLLGYCRRKGELLLVYDYMPYGNLDDFLFNEERPNLSWSQRFHIIKGVASALLYLHEQIVLHRDVKAANVLLDEDLNGRLDYGLARFGTNRNPMLGSVGYVAPELIITGMPTTKADVYSFGALLLEFACGRMFIEYPGKPEEFNLISWVCQCWKRGNLVGARDARLEGDYVCKEIEMVLKLGLLCAQYNPEDRPSMSQVVNYLEGNDVLPEMPPDTPGISIPTPYHEVLA

SEQ ID NO: 86058 - protein, 563 aa, Arabidopsis thaliana
  peptide (1)..(563): Ceres Seq. ID no. 12685805
  misc_feature (1)..(284): Homolog of NCBI NO: 15232627 NR Description: hypothetical protein; protein id: At3g46750.1
  misc_feature (285)..(563): Homolog of NCBI NO: 15232629 NR Description: receptor-like protein kinase; protein id: [Arabidopsis thaliana] >gi|7434319|pir||T12973 protein kinase
  misc_feature (288)..(562): Homolog of NCBI NO: 9759248 NR Description: receptor-like protein kinase-like protein
  misc_feature (288)..(562): Homolog of NCBI NO: 15237850 NR Description: receptor-like protein kinase; protein id:
  misc_feature (288)..(562): Homolog of NCBI NO: 15237849 NR Description: receptor-like protein kinase; protein id: [Arabidopsis thaliana] >gi|9759247|dbj|BAB09771.1|
  misc_feature (288)..(557): Homolog of NCBI NO: 15230698 NR Description: receptor like protein kinase; protein id:
  misc_feature (288)..(557): Homolog of NCBI NO: 15230700 NR Description: receptor like protein kinase; protein id:
  misc_feature (288)..(557): Homolog of NCBI NO: 15230670 NR Description: receptor-like protein kinase; protein id:
  misc_feature (288)..(545): Homolog of NCBI NO: 38112427 NR Description: lectin-like receptor kinase 7;2 [Medicago
  misc_feature (288)..(549): Homolog of NCBI NO: 34899514 NR Description: putative receptor-like protein kinase [Oryza
MSPFCRSEDHEVREVGYASLSPRDKSKDRKVREEGGEEEEEDPEYLGAPMYESKKAPEELKETARQHPRENPVITETNVLSVLPAKQDAEQEQKDCNGSKTEHPVISEKNVLSDVKQEKPADSDTTTIVTESSEKTRKECTSQQEPISPSKTVTETVTEKLAPGYAKVSDATQAITKKIQDMAFPEPTEREEEVNDVAEINTAGTNQPTGFNTKVWDKGVSMKEYISQKFEPSEDDRELSRVISKAISPRKGSSQTSSFGAATNMAPASNSADNKAPLVANTNEKANGTVYKGKLSSNAQIAVKRVSLDAEQDTKHLVSQIVGIGKLRHKNLVQLLGYCRRKGELLLVYDYMPYGNLDDFLFNEERPNLSWSQRFHIIKGVASALLYLHEQIVLHRDVKAANVLLDEDLNGRLDYGLARFGTNRNPMLGSVGYVAPELIITGMPTTKADVYSFGALLLEFACGRMFIEYPGKPEEFNLISWVCQCWKRGNLVGARDARLEGDYVCKEIEMVLKLGLLCAQYNPEDRPSMSQVVNYLEGNDVLPEMPPDTPGISIPTPYHEVLA

SEQ ID NO: 86059 - DNA, 3513 bp, Arabidopsis thaliana
  misc_feature (1)..(3513): Ceres Seq. ID no. 12685813
  misc_feature: MA Experiment ID: 20000315 Result: Down-regulated in Transcription
  misc_feature: MA Experiment 20000315 PARAMETER Experiment Name: At_14day_Shoots-Roots_Sub_P Parameter: Age (day) Value: 14
  misc_feature: MA Experiment 20000315 PARAMETER Experiment Name: At_14day_Shoots-Roots_Sub_P Parameter: Organism Value: A. thaliana
  misc_feature: MA Experiment 20000315 PARAMETER Experiment Name: At_14day_Shoots-Roots_Sub_P Parameter: Plant Line Value: WS
  misc_feature: MA Experiment 20000315 PARAMETER Experiment Name: At_14day_Shoots-Roots_Sub_P Parameter: Tissue Value: Shoots vs. Whole Plant
  misc_feature: MA Experiment ID: 20000328 Result: Down-regulated in Transcription
  misc_feature: MA Experiment 20000328 PARAMETER Experiment Name: At_42deg_Heat_Sub_P Parameter: Age (day) Value: 14
  misc_feature: MA Experiment 20000328 PARAMETER Experiment Name: At_42deg_Heat_Sub_P Parameter: Organism Value: A. thaliana
  misc_feature: MA Experiment 20000328 PARAMETER Experiment Name: At_42deg_Heat_Sub_P Parameter: Plant Line Value: WS
  misc_feature: MA Experiment 20000328 PARAMETER Experiment Name: At_42deg_Heat_Sub_P Parameter: Temperature (deg C) Value: 42 vs. 22
  misc_feature: MA Experiment 20000328 PARAMETER Experiment Name: At_42deg_Heat_Sub_P Parameter: Timepoint (hr) Value: 6
  misc_feature: MA Experiment 20000328 PARAMETER Experiment Name: At_42deg_Heat_Sub_P Parameter: Tissue Value: Aerial
atggaaaaggtagagttaccagttcacgagcatcctttgttcatctttgatcggatttgtatggacacttgtaaaggatgcagtgtttttggttatttttacggtggctatgtttgcaatgaggtaggttgtgataccctcttccataaggagtgcgtcgagtcggtaccagagatcaaacacccttcccatcctcaacatcctctcaagctcaacctgaaatgtggacggttttgttgtagtttgtgtataagtggattgcaagttggttatcattgttcaatatgcgacttcaatgtgcatttggtttgtgcaagaagacctccatcctcaacttcatcctcatcctcatcttcgccgctacctactagtgttgataattccaaagtgcatcagcatccacttctactctctaagaacgtggagacgttcttactaaaggaagggcgcaattgcaacatgtgcaacacgaatatcaaaatcaatgaaaaacaactttgtgaatgtcgtctgtgcaatatccttttccatttggattgtgtcgggctcattccaaacgtataccaaacttctcatccgaaacaccctctcaagtttctccaatacggagcaccagagtatgctcacgagaaatgccttctttgcaagaagaagttcaaaaagttatctaacaactatgatcgagtttaccactgcgatgtttgtaatgtcaccatttgcaaggattactgtatggcgaaaccaccgccagtttctgttgtgagtcctacgacccatgagcatcaactccaccttgttccaagactagtcaattttacttgcaacgcttgtgggacggctggtgatcgaagtccttatttttgtcttcaatgcaatttcatgatccatcgagcttgtattgatttaccccgcgtgataaatatcaatcgtcataatcatcgcatctcttacactagtcttcttggacacgggaattggacatgtggagtttgtcgtaagaaagtagatgggttttatggggcttattcttgctcgaaatgtcctagctatgctgttcatgcaagatgcgcgacgagaaaggatgtatggtacaaagttgaactagaaggaacaccggaagaggaggaaattgcgccattcgaggtggtcgatgagaatctgatcaagcacttcatccatggccataatttaagactcaacaaggatggtaaccacgaaagcaaattttgtgaagcatgtgcctccaaaatcaataacgatccgttttatggttgtgagcaatgcgactttattctacatgaaacatgtgctagtctgcctagaaagataaggcatgtatccaacaataaacctttaattctatcgacagatacatatttgaaagattctccacgccaaagaagacattgttctgcttgtttccagaatttcagcggttttaggtacgaaactcagtctcgtaatttgtttggttccgctactctagatgttcgttgtagttcgatatatgaaccatttctccatgaaagccatccacatcctttatacttcagtcttgagggggatacaaaatgttctgcatgtgacatcacatatagcgccagggatatgttgtgttgtgatgagtgtgaatttcggttggacttccgctgcgctactttacctagaaaggtaatgaatcagaggtacgacgatcatcctctctacttgtcttacggtgaaaataaggaagatggtcaactttggtgtgaggtatgtgaaacaaaagtagatccaaaggaatggttgtatacatttaacttcttacctcgctctcctctgaagccaccgtcgtgttccgttgctttaaacaatccttcaatttcctccggcgccggagctaaaatctctaataatcagctaattcaatcattgtgcaaagagggtaaacttaaacaagcgattcgcgtcttgtctcaggaatctagcccaagtcaacagacttacgagcttctgattctctgctgcggtcatggagaagaagtgttgggtttgtattggaagatgaataggattggagttgagtcagataggttcacatacacttatgttctcaaggcttgtgttgcatcggaatgcacggtgaatcatctgatgaaagggaaagagattcatgcacatcttactcgacgaggttacagttctcatgtttacattatgactacgttggtggacatgtatgctagatttggctgtgtggattatgccagctatgtgtttgggggaatgccggtgaggaacgttgtttcttggagcgctatgatcgcctgctatgcaaagaacgggaaagcttttgaagctctgaggactttccgtgaaatgatgagagaaaccaaagattcatctccgaattctgtgactatggttagtgtgcttcaagcttgtgcttcgcttgcggctttagagcaagggaaattgattcatgggtacatactcagacgggggcttgactccatattgccagtgatcagtgctcttgtgacgatgtatggtagatgcggtaagcttgaagtgggacaaagagtatttgatcgaatgcatgaccgggatgttgtgtcctggaattccttgatatcaagctatggcgttcacgggtatggaaaaaaagcaattcagatatttgaagagatgctcgccaacggggcttccccaactcccgtaacatttgtcagcgttttgggagcttgcagccacgagggtcttgttgaagaaggaaagagactgtttgaaacaatgtggagagaccatgggataaaaccacaaatcgaacattatgcttgtatggttgatctgttaggtcgggcgaataggttagacgaggcagcaaagatggtacaagacatgaggactgaaccagggcctaaggtttggggttcccttcttggttcttgtagaattcacggtaatgttgagcttgcagagcgggcgagtagaaggctctttgcgcttgaaccaaaaaatgcagggaactatgtgttgttggcagacatttacgcggaagctcagatgtgggatgaggttaagagagtgaagaagcttctagaacacaggggactgcagaagctgcctggtcgatgctggatggaagtgaggaggaaaatgtactcgtttgtctcggttgatgagtttaaccctcttatggaacagattcatgctttcttggttaagttagccgaagatatgaaggagaaagggtacataccacagaccaaaggagttctgtatgagcttgaaacagaagaaaaagagaggatagtgttgggacacagtgagaaacttgcgttggcgtttgggctgataaatacatcgaaaggagaaccaatcagaatcacgaagaacttgcgtttgtgcgaggactgtcacttgtttacaaagttcatctcgaagtttatggagaaagagattctagtcagagatgtgaaccggtttcatcgattcaagaatggagtgtgttcttgtggagattactggtaa

SEQ ID NO: 86060 - protein, 1170 aa, Arabidopsis thaliana
  peptide (1)..(1170): Ceres Seq. ID no. 12685814
  misc_feature (326)..(357): Pfam Name: DC1 domain Pfam Description: DC1 domain
  misc_feature (670)..(1170): Homolog of NCBI NO: 15232648 NR Description: putative protein; protein id: At3g46790.1
  misc_feature (597)..(671): Homolog of NCBI NO: 15232648 NR Description: putative protein; protein id: At3g46790.1
  misc_feature (1)..(598): Homolog of NCBI NO: 15232650 NR Description: CHP-rich zinc finger protein, putative; protein At3g46810.1 [Arabidopsis thaliana] >gi|7487753|pir||T12967
  misc_feature (1)..(600): Homolog of NCBI NO: 15240290 NR Description: CHP-rich zinc finger protein, putative; protein
  misc_feature (631)..(1170): Homolog of NCBI NO: 34908292 NR Description: P0005H10.18 [Oryza sativa (japonica
  misc_feature (1)..(639): Homolog of NCBI NO: 15224819 NR Description: CHP-rich zinc finger protein, putative; protein At2g19650.1, supported by cDNA: gi_20466721 [Arabidopsis
  misc_feature (120)..(600): Homolog of NCBI NO: 15227266 NR Description: CHP-rich zinc finger protein, putative; protein
  misc_feature (1)..(600): Homolog of NCBI NO: 15224044 NR Description: CHP-rich zinc finger protein, putative; protein At2g04680.1 [Arabidopsis thaliana] >gi|25411105|pir||B84460
  misc_feature (1)..(600): Homolog of NCBI NO: 29648884 NR Description: hypothetical protein [Arabidopsis thaliana]
  misc_feature (120)..(591): Homolog of NCBI NO: 20197291 NR Description: hypothetical protein [Arabidopsis thaliana]
MEKVELPVHEHPLFIFDRICMDTCKGCSVFGYFYGGYVCNEVGCDTLFHKECVESVPEIKHPSHPQHPLKLNLKCGRFCCSLCISGLQVGYHCSICDFNVHLVCARRPPSSTSSSSSSSPLPTSVDNSKVHQHPLLLSKNVETFLLKEGRNCNMCNTNIKINEKQLCECRLCNILFHLDCVGLIPNVYQTSHPKHPLKFLQYGAPEYAHEKCLLCKKKFKKLSNNYDRVYHCDVCNVTICKDYCMAKPPPVSVVSPTTHEHQLHLVPRLVNFTCNACGTAGDRSPYFCLQCNFMIHRACIDLPRVININRHNHRISYTSLLGHGNWTCGVCRKKVDGFYGAYSCSKCPSYAVHARCATRKDVWYKVELEGTPEEEEIAPFEVVDENLIKHFIHGHNLRLNKDGNHESKFCEACASKINNDPFYGCEQCDFILHETCASLPRKIRHVSNNKPLILSTDTYLKDSPRQRRHCSACFQNFSGFRYETQSRNLFGSATLDVRCSSIYEPFLHESHPHPLYFSLEGDTKCSACDITYSARDMLCCDECEFRLDFRCATLPRKVMNQRYDDHPLYLSYGENKEDGQLWCEVCETKVDPKEWLYTFNFLPRSPLKPPSCSVALNNPSISSGAGAKISNNQLIQSLCKEGKLKQAIRVLSQESSPSQQTYELLILCCGHGEEVLGLYWKMNRIGVESDRFTYTYVLKACVASECTVNHLMKGKEIHAHLTRRGYSSHVYIMTTLVDMYARFGCVDYASYVFGGMPVRNVVSWSAMIACYAKNGKAFEALRTFREMMRETKDSSPNSVTMVSVLQACASLAALEQGKLIHGYILRRGLDSILPVISALVTMYGRCGKLEVGQRVFDRMHDRDVVSWNSLISSYGVHGYGKKAIQIFEEMLANGASPTPVTFVSVLGACSHEGLVEEGKRLFETMWRDHGIKPQIEHYACMVDLLGRANRLDEAAKMVQDMRTEPGPKVWGSLLGSCRIHGNVELAERASRRLFALEPKNAGNYVLLADIYAEAQMWDEVKRVKKLLEHRGLQKLPGRCWMEVRRKMYSFVSVDEFNPLMEQIHAFLVKLAEDMKEKGYIPQTKGVLYELETEEKERIVLGHSEKLALAFGLINTSKGEPIRITKNLRLCEDCHLFTKFISKFMEKEILVRDVNRFHRFKNGVCSCGDYW

SEQ ID NO: 86061 - protein, 1150 aa, Arabidopsis thaliana
  peptide (1)..(1150): Ceres Seq. ID no. 12685815
  misc_feature (306)..(337): Pfam Name: DC1 domain Pfam Description: DC1 domain
  misc_feature (650)..(1150): Homolog of NCBI NO: 15232648 NR Description: putative protein; protein id: At3g46790.1
  misc_feature (577)..(651): Homolog of NCBI NO: 15232648 NR Description: putative protein; protein id: At3g46790.1
  misc_feature (1)..(578): Homolog of NCBI NO: 15232650 NR Description: CHP-rich zinc finger protein, putative; protein At3g46810.1 [Arabidopsis thaliana] >gi|7487753|pir||T12967
  misc_feature (1)..(580): Homolog of NCBI NO: 15240290 NR Description: CHP-rich zinc finger protein, putative; protein
  misc_feature (611)..(1150): Homolog of NCBI NO: 34908292 NR Description: P0005H10.18 [Oryza sativa (japonica
  misc_feature (1)..(619): Homolog of NCBI NO: 15224819 NR Description: CHP-rich zinc finger protein, putative; protein At2g19650.1, supported by cDNA: gi_20466721 [Arabidopsis
  misc_feature (100)..(580): Homolog of NCBI NO: 15227266 NR Description: CHP-rich zinc finger protein, putative; protein
  misc_feature (1)..(580): Homolog of NCBI NO: 15224044 NR Description: CHP-rich zinc finger protein, putative; protein At2g04680.1 [Arabidopsis thaliana] >gi|25411105|pir||B84460
  misc_feature (1)..(580): Homolog of NCBI NO: 29648884 NR Description: hypothetical protein [Arabidopsis thaliana]
  misc_feature (100)..(571): Homolog of NCBI NO: 20197291 NR Description: hypothetical protein [Arabidopsis thaliana]
MDTCKGCSVFGYFYGGYVCNEVGCDTLFHKECVESVPEIKHPSHPQHPLKLNLKCGRFCCSLCISGLQVGYHCSICDFNVHLVCARRPPSSTSSSSSSSPLPTSVDNSKVHQHPLLLSKNVETFLLKEGRNCNMCNTNIKINEKQLCECRLCNILFHLDCVGLIPNVYQTSHPKHPLKFLQYGAPEYAHEKCLLCKKKFKKLSNNYDRVYHCDVCNVTICKDYCMAKPPPVSVVSPTTHEHQLHLVPRLVNFTCNACGTAGDRSPYFCLQCNFMIHRACIDLPRVININRHNHRISYTSLLGHGNWTCGVCRKKVDGFYGAYSCSKCPSYAVHARCATRKDVWYKVELEGTPEEEEIAPFEVVDENLIKHFIHGHNLRLNKDGNHESKFCEACASKINNDPFYGCEQCDFILHETCASLPRKIRHVSNNKPLILSTDTYLKDSPRQRRHCSACFQNFSGFRYETQSRNLFGSATLDVRCSSIYEPFLHESHPHPLYFSLEGDTKCSACDITYSARDMLCCDECEFRLDFRCATLPRKVMNQRYDDHPLYLSYGENKEDGQLWCEVCETKVDPKEWLYTFNFLPRSPLKPPSCSVALNNPSISSGAGAKISNNQLIQSLCKEGKLKQAIRVLSQESSPSQQTYELLILCCGHGEEVLGLYWKMNRIGVESDRFTYTYVLKACVASECTVNHLMKGKEIHAHLTRRGYSSHVYIMTTLVDMYARFGCVDYASYVFGGMPVRNVVSWSAMIACYAKNGKAFEALRTFREMMRETKDSSPNSVTMVSVLQACASLAALEQGKLIHGYILRRGLDSILPVISALVTMYGRCGKLEVGQRVFDRMHDRDVVSWNSLISSYGVHGYGKKAIQIFEEMLANGASPTPVTFVSVLGACSHEGLVEEGKRLFETMWRDHGIKPQIEHYACMVDLLGRANRLDEAAKMVQDMRTEPGPKVWGSLLGSCRIHGNVELAERASRRLFALEPKNAGNYVLLADIYAEAQMWDEVKRVKKLLEHRGLQKLPGRCWMEVRRKMYSFVSVDEFNPLMEQIHAFLVKLAEDMKEKGYIPQTKGVLYELETEEKERIVLGHSEKLALAFGLINTSKGEPIRITKNLRLCEDCHLFTKFISKFMEKEILVRDVNRFHRFKNGVCSCGDYW

SEQ ID NO: 86062 - protein, 1017 aa, Arabidopsis thaliana
  peptide (1)..(1017): Ceres Seq. ID no. 12685816
  misc_feature (173)..(204): Pfam Name: DC1 domain Pfam Description: DC1 domain
  misc_feature (517)..(1017): Homolog of NCBI NO: 15232648 NR Description: putative protein; protein id: At3g46790.1
  misc_feature (444)..(518): Homolog of NCBI NO: 15232648 NR Description: putative protein; protein id: At3g46790.1
  misc_feature (1)..(445): Homolog of NCBI NO: 15232650 NR Description: CHP-rich zinc finger protein, putative; protein At3g46810.1 [Arabidopsis thaliana] >gi|7487753|pir||T12967
  misc_feature (1)..(447): Homolog of NCBI NO: 15240290 NR Description: CHP-rich zinc finger protein, putative; protein
  misc_feature (478)..(1017): Homolog of NCBI NO: 34908292 NR Description: P0005H10.18 [Oryza sativa (japonica
  misc_feature (1)..(486): Homolog of NCBI NO: 15224819 NR Description: CHP-rich zinc finger protein, putative; protein At2g19650.1, supported by cDNA: gi_20466721 [Arabidopsis
  misc_feature (1)..(447): Homolog of NCBI NO: 15227266 NR Description: CHP-rich zinc finger protein, putative; protein
  misc_feature (1)..(447): Homolog of NCBI NO: 15224044 NR Description: CHP-rich zinc finger protein, putative; protein At2g04680.1 [Arabidopsis thaliana] >gi|25411105|pir||B84460
  misc_feature (1)..(447): Homolog of NCBI NO: 29648884 NR Description: hypothetical protein [Arabidopsis thaliana]
  misc_feature (1)..(438): Homolog of NCBI NO: 20197291 NR Description: hypothetical protein [Arabidopsis thaliana]
MCNTNIKINEKQLCECRLCNILFHLDCVGLIPNVYQTSHPKHPLKFLQYGAPEYAHEKCLLCKKKFKKLSNNYDRVYHCDVCNVTICKDYCMAKPPPVSVVSPTTHEHQLHLVPRLVNFTCNACGTAGDRSPYFCLQCNFMIHRACIDLPRVININRHNHRISYTSLLGHGNWTCGVCRKKVDGFYGAYSCSKCPSYAVHARCATRKDVWYKVELEGTPEEEEIAPFEVVDENLIKHFIHGHNLRLNKDGNHESKFCEACASKINNDPFYGCEQCDFILHETCASLPRKIRHVSNNKPLILSTDTYLKDSPRQRRHCSACFQNFSGFRYETQSRNLFGSATLDVRCSSIYEPFLHESHPHPLYFSLEGDTKCSACDITYSARDMLCCDECEFRLDFRCATLPRKVMNQRYDDHPLYLSYGENKEDGQLWCEVCETKVDPKEWLYTFNFLPRSPLKPPSCSVALNNPSISSGAGAKISNNQLIQSLCKEGKLKQAIRVLSQESSPSQQTYELLILCCGHGEEVLGLYWKMNRIGVESDRFTYTYVLKACVASECTVNHLMKGKEIHAHLTRRGYSSHVYIMTTLVDMYARFGCVDYASYVFGGMPVRNVVSWSAMIACYAKNGKAFEALRTFREMMRETKDSSPNSVTMVSVLQACASLAALEQGKLIHGYILRRGLDSILPVISALVTMYGRCGKLEVGQRVFDRMHDRDVVSWNSLISSYGVHGYGKKAIQIFEEMLANGASPTPVTFVSVLGACSHEGLVEEGKRLFETMWRDHGIKPQIEHYACMVDLLGRANRLDEAAKMVQDMRTEPGPKVWGSLLGSCRIHGNVELAERASRRLFALEPKNAGNYVLLADIYAEAQMWDEVKRVKKLLEHRGLQKLPGRCWMEVRRKMYSFVSVDEFNPLMEQIHAFLVKLAEDMKEKGYIPQTKGVLYELETEEKERIVLGHSEKLALAFGLINTSKGEPIRITKNLRLCEDCHLFTKFISKFMEKEILVRDVNRFHRFKNGVCSCGDYW

SEQ ID NO: 86063 - DNA, 3426 bp, Arabidopsis thaliana
  misc_feature (1)..(3426): Ceres Seq. ID no. 12685836
  misc_feature: MA Experiment ID: 20000315 Result: Down-regulated in Transcription
  misc_feature: MA Experiment 20000315 PARAMETER Experiment Name: At_14day_Shoots-Roots_Sub_P Parameter: Age (day) Value: 14
  misc_feature: MA Experiment 20000315 PARAMETER Experiment Name: At_14day_Shoots-Roots_Sub_P Parameter: Organism Value: A. thaliana
  misc_feature: MA Experiment 20000315 PARAMETER Experiment Name: At_14day_Shoots-Roots_Sub_P Parameter: Plant Line Value: WS
  misc_feature: MA Experiment 20000315 PARAMETER Experiment Name: At_14day_Shoots-Roots_Sub_P Parameter: Tissue Value: Shoots vs. Whole Plant
  misc_feature: MA Experiment ID: 20000327 Result: Down-regulated in Transcription
  misc_feature: MA Experiment 20000327 PARAMETER Experiment Name: At_42deg_Heat_Sub_P Parameter: Age (day) Value: 14
  misc_feature: MA Experiment 20000327 PARAMETER Experiment Name: At_42deg_Heat_Sub_P Parameter: Organism Value: A. thaliana
  misc_feature: MA Experiment 20000327 PARAMETER Experiment Name: At_42deg_Heat_Sub_P Parameter: Plant Line Value: WS
  misc_feature: MA Experiment 20000327 PARAMETER Experiment Name: At_42deg_Heat_Sub_P Parameter: Temperature (deg C) Value: 42 vs. 22
  misc_feature: MA Experiment 20000327 PARAMETER Experiment Name: At_42deg_Heat_Sub_P Parameter: Timepoint (hr) Value: 1
  misc_feature: MA Experiment 20000327 PARAMETER Experiment Name: At_42deg_Heat_Sub_P Parameter: Tissue Value: Aerial
  misc_feature: MA Experiment ID: 20000328 Result: Down-regulated in Transcription
  misc_feature: MA Experiment 20000328 PARAMETER Experiment Name: At_42deg_Heat_Sub_P Parameter: Age (day) Value: 14
  misc_feature: MA Experiment 20000328 PARAMETER Experiment Name: At_42deg_Heat_Sub_P Parameter: Organism Value: A. thaliana
  misc_feature: MA Experiment 20000328 PARAMETER Experiment Name: At_42deg_Heat_Sub_P Parameter: Plant Line Value: WS
  misc_feature: MA Experiment 20000328 PARAMETER Experiment Name: At_42deg_Heat_Sub_P Parameter: Temperature (deg C) Value: 42 vs. 22
  misc_feature: MA Experiment 20000328 PARAMETER Experiment Name: At_42deg_Heat_Sub_P Parameter: Timepoint (hr) Value: 6
  misc_feature: MA Experiment 20000328 PARAMETER Experiment Name: At_42deg_Heat_Sub_P Parameter: Tissue Value: Aerial
  misc_feature: MA Experiment ID: 20000440 Result: Down-regulated in Transcription
  misc_feature: MA Experiment 20000440 PARAMETER Experiment Name: At_Closed-Flower__Sub_P Parameter: Tissue Value: Closed Flower vs. Whole Plant
atggcacatgaacccagtagcccaagttcgaatcttgtttctaatccggccaatctttcagcttctgggttagattatagctctgatttgagtaataagcgtgtctctgatggaattatttctgggtttgggagtgagcaggtaagtattgatgctacgaatagaaacaatccaaatttaggcaataaaagaagtgatatggatgatgaagaattggaaaaggtgaagtttttatgtagctacaatggaaagataatccctagaccaagtgatggcatgttacgttacgttggtggtcaaacaaggatcgttagtgttaaaaagaatgtgagatttgatgaatttgagcaaaagatgattcaggtttatggtcaccctgttgttgttaagtatcagcttcctgatgaggatcttgatgctttggtttctgtttcatctagtgaagatattgataatatgatggaggagtttgagaagttggtagagagatcttctgatgggtcagggaagttgagagtttttttgtttgatgcttcttcgtctgaggtggatgattctttcggaatattggagtatggtgatggagttgatattgggcagagatatgtagaggctgtgaatggtgttgttgtgagtaaggaaagtgtagctagtggtagttctaatccgaattctgattttagtggcgtggatgttgttgatagcttgggcgttggtcagagtgattttgtcgcaactacttggacctcgagtaatttttcacctcagacttatcatagtaatgtatcaagacttgttcctcctgatccacgctcttctgcttatgttgtgccaatgactgtccacgccgatccgcctcattcttttcagcttgagactgtttcagagaaaccaatagttggtaagatgcagcagcaacaacaggggtatactacaccatctgaacatcatccaccggcctatgttgaatctcgccaagaagctttaagacaaccagatattgttcattcacctatccagcttttgccaagtagtacttctttgttctcccaacaaccttttcaagatagtcctttaagtgtctcatcccaccagttccttcctgctgctcacatgtcaatggctcccttgaattctcagattagttccacaccagttttgattaacccggtaatgcaaacccaagaaaatctgttggggaactatcatgctgctcaaaagttagtaccgcttcctacagagccaagaaacactgcatatcaaggtacgatttctcctggtataccatttgatggttatggcgggtctcaagttccaccatctaaccatgttgttctccccgatggaagtttctatcaacaagtaactatggctgaaagttttcaaagggtaaatgattgtcatatgtgccagacatcttttcctcatatgcattctgatccgattatgcgggagggaaatgatggttctacaatgtatgtgccatatgtgagctcagctttctatgcttctcgtccagatgatatcatgagaatccaacaaacggataagtttacgggtcaacaaagcttcctcaatcattcaaatcatcaagaaagagatactttacataacgccaatcttgccactgctcaggtcgagactactgaaccttttgtcaatgagatagtaagagatgttccgataaaagttcaagtaactaggcagcagcaacatcccgtagacccttcagtagcatatgcacaatgccgagaactaagtggattggtggataatgttaacatacatgctcctgaaatatatagcaattgtcagaatttcatctcaccagttgacaaaattgggaaagaagatattatgggtaccagttctcaacaaatggcaaggaagaatatgttcttacatgacacctctggtcagtctccagtaagtccaaacatagatcacactgattcagctaagaggctaacaagagtagttcttccaggccatgaatctcagcctaaggaatcatgtgtgccaacacagtctcccttattaggcaatcctggtttgtatctacaatcattggttggaggtcagcagttcgattcagcggaagcgcagtccagcaatcccgcttatgacgttgttgaatctacatttgatgctgcaaacttaccatcatccttatcatcaaatcctgatgctgctaatttaccatcatccttgtcatctagtgttggtggtgcagaccacaaagaatcatcaaaatcactttttagtaaccaggacccatggaatttgcaaactaactcaaacgaggatgtcaaacctgatctacttaattcttcgaaagttatccttgagaatgatctgttgattggtctttggttctctctgaaaggctccgaggaggagcacatcaaacaagaacttcagaatgttgctgaaggagtcgccgcttctgtgttacagtcaagcacaccttcatatcatgaacctccaattaaggtggatgagtatgcttttaattcgaaaggagaagtttcacgtaatgatgaaatgaaacagcagtctacacacttcaaggatatcaggaaccaacttctagaaagactgaatttcggatattctggttctgattcgctggatcagttgcagattataaaggacagcgaccttgaggaattgcgagaactaggatctggcacatttggcacagtttatcatgggaaatggcgaggcactgatgttgcaatcaaaaggatcaatgatcgatgttttgctggcaaaccatctgagcaagaacgaatgatcgatgacttttggaatgaggcacagaacctagctggcttgcaccatcctaacgtcgttgctttttatggggttgtgctggattcacctggaggttctgtggcaacagttacagagtatatggtcaatggttctttacgaaatgcgttgcagaagaatgttaggaattttgataggtgcaagcgtcaactgatcgctatggacattgcttttgggatggagtatttgcatggaaagaagatagtacactttgatcttaaaagtgacaacctgctcgtcaatctcagggatcctcatcgcccaatttgcaaggttggggatttgggtctctcaaaggtgaaatgtcagacattaatatcaggtggtgttcggggaacacttccatggatggcacccgagcttctaaatggaaccagtagccttgtttctgagaaggtcgatgtgttttcattcggaattgtcctctgggaacttttcaccggtgaagaaccttacgccgacttgcactatggagcgatcatagaaccatcagagaggccaagcttcactgagatcgtgaacgaactacggaccatggctacaaagcttccttccaaagaacaaggctcaacacagggaccacaatcttaa

SEQ ID NO: 86064 - protein, 1141 aa, Arabidopsis thaliana
  peptide (1)..(1141): Ceres Seq. ID no. 12685837
  misc_feature (89)..(178): Pfam Name: PB1 domain Pfam Description: PB1 domain
  misc_feature (673)..(1106): Homolog of NCBI NO: 24414006 NR Description: contains EST D23238(C2469)~kinase-like protein
  misc_feature (44)..(429): Homolog of NCBI NO: 24414006 NR Description: contains EST D23238(C2469)~kinase-like protein
  misc_feature (1107)..(1126): Homolog of NCBI NO: 24414006 NR Description: contains EST D23238(C2469)~kinase-like protein
  misc_feature (880)..(1106): Homolog of NCBI NO: 15242791 NR Description: putative protein; protein id: At5g57610.1 thaliana] >gi|9758322|dbj|BAB08796.1| contains similarity to
  misc_feature (57)..(210): Homolog of NCBI NO: 15242791 NR Description: putative protein; protein id: At5g57610.1 thaliana] >gi|9758322|dbj|BAB08796.1| contains similarity to
  misc_feature (1107)..(1131): Homolog of NCBI NO: 15242791 NR Description: putative protein; protein id: At5g57610.1 thaliana] >gi|9758322|dbj|BAB08796.1| contains similarity to
  misc_feature (820)..(1106): Homolog of NCBI NO: 15219417 NR Description: hypothetical protein; protein id: At1g79570.1
  misc_feature (48)..(319): Homolog of NCBI NO: 15219417 NR Description: hypothetical protein; protein id: At1g79570.1
  misc_feature (191)..(511): Homolog of NCBI NO: 24414006 NR Description: contains EST D23238(C2469)~kinase-like protein
  misc_feature (74)..(355): Homolog of NCBI NO: 15219183 NR Description: putative Ser/Thr protein kinase; protein id:
MAHEPSSPSSNLVSNPANLSASGLDYSSDLSNKRVSDGIISGFGSEQVSIDATNRNNPNLGNKRSDMDDEELEKVKFLCSYNGKIIPRPSDGMLRYVGGQTRIVSVKKNVRFDEFEQKMIQVYGHPVVVKYQLPDEDLDALVSVSSSEDIDNMMEEFEKLVERSSDGSGKLRVFLFDASSSEVDDSFGILEYGDGVDIGQRYVEAVNGVVVSKESVASGSSNPNSDFSGVDVVDSLGVGQSDFVATTWTSSNFSPQTYHSNVSRLVPPDPRSSAYVVPMTVHADPPHSFQLETVSEKPIVGKMQQQQQGYTTPSEHHPPAYVESRQEALRQPDIVHSPIQLLPSSTSLFSQQPFQDSPLSVSSHQFLPAAHMSMAPLNSQISSTPVLINPVMQTQENLLGNYHAAQKLVPLPTEPRNTAYQGTISPGIPFDGYGGSQVPPSNHVVLPDGSFYQQVTMAESFQRVNDCHMCQTSFPHMHSDPIMREGNDGSTMYVPYVSSAFYASRPDDIMRIQQTDKFTGQQSFLNHSNHQERDTLHNANLATAQVETTEPFVNEIVRDVPIKVQVTRQQQHPVDPSVAYAQCRELSGLVDNVNIHAPEIYSNCQNFISPVDKIGKEDIMGTSSQQMARKNMFLHDTSGQSPVSPNIDHTDSAKRLTRVVLPGHESQPKESCVPTQSPLLGNPGLYLQSLVGGQQFDSAEAQSSNPAYDVVESTFDAANLPSSLSSNPDAANLPSSLSSSVGGADHKESSKSLFSNQDPWNLQTNSNEDVKPDLLNSSKVILENDLLIGLWFSLKGSEEEHIKQELQNVAEGVAASVLQSSTPSYHEPPIKVDEYAFNSKGEVSRNDEMKQQSTHFKDIRNQLLERLNFGYSGSDSLDQLQIIKDSDLEELRELGSGTFGTVYHGKWRGTDVAIKRINDRCFAGKPSEQERMIDDFWNEAQNLAGLHHPNVVAFYGVVLDSPGGSVATVTEYMVNGSLRNALQKNVRNFDRCKRQLIAMDIAFGMEYLHGKKIVHFDLKSDNLLVNLRDPHRPICKVGDLGLSKVKCQTLISGGVRGTLPWMAPELLNGTSSLVSEKVDVFSFGIVLWELFTGEEPYADLHYGAIIEPSERPSFTEIVNELRTMATKLPSKEQGSTQGPQS

SEQ ID NO: 86065 - protein, 1075 aa, Arabidopsis thaliana
  peptide (1)..(1075): Ceres Seq. ID no. 12685838
  misc_feature (23)..(112): Pfam Name: PB1 domain Pfam Description: PB1 domain
  misc_feature (607)..(1040): Homolog of NCBI NO: 24414006 NR Description: contains EST D23238(C2469)~kinase-like protein
  misc_feature (1)..(363): Homolog of NCBI NO: 24414006 NR Description: contains EST D23238(C2469)~kinase-like protein
  misc_feature (1041)..(1060): Homolog of NCBI NO: 24414006 NR Description: contains EST D23238(C2469)~kinase-like protein
  misc_feature (814)..(1040): Homolog of NCBI NO: 15242791 NR Description: putative protein; protein id: At5g57610.1 thaliana] >gi|9758322|dbj|BAB08796.1| contains similarity to
  misc_feature (1)..(144): Homolog of NCBI NO: 15242791 NR Description: putative protein; protein id: At5g57610.1 thaliana] >gi|9758322|dbj|BAB08796.1| contains similarity to
  misc_feature (1041)..(1065): Homolog of NCBI NO: 15242791 NR Description: putative protein; protein id: At5g57610.1 thaliana] >gi|9758322|dbj|BAB08796.1| contains similarity to
  misc_feature (754)..(1040): Homolog of NCBI NO: 15219417 NR Description: hypothetical protein; protein id: At1g79570.1
  misc_feature (1)..(253): Homolog of NCBI NO: 15219417 NR Description: hypothetical protein; protein id: At1g79570.1
  misc_feature (125)..(445): Homolog of NCBI NO: 24414006 NR Description: contains EST D23238(C2469)~kinase-like protein
  misc_feature (8)..(289): Homolog of NCBI NO: 15219183 NR Description: putative Ser/Thr protein kinase; protein id:
MDDEELEKVKFLCSYNGKIIPRPSDGMLRYVGGQTRIVSVKKNVRFDEFEQKMIQVYGHPVVVKYQLPDEDLDALVSVSSSEDIDNMMEEFEKLVERSSDGSGKLRVFLFDASSSEVDDSFGILEYGDGVDIGQRYVEAVNGVVVSKESVASGSSNPNSDFSGVDVVDSLGVGQSDFVATTWTSSNFSPQTYHSNVSRLVPPDPRSSAYVVPMTVHADPPHSFQLETVSEKPIVGKMQQQQQGYTTPSEHHPPAYVESRQEALRQPDIVHSPIQLLPSSTSLFSQQPFQDSPLSVSSHQFLPAAHMSMAPLNSQISSTPVLINPVMQTQENLLGNYHAAQKLVPLPTEPRNTAYQGTISPGIPFDGYGGSQVPPSNHVVLPDGSFYQQVTMAESFQRVNDCHMCQTSFPHMHSDPIMREGNDGSTMYVPYVSSAFYASRPDDIMRIQQTDKFTGQQSFLNHSNHQERDTLHNANLATAQVETTEPFVNEIVRDVPIKVQVTRQQQHPVDPSVAYAQCRELSGLVDNVNIHAPEIYSNCQNFISPVDKIGKEDIMGTSSQQMARKNMFLHDTSGQSPVSPNIDHTDSAKRLTRVVLPGHESQPKESCVPTQSPLLGNPGLYLQSLVGGQQFDSAEAQSSNPAYDVVESTFDAANLPSSLSSNPDAANLPSSLSSSVGGADHKESSKSLFSNQDPWNLQTNSNEDVKPDLLNSSKVILENDLLIGLWFSLKGSEEEHIKQELQNVAEGVAASVLQSSTPSYHEPPIKVDEYAFNSKGEVSRNDEMKQQSTHFKDIRNQLLERLNFGYSGSDSLDQLQIIKDSDLEELRELGSGTFGTVYHGKWRGTDVAIKRINDRCFAGKPSEQERMIDDFWNEAQNLAGLHHPNVVAFYGVVLDSPGGSVATVTEYMVNGSLRNALQKNVRNFDRCKRQLIAMDIAFGMEYLHGKKIVHFDLKSDNLLVNLRDPHRPICKVGDLGLSKVKCQTLISGGVRGTLPWMAPELLNGTSSLVSEKVDVFSFGIVLWELFTGEEPYADLHYGAIIEPSERPSFTEIVNELRTMATKLPSKEQGSTQGPQS

SEQ ID NO: 86066 - protein, 1049 aa, Arabidopsis thaliana
  peptide (1)..(1049): Ceres Seq. ID no. 12685839
  misc_feature (1)..(86): Pfam Name: PB1 domain Pfam Description: PB1 domain
  misc_feature (581)..(1014): Homolog of NCBI NO: 24414006 NR Description: contains EST D23238(C2469)~kinase-like protein
  misc_feature (1)..(337): Homolog of NCBI NO: 24414006 NR Description: contains EST D23238(C2469)~kinase-like protein
  misc_feature (1015)..(1034): Homolog of NCBI NO: 24414006 NR Description: contains EST D23238(C2469)~kinase-like protein
  misc_feature (788)..(1014): Homolog of NCBI NO: 15242791 NR Description: putative protein; protein id: At5g57610.1 thaliana] >gi|9758322|dbj|BAB08796.1| contains similarity to
  misc_feature (1)..(118): Homolog of NCBI NO: 15242791 NR Description: putative protein; protein id: At5g57610.1 thaliana] >gi|9758322|dbj|BAB08796.1| contains similarity to
  misc_feature (1015)..(1039): Homolog of NCBI NO: 15242791 NR Description: putative protein; protein id: At5g57610.1 thaliana] >gi|9758322|dbj|BAB08796.1| contains similarity to
  misc_feature (728)..(1014): Homolog of NCBI NO: 15219417 NR Description: hypothetical protein; protein id: At1g79570.1
  misc_feature (1)..(227): Homolog of NCBI NO: 15219417 NR Description: hypothetical protein; protein id: At1g79570.1
  misc_feature (99)..(419): Homolog of NCBI NO: 24414006 NR Description: contains EST D23238(C2469)~kinase-like protein
  misc_feature (1)..(263): Homolog of NCBI NO: 15219183 NR Description: putative Ser/Thr protein kinase; protein id:
MLRYVGGQTRIVSVKKNVRFDEFEQKMIQVYGHPVVVKYQLPDEDLDALVSVSSSEDIDNMMEEFEKLVERSSDGSGKLRVFLFDASSSEVDDSFGILEYGDGVDIGQRYVEAVNGVVVSKESVASGSSNPNSDFSGVDVVDSLGVGQSDFVATTWTSSNFSPQTYHSNVSRLVPPDPRSSAYVVPMTVHADPPHSFQLETVSEKPIVGKMQQQQQGYTTPSEHHPPAYVESRQEALRQPDIVHSPIQLLPSSTSLFSQQPFQDSPLSVSSHQFLPAAHMSMAPLNSQISSTPVLINPVMQTQENLLGNYHAAQKLVPLPTEPRNTAYQGTISPGIPFDGYGGSQVPPSNHVVLPDGSFYQQVTMAESFQRVNDCHMCQTSFPHMHSDPIMREGNDGSTMYVPYVSSAFYASRPDDIMRIQQTDKFTGQQSFLNHSNHQERDTLHNANLATAQVETTEPFVNEIVRDVPIKVQVTRQQQHPVDPSVAYAQCRELSGLVDNVNIHAPEIYSNCQNFISPVDKIGKEDIMGTSSQQMARKNMFLHDTSGQSPVSPNIDHTDSAKRLTRVVLPGHESQPKESCVPTQSPLLGNPGLYLQSLVGGQQFDSAEAQSSNPAYDVVESTFDAANLPSSLSSNPDAANLPSSLSSSVGGADHKESSKSLFSNQDPWNLQTNSNEDVKPDLLNSSKVILENDLLIGLWFSLKGSEEEHIKQELQNVAEGVAASVLQSSTPSYHEPPIKVDEYAFNSKGEVSRNDEMKQQSTHFKDIRNQLLERLNFGYSGSDSLDQLQIIKDSDLEELRELGSGTFGTVYHGKWRGTDVAIKRINDRCFAGKPSEQERMIDDFWNEAQNLAGLHHPNVVAFYGVVLDSPGGSVATVTEYMVNGSLRNALQKNVRNFDRCKRQLIAMDIAFGMEYLHGKKIVHFDLKSDNLLVNLRDPHRPICKVGDLGLSKVKCQTLISGGVRGTLPWMAPELLNGTSSLVSEKVDVFSFGIVLWELFTGEEPYADLHYGAIIEPSERPSFTEIVNELRTMATKLPSKEQGSTQGPQS

SEQ ID NO: 86067 - DNA, 996 bp, Arabidopsis thaliana
  misc_feature (1)..(996): Ceres Seq. ID no. 12685862
  misc_feature: MA Experiment ID: 20001906 Result: Up-regulated in Transcription
  misc_feature: MA Experiment 20001906 PARAMETER Experiment Name: At_Drought_Reproduction_P Parameter: Age (day) Value: 35
  misc_feature: MA Experiment 20001906 PARAMETER Experiment Name: At_Drought_Reproduction_P Parameter: Organism Value: A. thaliana
  misc_feature: MA Experiment 20001906 PARAMETER Experiment Name: At_Drought_Reproduction_P Parameter: Plant Line Value: WS
  misc_feature: MA Experiment 20001906 PARAMETER Experiment Name: At_Drought_Reproduction_P Parameter: Timepoint (day) Value: 5
  misc_feature: MA Experiment 20001906 PARAMETER Experiment Name: At_Drought_Reproduction_P Parameter: Tissue Value: Siliques
  misc_feature: MA Experiment 20001906 PARAMETER Experiment Name: At_Drought_Reproduction_P Parameter: Treatment Value: Drought vs. No Drought
atgagcaactcggagtcttatccaccagagtttcgacctctaatgagcgaaaaatccactgaaacgggtctagaccggagcaaagatatcgatatcccggttatcgatatggagcatttggacatggagaaactgagagaagcatgcaaagactgggggatcttccatttggagaatactgggatacccttaacgtttatgtcacaggtgaaagagataacggagtcagtgttgagtctgccgtttgaagagaaacggacgttgttcggcgttaactctccgttatcgtattactggggaacacatacggtaagtccatcgggaaaagccgtaacgagagccccacaagaatctagtggtcacttgttcgaaggcatcaatattcctcttgcatctctctctcggcttcttgcactttcttgtactgatcccaagcttgagtctttccgagtggtgatggaggaatatgggaagcacgtaactaggattattgtgaccctatttgaagctataatagaaaccttgtcccttgaattatccggtgaccaaaaaatgggctacttatcagagtcaacaggtgtgatacgtgttcaacggtatcctcagtgtaccgaatcccccggactcgaagctcatacggacagttcggtgatatcgatcataaaccaagacgatgttggtgggctagagttcatgaaagatggggaatggttcaatgtcaaacctcttgccagttcttttgtcgtcggtcttggggatatgatgcaggtgataagtgatgaggaatacaagagtgtgttgcataaagtaggaaagaggatgaggaagaaagagagatactcgatagttaactttgtgttcccggacaaagactgtatgtttaactctactcgctataagccattcaaattctcggagtttgaagctcaagttaagcttgatgttgagacccatggtagcaaagtcggcctttctaggttcctgagcaacccctag

SEQ ID NO: 86068 - protein, 331 aa, Arabidopsis thaliana
  peptide (1)..(331): Ceres Seq. ID no. 12685863
  misc_feature (191)..(288): Pfam Name: 2OG-Fe(II) oxygenase superfamily Pfam Description: 2OG-Fe(II) oxygenase superfamily
  misc_feature (1)..(331): Homolog of NCBI NO: 15232747 NR Description: 1-aminocyclopropane-1-carboxylic acid oxidase - protein; protein id: At3g47190.1 [Arabidopsis thaliana]
  misc_feature (26)..(330): Homolog of NCBI NO: 15237726 NR Description: putative protein; protein id: At5g58660.1
  misc_feature (7)..(327): Homolog of NCBI NO: 38347595 NR Description: OSJNBa0042I15.8 [Oryza sativa (japonica
  misc_feature (16)..(328): Homolog of NCBI NO: 15223684 NR Description: gibberellin 20-oxidase, putative; protein id:
  misc_feature (28)..(328): Homolog of NCBI NO: 29825611 NR Description: gibberellin 2-oxidase 1 [Nicotiana sylvestris]
  misc_feature (3)..(327): Homolog of NCBI NO: 34915474 NR Description: gibberellin 20-oxidase-like protein [Oryza sativa
  misc_feature (147)..(311): Homolog of NCBI NO: 7433194 NR Description: probable 1-aminocyclopropane-1-carboxylate
  misc_feature (144)..(291): Homolog of NCBI NO: 27447954 NR Description: putative 1-aminocyclopropane-1-carboxylate
  misc_feature (28)..(75): Homolog of NCBI NO: 7433194 NR Description: probable 1-aminocyclopropane-1-carboxylate
  misc_feature (33)..(75): Homolog of NCBI NO: 27447954 NR Description: putative 1-aminocyclopropane-1-carboxylate
MSNSESYPPEFRPLMSEKSTETGLDRSKDIDIPVIDMEHLDMEKLREACKDWGIFHLENTGIPLTFMSQVKEITESVLSLPFEEKRTLFGVNSPLSYYWGTHTVSPSGKAVTRAPQESSGHLFEGINIPLASLSRLLALSCTDPKLESFRVVMEEYGKHVTRIIVTLFEAIIETLSLELSGDQKMGYLSESTGVIRVQRYPQCTESPGLEAHTDSSVISIINQDDVGGLEFMKDGEWFNVKPLASSFVVGLGDMMQVISDEEYKSVLHKVGKRMRKKERYSIVNFVFPDKDCMFNSTRYKPFKFSEFEAQVKLDVETHGSKVGLSRFLSNP

SEQ ID NO: 86069 - protein, 317 aa, Arabidopsis thaliana
  peptide (1)..(317): Ceres Seq. ID no. 12685864
  misc_feature (177)..(274): Pfam Name: 2OG-Fe(II) oxygenase superfamily Pfam Description: 2OG-Fe(II) oxygenase superfamily
  misc_feature (1)..(317): Homolog of NCBI NO: 15232747 NR Description: 1-aminocyclopropane-1-carboxylic acid oxidase - protein; protein id: At3g47190.1 [Arabidopsis thaliana]
  misc_feature (12)..(316): Homolog of NCBI NO: 15237726 NR Description: putative protein; protein id: At5g58660.1
  misc_feature (1)..(313): Homolog of NCBI NO: 38347595 NR Description: OSJNBa0042I15.8 [Oryza sativa (japonica
  misc_feature (2)..(314): Homolog of NCBI NO: 15223684 NR Description: gibberellin 20-oxidase, putative; protein id:
  misc_feature (14)..(314): Homolog of NCBI NO: 29825611 NR Description: gibberellin 2-oxidase 1 [Nicotiana sylvestris]
  misc_feature (1)..(313): Homolog of NCBI NO: 34915474 NR Description: gibberellin 20-oxidase-like protein [Oryza sativa
  misc_feature (133)..(297): Homolog of NCBI NO: 7433194 NR Description: probable 1-aminocyclopropane-1-carboxylate
  misc_feature (130)..(277): Homolog of NCBI NO: 27447954 NR Description: putative 1-aminocyclopropane-1-carboxylate
  misc_feature (14)..(61): Homolog of NCBI NO: 7433194 NR Description: probable 1-aminocyclopropane-1-carboxylate
  misc_feature (19)..(61): Homolog of NCBI NO: 27447954 NR Description: putative 1-aminocyclopropane-1-carboxylate
MSEKSTETGLDRSKDIDIPVIDMEHLDMEKLREACKDWGIFHLENTGIPLTFMSQVKEITESVLSLPFEEKRTLFGVNSPLSYYWGTHTVSPSGKAVTRAPQESSGHLFEGINIPLASLSRLLALSCTDPKLESFRVVMEEYGKHVTRIIVTLFEAIIETLSLELSGDQKMGYLSESTGVIRVQRYPQCTESPGLEAHTDSSVISIINQDDVGGLEFMKDGEWFNVKPLASSFVVGLGDMMQVISDEEYKSVLHKVGKRMRKKERYSIVNFVFPDKDCMFNSTRYKPFKFSEFEAQVKLDVETHGSKVGLSRFLSNP

SEQ ID NO: 86070 - protein, 295 aa, Arabidopsis thaliana
  peptide (1)..(295): Ceres Seq. ID no. 12685865
  misc_feature (155)..(252): Pfam Name: 2OG-Fe(II) oxygenase superfamily Pfam Description: 2OG-Fe(II) oxygenase superfamily
  misc_feature (1)..(295): Homolog of NCBI NO: 15232747 NR Description: 1-aminocyclopropane-1-carboxylic acid oxidase - protein; protein id: At3g47190.1 [Arabidopsis thaliana]
  misc_feature (1)..(294): Homolog of NCBI NO: 15237726 NR Description: putative protein; protein id: At5g58660.1
  misc_feature (1)..(291): Homolog of NCBI NO: 38347595 NR Description: OSJNBa0042I15.8 [Oryza sativa (japonica
  misc_feature (1)..(292): Homolog of NCBI NO: 15223684 NR Description: gibberellin 20-oxidase, putative; protein id:
  misc_feature (1)..(292): Homolog of NCBI NO: 29825611 NR Description: gibberellin 2-oxidase 1 [Nicotiana sylvestris]
  misc_feature (1)..(291): Homolog of NCBI NO: 34915474 NR Description: gibberellin 20-oxidase-like protein [Oryza sativa
  misc_feature (111)..(275): Homolog of NCBI NO: 7433194 NR Description: probable 1-aminocyclopropane-1-carboxylate
  misc_feature (108)..(255): Homolog of NCBI NO: 27447954 NR Description: putative 1-aminocyclopropane-1-carboxylate
  misc_feature (1)..(39): Homolog of NCBI NO: 7433194 NR Description: probable 1-aminocyclopropane-1-carboxylate
  misc_feature (1)..(39): Homolog of NCBI NO: 27447954 NR Description: putative 1-aminocyclopropane-1-carboxylate
MEHLDMEKLREACKDWGIFHLENTGIPLTFMSQVKEITESVLSLPFEEKRTLFGVNSPLSYYWGTHTVSPSGKAVTRAPQESSGHLFEGINIPLASLSRLLALSCTDPKLESFRVVMEEYGKHVTRIIVTLFEAIIETLSLELSGDQKMGYLSESTGVIRVQRYPQCTESPGLEAHTDSSVISIINQDDVGGLEFMKDGEWFNVKPLASSFVVGLGDMMQVISDEEYKSVLHKVGKRMRKKERYSIVNFVFPDKDCMFNSTRYKPFKFSEFEAQVKLDVETHGSKVGLSRFLSNP

SEQ ID NO: 86071 - DNA, 973 bp, Arabidopsis thaliana
  misc_feature (1)..(973): Ceres Seq. ID no. 12685888
  misc_feature: MA Experiment ID: 108464 Result: Up-regulated in Transcription
  misc_feature: MA Experiment 108464 PARAMETER Experiment Name: At_Germinating_Seeds_cDNA_P Parameter: Age (day) Value: 4 vs. 0
  misc_feature: MA Experiment 108464 PARAMETER Experiment Name: At_Germinating_Seeds_cDNA_P Parameter: Tissue Value: Germinating Seeds
  misc_feature: MA Experiment ID: 108473 Result: Up-regulated in Transcription
  misc_feature: MA Experiment 108473 PARAMETER Experiment Name: At_Drought_Flowers_cDNA_P Parameter: Timepoint (hr) Value: 7 d
  misc_feature: MA Experiment 108473 PARAMETER Experiment Name: At_Drought_Flowers_cDNA_P Parameter: Tissue Value: Flower
  misc_feature: MA Experiment 108473 PARAMETER Experiment Name: At_Drought_Flowers_cDNA_P Parameter: Treatment Value: Drought vs. No Drought
  misc_feature: MA Experiment ID: 108489 Result: Up-regulated in Transcription
  misc_feature: MA Experiment ID: 108501 Result: Down-regulated in Transcription
  misc_feature: MA Experiment 108501 PARAMETER Experiment Name: At_ap2_floral_buds_cDNA_P Parameter: Plant Line Value: ap2 (Ler.)
  misc_feature: MA Experiment 108501 PARAMETER Experiment Name: At_ap2_floral_buds_cDNA_P Parameter: Tissue Value: Closed Flower
  misc_feature: MA Experiment ID: 108572 Result: Up-regulated in Transcription
  misc_feature: MA Experiment 108572 PARAMETER Experiment Name: At_Drought_cDNA_P Parameter: Timepoint (hr) Value: 1
  misc_feature: MA Experiment 108572 PARAMETER Experiment Name: At_Drought_cDNA_P Parameter: Tissue Value: Aerial
  misc_feature: MA Experiment 108572 PARAMETER Experiment Name: At_Drought_cDNA_P Parameter: Treatment Value: Drought vs. No Drought
  misc_feature: MA Experiment ID: 108573 Result: Up-regulated in Transcription
  misc_feature: MA Experiment 108573 PARAMETER Experiment Name: At_Drought_cDNA_P Parameter: Timepoint (hr) Value: 6
  misc_feature: MA Experiment 108573 PARAMETER Experiment Name: At_Drought_cDNA_P Parameter: Tissue Value: Aerial
  misc_feature: MA Experiment 108573 PARAMETER Experiment Name: At_Drought_cDNA_P Parameter: Treatment Value: Drought vs. No Drought
  misc_feature: MA Experiment ID: 108574 Result: Down-regulated in Transcription
  misc_feature: MA Experiment 108574 PARAMETER Experiment Name: At_Wounding__cDNA_P Parameter: Timepoint (hr) Value: 1
  misc_feature: MA Experiment 108574 PARAMETER Experiment Name: At_Wounding__cDNA_P Parameter: Tissue Value: Aerial
  misc_feature: MA Experiment 108574 PARAMETER Experiment Name: At_Wounding__cDNA_P Parameter: Treatment Value: Wounding vs. No Wounding
  misc_feature: MA Experiment ID: 108594 Result: Up-regulated in Transcription
  misc_feature: MA Experiment 108594 PARAMETER Experiment Name: At_Ler-rhl_Root_cDNA_P Parameter: Plant Line Value: null
  misc_feature: MA Experiment ID: 20000068 Result: Down-regulated in Transcription
  misc_feature: MA Experiment ID: 20000112 Result: Up-regulated in Transcription
  misc_feature: MA Experiment 20000112 PARAMETER Experiment Name: At_42deg_Heat_cDNA_P Parameter: Temperature (deg C) Value: 42 vs. 22
  misc_feature: MA Experiment 20000112 PARAMETER Experiment Name: At_42deg_Heat_cDNA_P Parameter: Timepoint (hr) Value: 2
  misc_feature: MA Experiment 20000112 PARAMETER Experiment Name: At_42deg_Heat_cDNA_P Parameter: Tissue Value: Aerial
  misc_feature: MA Experiment ID: 20000224 Result: Down-regulated in Transcription
  misc_feature: MA Experiment ID: 20000227 Result: Down-regulated in Transcription
  misc_feature: MA Experiment 20000227 PARAMETER Experiment Name: At_Root-Tips-vs-Tops_P Parameter: Tissue Value: Root Tips vs. Root Tops
  misc_feature: MA Experiment ID: 20000234 Result: Down-regulated in Transcription
  misc_feature: MA Experiment 20000234 PARAMETER Experiment Name: At_Siliques_P Parameter: Age (day) Value: 21
  misc_feature: MA Experiment 20000234 PARAMETER Experiment Name: At_Siliques_P Parameter: Organism Value: A. thaliana
  misc_feature: MA Experiment 20000234 PARAMETER Experiment Name: At_Siliques_P Parameter: Plant Line Value: WS
  misc_feature: MA Experiment 20000234 PARAMETER Experiment Name: At_Siliques_P Parameter: Tissue Value: Less Than 5mm Siliques vs. Whole Plant
  misc_feature: MA Experiment ID: 20000264 Result: Down-regulated in Transcription
  misc_feature: MA Experiment 20000264 PARAMETER Experiment Name: At_Open_Flower_P Parameter: Age (day) Value: 21
  misc_feature: MA Experiment 20000264 PARAMETER Experiment Name: At_Open_Flower_P Parameter: Plant Line Value: WS
  misc_feature: MA Experiment 20000264 PARAMETER Experiment Name: At_Open_Flower_P Parameter: Tissue Value: Open Flower vs. Whole Plant
  misc_feature: MA Experiment ID: 20000265 Result: Down-regulated in Transcription
  misc_feature: MA Experiment 20000265 PARAMETER Experiment Name: At_Open_Flower_P Parameter: Age (day) Value: 21
  misc_feature: MA Experiment 20000265 PARAMETER Experiment Name: At_Open_Flower_P Parameter: Plant Line Value: WS
  misc_feature: MA Experiment 20000265 PARAMETER Experiment Name: At_Open_Flower_P Parameter: Tissue Value: Closed Flower vs. Whole Plant
  misc_feature: MA Experiment ID: 20000269 Result: Down-regulated in Transcription
  misc_feature: MA Experiment 20000269 PARAMETER Experiment Name: At_1mM_KNO3_L-vs-H_Roots_P Parameter: Age (day) Value: 7,10,12
  misc_feature: MA Experiment 20000269 PARAMETER Experiment Name: At_1mM_KNO3_L-vs-H_Roots_P Parameter: Organism Value: A. thaliana
  misc_feature: MA Experiment 20000269 PARAMETER Experiment Name: At_1mM_KNO3_L-vs-H_Roots_P Parameter: Plant Line Value: WS
  misc_feature: MA Experiment 20000269 PARAMETER Experiment Name: At_1mM_KNO3_L-vs-H_Roots_P Parameter: Timepoint (day) Value: 7,10,12
  misc_feature: MA Experiment 20000269 PARAMETER Experiment Name: At_1mM_KNO3_L-vs-H_Roots_P Parameter: Tissue Value: Roots
  misc_feature: MA Experiment 20000269 PARAMETER Experiment Name: At_1mM_KNO3_L-vs-H_Roots_P Parameter: Treatment Value: 1mM KNO3 vs. 50mM KNO3
  misc_feature: MA Experiment ID: 20000286 Result: Down-regulated in Transcription
  misc_feature: MA Experiment 20000286 PARAMETER Experiment Name: At_Open_Flower_P Parameter: Age (day) Value: 21
  misc_feature: MA Experiment 20000286 PARAMETER Experiment Name: At_Open_Flower_P Parameter: Plant Line Value: WS
  misc_feature: MA Experiment 20000286 PARAMETER Experiment Name: At_Open_Flower_P Parameter: Tissue Value: Half Open vs. Whole Plant
  misc_feature: MA Experiment ID: 20000439 Result: Down-regulated in Transcription
  misc_feature: MA Experiment 20000439 PARAMETER Experiment Name: At_Roots__P Parameter: Age (day) Value: 14 vs. 21
  misc_feature: MA Experiment 20000439 PARAMETER Experiment Name: At_Roots__P Parameter: Organism Value: A. thaliana
  misc_feature: MA Experiment 20000439 PARAMETER Experiment Name: At_Roots__P Parameter: Tissue Value: Roots vs. Whole Plant
  misc_feature: MA Experiment ID: 20000441 Result: Up-regulated in Transcription
  misc_feature: MA Experiment 20000441 PARAMETER Experiment Name: At_1uM_BR-BRZ__P Parameter: Tissue Value: Shoot Apices
  misc_feature: MA Experiment 20000441 PARAMETER Experiment Name: At_1uM_BR-BRZ__P Parameter: Treatment Value: 1uM BR vs. No Treatment
  misc_feature: MA Experiment ID: 20000443 Result: Up-regulated in Transcription
  misc_feature: MA Experiment 20000443 PARAMETER Experiment Name: At_1uM_BR-BRZ__P Parameter: Tissue Value: Shoot Apices
  misc_feature: MA Experiment 20000443 PARAMETER Experiment Name: At_1uM_BR-BRZ__P Parameter: Treatment Value: 1uM BRZ vs. No Treatment
  misc_feature: MA Experiment ID: 20000451 Result: Down-regulated in Transcription
  misc_feature: MA Experiment 20000451 PARAMETER Experiment Name: At_CS6879_Shoots-Roots_P Parameter: Age (day) Value: 14
  misc_feature: MA Experiment 20000451 PARAMETER Experiment Name: At_CS6879_Shoots-Roots_P Parameter: Organism Value: A. thaliana
  misc_feature: MA Experiment 20000451 PARAMETER Experiment Name: At_CS6879_Shoots-Roots_P Parameter: Plant Line Value: CS6879 vs. WS
  misc_feature: MA Experiment 20000451 PARAMETER Experiment Name: At_CS6879_Shoots-Roots_P Parameter: Tissue Value: Roots
  misc_feature: MA Experiment ID: 20000495 Result: Up-regulated in Transcription
  misc_feature: MA Experiment 20000495 PARAMETER Experiment Name: At_Guard_Cells_P Parameter: Harvest Date Value: 8/2/2002
  misc_feature: MA Experiment 20000495 PARAMETER Experiment Name: At_Guard_Cells_P Parameter: Organism Value: A. thaliana
  misc_feature: MA Experiment 20000495 PARAMETER Experiment Name: At_Guard_Cells_P Parameter: Tissue Value: Guard Cells vs. Leaves
  misc_feature: MA Experiment ID: 20000527 Result: Up-regulated in Transcription
  misc_feature: MA Experiment 20000527 PARAMETER Experiment Name: At_10percent_PEG_P Parameter: Age (day) Value: 20
  misc_feature: MA Experiment 20000527 PARAMETER Experiment Name: At_10percent_PEG_P Parameter: Organism Value: A. thaliana
  misc_feature: MA Experiment 20000527 PARAMETER Experiment Name: At_10percent_PEG_P Parameter: Plant Line Value: WS
  misc_feature: MA Experiment 20000527 PARAMETER Experiment Name: At_10percent_PEG_P Parameter: Timepoint (day) Value: 20
  misc_feature: MA Experiment 20000527 PARAMETER Experiment Name: At_10percent_PEG_P Parameter: Tissue Value: Whole Plant
  misc_feature: MA Experiment 20000527 PARAMETER Experiment Name: At_10percent_PEG_P Parameter: Treatment Value: 10percent PEG vs. No Treatment
  misc_feature: MA Experiment ID: 20000574 Result: Down-regulated in Transcription
  misc_feature: MA Experiment 20000574 PARAMETER Experiment Name: At_100uM_ABA_Mutants__P Parameter: Organism Value: A. thaliana
  misc_feature: MA Experiment 20000574 PARAMETER Experiment Name: At_100uM_ABA_Mutants__P Parameter: Plant Line Value: CS23 vs. Ler wt
  misc_feature: MA Experiment 20000574 PARAMETER Experiment Name: At_100uM_ABA_Mutants__P Parameter: Timepoint (hr) Value: N/A
  misc_feature: MA Experiment 20000574 PARAMETER Experiment Name: At_100uM_ABA_Mutants__P Parameter: Tissue Value: Whole Plant
  misc_feature: MA Experiment 20000574 PARAMETER Experiment Name: At_100uM_ABA_Mutants__P Parameter: Treatment Value: None
  misc_feature: MA Experiment ID: 20001248 Result: Up-regulated in Transcription
  misc_feature: MA Experiment 20001248 PARAMETER Experiment Name: At_Far-red-induction_P Parameter: Age (day) Value: 7
  misc_feature: MA Experiment 20001248 PARAMETER Experiment Name: At_Far-red-induction_P Parameter: Light Value: Far-red vs. White
  misc_feature: MA Experiment 20001248 PARAMETER Experiment Name: At_Far-red-induction_P Parameter: Organism Value: A. thaliana
  misc_feature: MA Experiment 20001248 PARAMETER Experiment Name: At_Far-red-induction_P Parameter: Plant Line Value: Columbia
  misc_feature: MA Experiment 20001248 PARAMETER Experiment Name: At_Far-red-induction_P Parameter: Timepoint (hr) Value: 4
  misc_feature: MA Experiment 20001248 PARAMETER Experiment Name: At_Far-red-induction_P Parameter: Tissue Value: Whole Plant
  misc_feature: MA Experiment ID: 20001450 Result: Up-regulated in Transcription
  misc_feature: MA Experiment 20001450 PARAMETER Experiment Name: At_Far-red-induction_P Parameter: Age (day) Value: 7
  misc_feature: MA Experiment 20001450 PARAMETER Experiment Name: At_Far-red-induction_P Parameter: Light Value: Far-red vs. White
  misc_feature: MA Experiment 20001450 PARAMETER Experiment Name: At_Far-red-induction_P Parameter: Organism Value: A. thaliana
  misc_feature: MA Experiment 20001450 PARAMETER Experiment Name: At_Far-red-induction_P Parameter: Plant Line Value: Columbia
  misc_feature: MA Experiment 20001450 PARAMETER Experiment Name: At_Far-red-induction_P Parameter: Timepoint (hr) Value: 8
  misc_feature: MA Experiment 20001450 PARAMETER Experiment Name: At_Far-red-induction_P Parameter: Tissue Value: Whole Plant
  misc_feature: MA Experiment ID: 20001451 Result: Up-regulated in Transcription
  misc_feature: MA Experiment 20001451 PARAMETER Experiment Name: At_Far-red-induction_P Parameter: Age (day) Value: 7
  misc_feature: MA Experiment 20001451 PARAMETER Experiment Name: At_Far-red-induction_P Parameter: Light Value: Far-red vs. White
  misc_feature: MA Experiment 20001451 PARAMETER Experiment Name: At_Far-red-induction_P Parameter: Organism Value: A. thaliana
  misc_feature: MA Experiment 20001451 PARAMETER Experiment Name: At_Far-red-induction_P Parameter: Plant Line Value: Columbia
  misc_feature: MA Experiment 20001451 PARAMETER Experiment Name: At_Far-red-induction_P Parameter: Timepoint (hr) Value: 24
  misc_feature: MA Experiment 20001451 PARAMETER Experiment Name: At_Far-red-induction_P Parameter: Tissue Value: Whole Plant
  misc_feature: MA Experiment ID: 20001757 Result: Up-regulated in Transcription
  misc_feature: MA Experiment 20001757 PARAMETER Experiment Name: At_50mM_NH4NO3_L-to-H_P Parameter: Timepoint (hr) Value: 6
  misc_feature: MA Experiment 20001757 PARAMETER Experiment Name: At_50mM_NH4NO3_L-to-H_P Parameter: Tissue Value: Leaf
  misc_feature: MA Experiment 20001757 PARAMETER Experiment Name: At_50mM_NH4NO3_L-to-H_P Parameter: Treatment Value: 50mM NH4NO3 vs 100mM Mannitol
  misc_feature: MA Experiment ID: 20001911 Result: Up-regulated in Transcription
  misc_feature: MA Experiment 20001911 PARAMETER Experiment Name: At_Drought_Reproduction_P Parameter: Age (day) Value: 40
  misc_feature: MA Experiment 20001911 PARAMETER Experiment Name: At_Drought_Reproduction_P Parameter: Organism Value: A. thaliana
  misc_feature: MA Experiment 20001911 PARAMETER Experiment Name: At_Drought_Reproduction_P Parameter: Plant Line Value: WS
  misc_feature: MA Experiment 20001911 PARAMETER Experiment Name: At_Drought_Reproduction_P Parameter: Timepoint (day) Value: 10
  misc_feature: MA Experiment 20001911 PARAMETER Experiment Name: At_Drought_Reproduction_P Parameter: Tissue Value: Flowers
  misc_feature: MA Experiment 20001911 PARAMETER Experiment Name: At_Drought_Reproduction_P Parameter: Treatment Value: Drought vs. No Drought
gtatctgtattctcttatcagacaaaaagttccaagatttttctaatagcgatggattgtgttgaatcttatttatccggagataattctgatgaatctccggtgatgcatacttggttttctccgtctccgtctccgtctgactcttcctcttctccttcatcttctgcttcttcttccattgggaggaatagcgacgacggtgagaaatcgtcggaggacggtggagatgacgccggagagaatgaagttgagtctccgtataaaggtcctcttgaaatgatggaatctctcgaacaagtcttacctgttaggaaagggatatcgaagtattacagtggaaagtcaaagtcttttactaatttaacggcggaggcagcttcggcgttgacttcttcttcgtcgatgaaagatttagcgaagccggagaatccttacagtaggaggaggaggaatctcctctgccatcagatttgggaaaataacaagacgactccacgtggtgggatctcgaagaaacacgttatgagttctagcagaagcgctttgacgctagctatggctgttgcggctggtgtgatgaccggagaaggatcttcttccggaggtgactcgtcgccgggatcaagtccgacgacttctggatctcctccgaggcagctacatcatcatcaacatcagatgaagaagcttcctccgttgtatcctaggagtcaagggtcttttggtaatttgacttcgtctcagtcgtcgttgggtttttgtgcctggagatcgttttcggtggctgattttccgaggtgttttccggcgacggcgagtgggattgggtttaatgactcgtaggaaatgatgataacaattgttttgttaaatttttatattttgaagttagtaacaaccacatccggagaatgtatgtgtatagaagagtttcaaaacttttgaatggatcatccacatcttttttttc

SEQ ID NO: 86072 - protein, 281 aa, Arabidopsis thaliana
  peptide (1)..(281): Ceres Seq. ID no. 12685889
  misc_feature (18)..(281): Homolog of NCBI NO: 22326936 NR Description: unknown protein; protein id: At5g21940.1 thaliana] >gi|13374853|emb|CAC34487.1| putative protein thaliana] >gi|22531283|gb|AAM97145.1| unknown protein
  misc_feature (187)..(281): Homolog of NCBI NO: 26451772 NR Description: unknown protein [Arabidopsis thaliana]
  misc_feature (41)..(245): Homolog of NCBI NO: 9294810 NR Description: MTD1 [Medicago truncatula]
  misc_feature (54)..(173): Homolog of NCBI NO: 15229793 NR Description: putative protein; protein id: At3g43850.1
  misc_feature (47)..(153): Homolog of NCBI NO: 34905120 NR Description: P0686C03.43 [Oryza sativa (japonica
  misc_feature (55)..(166): Homolog of NCBI NO: 15238642 NR Description: putative protein; protein id: At5g24890.1, by cDNA: 42528. [Arabidopsis thaliana]
  misc_feature (55)..(166): Homolog of NCBI NO: 28393161 NR Description: unknown protein [Arabidopsis thaliana]
  misc_feature (47)..(158): Homolog of NCBI NO: 18400574 NR Description: expressed protein; protein id: At2g24550.1, by cDNA: gi_15724183, supported by cDNA: gi_20466815 [Arabidopsis >gi|20197977|gb|AAD23890.2| expressed protein [Arabidopsis
  misc_feature (47)..(158): Homolog of NCBI NO: 25412223 NR Description: hypothetical protein At2g24550 [imported] -
  misc_feature (47)..(158): Homolog of NCBI NO: 15724184 NR Description: At2g24550/F25P17.15 [Arabidopsis thaliana] unknown protein [Arabidopsis thaliana]
VSVFSYQTKSSKIFLIAMDCVESYLSGDNSDESPVMHTWFSPSPSPSDSSSSPSSSASSSIGRNSDDGEKSSEDGGDDAGENEVESPYKGPLEMMESLEQVLPVRKGISKYYSGKSKSFTNLTAEAASALTSSSSMKDLAKPENPYSRRRRNLLCHQIWENNKTTPRGGISKKHVMSSSRSALTLAMAVAAGVMTGEGSSSGGDSSPGSSPTTSGSPPRQLHHHQHQMKKLPPLYPRSQGSFGNLTSSQSSLGFCAWRSFSVADFPRCFPATASGIGFNDS

SEQ ID NO: 86073 - protein, 264 aa, Arabidopsis thaliana; identical to SEQ ID NO: 28373
  peptide (1)..(264): Ceres Seq. ID no. 12685890
  misc_feature (1)..(264): Homolog of NCBI NO: 22326936 NR Description: unknown protein; protein id: At5g21940.1 thaliana] >gi|13374853|emb|CAC34487.1| putative protein thaliana] >gi|22531283|gb|AAM97145.1| unknown protein
  misc_feature (170)..(264): Homolog of NCBI NO: 26451772 NR Description: unknown protein [Arabidopsis thaliana]
  misc_feature (24)..(228): Homolog of NCBI NO: 9294810 NR Description: MTD1 [Medicago truncatula]
  misc_feature (37)..(156): Homolog of NCBI NO: 15229793 NR Description: putative protein; protein id: At3g43850.1
  misc_feature (30)..(136): Homolog of NCBI NO: 34905120 NR Description: P0686C03.43 [Oryza sativa (japonica
  misc_feature (38)..(149): Homolog of NCBI NO: 15238642 NR Description: putative protein; protein id: At5g24890.1, by cDNA: 42528. [Arabidopsis thaliana]
  misc_feature (38)..(149): Homolog of NCBI NO: 28393161 NR Description: unknown protein [Arabidopsis thaliana]
  misc_feature (30)..(141): Homolog of NCBI NO: 18400574 NR Description: expressed protein; protein id: At2g24550.1, by cDNA: gi_15724183, supported by cDNA: gi_20466815 [Arabidopsis >gi|20197977|gb|AAD23890.2| expressed protein [Arabidopsis
  misc_feature (30)..(141): Homolog of NCBI NO: 25412223 NR Description: hypothetical protein At2g24550 [imported] -
  misc_feature (30)..(141): Homolog of NCBI NO: 15724184 NR Description: At2g24550/F25P17.15 [Arabidopsis thaliana] unknown protein [Arabidopsis thaliana]

SEQ ID NO: 86074 - protein, 246 aa, Arabidopsis thaliana; identical to SEQ ID NO: 28374
  peptide (1)..(246): Ceres Seq. ID no. 12685891
  misc_feature (1)..(246): Homolog of NCBI NO: 22326936 NR Description: unknown protein; protein id: At5g21940.1 thaliana] >gi|13374853|emb|CAC34487.1| putative protein thaliana] >gi|22531283|gb|AAM97145.1| unknown protein
  misc_feature (152)..(246): Homolog of NCBI NO: 26451772 NR Description: unknown protein [Arabidopsis thaliana]
  misc_feature (6)..(210): Homolog of NCBI NO: 9294810 NR Description: MTD1 [Medicago truncatula]
  misc_feature (19)..(138): Homolog of NCBI NO: 15229793 NR Description: putative protein; protein id: At3g43850.1
  misc_feature (12)..(118): Homolog of NCBI NO: 34905120 NR Description: P0686C03.43 [Oryza sativa (japonica
  misc_feature (20)..(131): Homolog of NCBI NO: 15238642 NR Description: putative protein; protein id: At5g24890.1, by cDNA: 42528. [Arabidopsis thaliana]
  misc_feature (20)..(131): Homolog of NCBI NO: 28393161 NR Description: unknown protein [Arabidopsis thaliana]
  misc_feature (12)..(123): Homolog of NCBI NO: 18400574 NR Description: expressed protein; protein id: At2g24550.1, by cDNA: gi_15724183, supported by cDNA: gi_20466815 [Arabidopsis >gi|20197977|gb|AAD23890.2| expressed protein [Arabidopsis
  misc_feature (12)..(123): Homolog of NCBI NO: 25412223 NR Description: hypothetical protein At2g24550 [imported] -
  misc_feature (12)..(123): Homolog of NCBI NO: 15724184 NR Description: At2g24550/F25P17.15 [Arabidopsis thaliana] unknown protein [Arabidopsis thaliana]

SEQ ID NO: 86075 - DNA, 1247 bp, Arabidopsis thaliana
  misc_feature (1)..(1247): Ceres Seq. ID no. 12685895
  misc_feature: MA Experiment ID: 108464 Result: Up-regulated in Transcription
  misc_feature: MA Experiment 108464 PARAMETER Experiment Name: At_Germinating_Seeds_cDNA_P Parameter: Age (day) Value: 4 vs. 0
  misc_feature: MA Experiment 108464 PARAMETER Experiment Name: At_Germinating_Seeds_cDNA_P Parameter: Tissue Value: Germinating Seeds
  misc_feature: MA Experiment ID: 108501 Result: Down-regulated in Transcription
  misc_feature: MA Experiment 108501 PARAMETER Experiment Name: At_ap2_floral_buds_cDNA_P Parameter: Plant Line Value: ap2 (Ler.)
  misc_feature: MA Experiment 108501 PARAMETER Experiment Name: At_ap2_floral_buds_cDNA_P Parameter: Tissue Value: Closed Flower
  misc_feature: MA Experiment ID: 108573 Result: Up-regulated in Transcription
  misc_feature: MA Experiment 108573 PARAMETER Experiment Name: At_Drought_cDNA_P Parameter: Timepoint (hr) Value: 6
  misc_feature: MA Experiment 108573 PARAMETER Experiment Name: At_Drought_cDNA_P Parameter: Tissue Value: Aerial
  misc_feature: MA Experiment 108573 PARAMETER Experiment Name: At_Drought_cDNA_P Parameter: Treatment Value: Drought vs. No Drought
  misc_feature: MA Experiment ID: 108574 Result: Down-regulated in Transcription
  misc_feature: MA Experiment 108574 PARAMETER Experiment Name: At_Wounding__cDNA_P Parameter: Timepoint (hr) Value: 1
  misc_feature: MA Experiment 108574 PARAMETER Experiment Name: At_Wounding__cDNA_P Parameter: Tissue Value: Aerial
  misc_feature: MA Experiment 108574 PARAMETER Experiment Name: At_Wounding__cDNA_P Parameter: Treatment Value: Wounding vs. No Wounding
  misc_feature: MA Experiment ID: 108579 Result: Down-regulated in Transcription
  misc_feature: MA Experiment 108579 PARAMETER Experiment Name: At_4deg_Cold_cDNA_P Parameter: Temperature (deg C) Value: 4 vs. 22
  misc_feature: MA Experiment 108579 PARAMETER Experiment Name: At_4deg_Cold_cDNA_P Parameter: Timepoint (hr) Value: 6
  misc_feature: MA Experiment 108579 PARAMETER Experiment Name: At_4deg_Cold_cDNA_P Parameter: Tissue Value: Aerial
  misc_feature: MA Experiment ID: 20000185 Result: Down-regulated in Transcription
  misc_feature: MA Experiment 20000185 PARAMETER Experiment Name: At_Roots__P Parameter: Age (day) Value: 7 vs. 21
  misc_feature: MA Experiment 20000185 PARAMETER Experiment Name: At_Roots__P Parameter: Organism Value: A. thaliana
  misc_feature: MA Experiment 20000185 PARAMETER Experiment Name: At_Roots__P Parameter: Tissue Value: Roots vs. Whole Plant
  misc_feature: MA Experiment ID: 20000213 Result: Down-regulated in Transcription
  misc_feature: MA Experiment 20000213 PARAMETER Experiment Name: At_4deg_Cold_P Parameter: Timepoint (hr) Value: 2
  misc_feature: MA Experiment ID: 20000214 Result: Down-regulated in Transcription
  misc_feature: MA Experiment 20000214 PARAMETER Experiment Name: At_4deg_Cold_P Parameter: Timepoint (hr) Value: 6
  misc_feature: MA Experiment ID: 20000234 Result: Down-regulated in Transcription
  misc_feature: MA Experiment 20000234 PARAMETER Experiment Name: At_Siliques_P Parameter: Age (day) Value: 21
  misc_feature: MA Experiment 20000234 PARAMETER Experiment Name: At_Siliques_P Parameter: Organism Value: A. thaliana
  misc_feature: MA Experiment 20000234 PARAMETER Experiment Name: At_Siliques_P Parameter: Plant Line Value: WS
  misc_feature: MA Experiment 20000234 PARAMETER Experiment Name: At_Siliques_P Parameter: Tissue Value: Less Than 5mm Siliques vs. Whole Plant
  misc_feature: MA Experiment ID: 20000264 Result: Down-regulated in Transcription
  misc_feature: MA Experiment 20000264 PARAMETER Experiment Name: At_Open_Flower_P Parameter: Age (day) Value: 21
  misc_feature: MA Experiment 20000264 PARAMETER Experiment Name: At_Open_Flower_P Parameter: Plant Line Value: WS
  misc_feature: MA Experiment 20000264 PARAMETER Experiment Name: At_Open_Flower_P Parameter: Tissue Value: Open Flower vs. Whole Plant
  misc_feature: MA Experiment ID: 20000265 Result: Down-regulated in Transcription
  misc_feature: MA Experiment 20000265 PARAMETER Experiment Name: At_Open_Flower_P Parameter: Age (day) Value: 21
  misc_feature: MA Experiment 20000265 PARAMETER Experiment Name: At_Open_Flower_P Parameter: Plant Line Value: WS
  misc_feature: MA Experiment 20000265 PARAMETER Experiment Name: At_Open_Flower_P Parameter: Tissue Value: Closed Flower vs. Whole Plant
  misc_feature: MA Experiment ID: 20000268 Result: Down-regulated in Transcription
  misc_feature: MA Experiment 20000268 PARAMETER Experiment Name: At_100mM_NaCl__P Parameter: Age (day) Value: 14
  misc_feature: MA Experiment 20000268 PARAMETER Experiment Name: At_100mM_NaCl__P Parameter: Organism Value: A. thaliana
  misc_feature: MA Experiment 20000268 PARAMETER Experiment Name: At_100mM_NaCl__P Parameter: Plant Line Value: WS
  misc_feature: MA Experiment 20000268 PARAMETER Experiment Name: At_100mM_NaCl__P Parameter: Timepoint (hr) Value: 6
  misc_feature: MA Experiment 20000268 PARAMETER Experiment Name: At_100mM_NaCl__P Parameter: Tissue Value: Whole Plant
  misc_feature: MA Experiment 20000268 PARAMETER Experiment Name: At_100mM_NaCl__P Parameter: Treatment Value: 100mM NaCl vs. No Treatment
  misc_feature: MA Experiment ID: 20000286 Result: Down-regulated in Transcription
  misc_feature: MA Experiment 20000286 PARAMETER Experiment Name: At_Open_Flower_P Parameter: Age (day) Value: 21
  misc_feature: MA Experiment 20000286 PARAMETER Experiment Name: At_Open_Flower_P Parameter: Plant Line Value: WS
  misc_feature: MA Experiment 20000286 PARAMETER Experiment Name: At_Open_Flower_P Parameter: Tissue Value: Half Open vs. Whole Plant
  misc_feature: MA Experiment ID: 20000308 Result: Down-regulated in Transcription
  misc_feature: MA Experiment 20000308 PARAMETER Experiment Name: At_100mM_NaCl__P Parameter: Age (day) Value: 17
  misc_feature: MA Experiment 20000308 PARAMETER Experiment Name: At_100mM_NaCl__P Parameter: Organism Value: A. thaliana
  misc_feature: MA Experiment 20000308 PARAMETER Experiment Name: At_100mM_NaCl__P Parameter: Plant Line Value: WS
  misc_feature: MA Experiment 20000308 PARAMETER Experiment Name: At_100mM_NaCl__P Parameter: Timepoint (hr) Value: 72
  misc_feature: MA Experiment 20000308 PARAMETER Experiment Name: At_100mM_NaCl__P Parameter: Tissue Value: Whole Plant
  misc_feature: MA Experiment 20000308 PARAMETER Experiment Name: At_100mM_NaCl__P Parameter: Treatment Value: 100mM NaCl vs. No Treatment
  misc_feature: MA Experiment ID: 20000439 Result: Down-regulated in Transcription
  misc_feature: MA Experiment 20000439 PARAMETER Experiment Name: At_Roots__P Parameter: Age (day) Value: 14 vs. 21
  misc_feature: MA Experiment 20000439 PARAMETER Experiment Name: At_Roots__P Parameter: Organism Value: A. thaliana
  misc_feature: MA Experiment 20000439 PARAMETER Experiment Name: At_Roots__P Parameter: Tissue Value: Roots vs. Whole Plant
  misc_feature: MA Experiment ID: 20000441 Result: Up-regulated in Transcription
  misc_feature: MA Experiment 20000441 PARAMETER Experiment Name: At_1uM_BR-BRZ__P Parameter: Tissue Value: Shoot Apices
  misc_feature: MA Experiment 20000441 PARAMETER Experiment Name: At_1uM_BR-BRZ__P Parameter: Treatment Value: 1uM BR vs. No Treatment
  misc_feature: MA Experiment ID: 20000443 Result: Up-regulated in Transcription
  misc_feature: MA Experiment 20000443 PARAMETER Experiment Name: At_1uM_BR-BRZ__P Parameter: Tissue Value: Shoot Apices
  misc_feature: MA Experiment 20000443 PARAMETER Experiment Name: At_1uM_BR-BRZ__P Parameter: Treatment Value: 1uM BRZ vs. No Treatment
  misc_feature: MA Experiment ID: 20000573 Result: Up-regulated in Transcription
  misc_feature: MA Experiment 20000573 PARAMETER Experiment Name: At_100uM_ABA_Mutants__P Parameter: Organism Value: A. thaliana
  misc_feature: MA Experiment 20000573 PARAMETER Experiment Name: At_100uM_ABA_Mutants__P Parameter: Plant Line Value: CS22 vs. Ler wt
  misc_feature: MA Experiment 20000573 PARAMETER Experiment Name: At_100uM_ABA_Mutants__P Parameter: Timepoint (hr) Value: N/A
  misc_feature: MA Experiment 20000573 PARAMETER Experiment Name: At_100uM_ABA_Mutants__P Parameter: Tissue Value: Whole Plant
  misc_feature: MA Experiment 20000573 PARAMETER Experiment Name: At_100uM_ABA_Mutants__P Parameter: Treatment Value: None
  misc_feature: MA Experiment ID: 20000794 Result: Down-regulated in Transcription
  misc_feature: MA Experiment 20000794 PARAMETER Experiment Name: At_Petals_P Parameter: Age (day) Value: 23-25 days
  misc_feature: MA Experiment 20000794 PARAMETER Experiment Name: At_Petals_P Parameter: Plant Line Value: WS
  misc_feature: MA Experiment 20000794 PARAMETER Experiment Name: At_Petals_P Parameter: Tissue Value: Petals vs. Whole plant
  misc_feature: MA Experiment ID: 20001248 Result: Up-regulated in Transcription
  misc_feature: MA Experiment 20001248 PARAMETER Experiment Name: At_Far-red-induction_P Parameter: Age (day) Value: 7
  misc_feature: MA Experiment 20001248 PARAMETER Experiment Name: At_Far-red-induction_P Parameter: Light Value: Far-red vs. White
  misc_feature: MA Experiment 20001248 PARAMETER Experiment Name: At_Far-red-induction_P Parameter: Organism Value: A. thaliana
  misc_feature: MA Experiment 20001248 PARAMETER Experiment Name: At_Far-red-induction_P Parameter: Plant Line Value: Columbia
  misc_feature: MA Experiment 20001248 PARAMETER Experiment Name: At_Far-red-induction_P Parameter: Timepoint (hr) Value: 4
  misc_feature: MA Experiment 20001248 PARAMETER Experiment Name: At_Far-red-induction_P Parameter: Tissue Value: Whole Plant
  misc_feature: MA Experiment ID: 20001450 Result: Up-regulated in Transcription
  misc_feature: MA Experiment 20001450 PARAMETER Experiment Name: At_Far-red-induction_P Parameter: Age (day) Value: 7
  misc_feature: MA Experiment 20001450 PARAMETER Experiment Name: At_Far-red-induction_P Parameter: Light Value: Far-red vs. White
  misc_feature: MA Experiment 20001450 PARAMETER Experiment Name: At_Far-red-induction_P Parameter: Organism Value: A. thaliana
  misc_feature: MA Experiment 20001450 PARAMETER Experiment Name: At_Far-red-induction_P Parameter: Plant Line Value: Columbia
  misc_feature: MA Experiment 20001450 PARAMETER Experiment Name: At_Far-red-induction_P Parameter: Timepoint (hr) Value: 8
  misc_feature: MA Experiment 20001450 PARAMETER Experiment Name: At_Far-red-induction_P Parameter: Tissue Value: Whole Plant
  misc_feature: MA Experiment ID: 20001451 Result: Up-regulated in Transcription
  misc_feature: MA Experiment 20001451 PARAMETER Experiment Name: At_Far-red-induction_P Parameter: Age (day) Value: 7
  misc_feature: MA Experiment 20001451 PARAMETER Experiment Name: At_Far-red-induction_P Parameter: Light Value: Far-red vs. White
  misc_feature: MA Experiment 20001451 PARAMETER Experiment Name: At_Far-red-induction_P Parameter: Organism Value: A. thaliana
  misc_feature: MA Experiment 20001451 PARAMETER Experiment Name: At_Far-red-induction_P Parameter: Plant Line Value: Columbia
  misc_feature: MA Experiment 20001451 PARAMETER Experiment Name: At_Far-red-induction_P Parameter: Timepoint (hr) Value: 24
  misc_feature: MA Experiment 20001451 PARAMETER Experiment Name: At_Far-red-induction_P Parameter: Tissue Value: Whole Plant
  misc_feature: MA Experiment ID: 20001556 Result: Down-regulated in Transcription
  misc_feature: MA Experiment 20001556 PARAMETER Experiment Name: At_Drought_Soil_Dry_P Parameter: Age (day) Value: 26
  misc_feature: MA Experiment 20001556 PARAMETER Experiment Name: At_Drought_Soil_Dry_P Parameter: Organism Value: A. thaliana
  misc_feature: MA Experiment 20001556 PARAMETER Experiment Name: At_Drought_Soil_Dry_P Parameter: Plant Line Value: WS
  misc_feature: MA Experiment 20001556 PARAMETER Experiment Name: At_Drought_Soil_Dry_P Parameter: Post Timepoint (hr) Value: None
  misc_feature: MA Experiment 20001556 PARAMETER Experiment Name: At_Drought_Soil_Dry_P Parameter: Post-Treatment Value: None
  misc_feature: MA Experiment 20001556 PARAMETER Experiment Name: At_Drought_Soil_Dry_P Parameter: Timepoint (day) Value: 12
  misc_feature: MA Experiment 20001556 PARAMETER Experiment Name: At_Drought_Soil_Dry_P Parameter: Treatment Value: Drought vs. No Drought
  misc_feature: MA Experiment ID: 20001557 Result: Down-regulated in Transcription
  misc_feature: MA Experiment 20001557 PARAMETER Experiment Name: At_Drought_Soil_Dry_P Parameter: Age (day) Value: 27
  misc_feature: MA Experiment 20001557 PARAMETER Experiment Name: At_Drought_Soil_Dry_P Parameter: Organism Value: A. thaliana
  misc_feature: MA Experiment 20001557 PARAMETER Experiment Name: At_Drought_Soil_Dry_P Parameter: Plant Line Value: WS
  misc_feature: MA Experiment 20001557 PARAMETER Experiment Name: At_Drought_Soil_Dry_P Parameter: Post Timepoint (hr) Value: 3
  misc_feature: MA Experiment 20001557 PARAMETER Experiment Name: At_Drought_Soil_Dry_P Parameter: Post-Treatment Value: Re-Water vs. No Drought
  misc_feature: MA Experiment 20001557 PARAMETER Experiment Name: At_Drought_Soil_Dry_P Parameter: Timepoint (day) Value: 13
  misc_feature: MA Experiment 20001557 PARAMETER Experiment Name: At_Drought_Soil_Dry_P Parameter: Treatment Value: Drought vs. No Drought
  misc_feature: MA Experiment ID: 20001558 Result: Down-regulated in Transcription
  misc_feature: MA Experiment 20001558 PARAMETER Experiment Name: At_Drought_Soil_Dry_P Parameter: Age (day) Value: 27
  misc_feature: MA Experiment 20001558 PARAMETER Experiment Name: At_Drought_Soil_Dry_P Parameter: Organism Value: A. thaliana
  misc_feature: MA Experiment 20001558 PARAMETER Experiment Name: At_Drought_Soil_Dry_P Parameter: Plant Line Value: WS
  misc_feature: MA Experiment 20001558 PARAMETER Experiment Name: At_Drought_Soil_Dry_P Parameter: Post Timepoint (hr) Value: 6
  misc_feature: MA Experiment 20001558 PARAMETER Experiment Name: At_Drought_Soil_Dry_P Parameter: Post-Treatment Value: Re-Water vs. No Drought
  misc_feature: MA Experiment 20001558 PARAMETER Experiment Name: At_Drought_Soil_Dry_P Parameter: Timepoint (day) Value: 13
  misc_feature: MA Experiment 20001558 PARAMETER Experiment Name: At_Drought_Soil_Dry_P Parameter: Treatment Value: Drought vs. No Drought
  misc_feature: MA Experiment ID: 20001559 Result: Down-regulated in Transcription
  misc_feature: MA Experiment 20001559 PARAMETER Experiment Name: At_Drought_Soil_Dry_P Parameter: Age (day) Value: 28
  misc_feature: MA Experiment 20001559 PARAMETER Experiment Name: At_Drought_Soil_Dry_P Parameter: Organism Value: A. thaliana
  misc_feature: MA Experiment 20001559 PARAMETER Experiment Name: At_Drought_Soil_Dry_P Parameter: Plant Line Value: WS
  misc_feature: MA Experiment 20001559 PARAMETER Experiment Name: At_Drought_Soil_Dry_P Parameter: Post Timepoint (hr) Value: 29
  misc_feature: MA Experiment 20001559 PARAMETER Experiment Name: At_Drought_Soil_Dry_P Parameter: Post-Treatment Value: Re-Water vs. No Drought
  misc_feature: MA Experiment 20001559 PARAMETER Experiment Name: At_Drought_Soil_Dry_P Parameter: Timepoint (day) Value: 14
  misc_feature: MA Experiment 20001559 PARAMETER Experiment Name: At_Drought_Soil_Dry_P Parameter: Treatment Value: Drought vs. No Drought
  misc_feature: MA Experiment ID: 20001560 Result: Down-regulated in Transcription
  misc_feature: MA Experiment 20001560 PARAMETER Experiment Name: At_Drought_Soil_Dry_P Parameter: Age (day) Value: 28
  misc_feature: MA Experiment 20001560 PARAMETER Experiment Name: At_Drought_Soil_Dry_P Parameter: Organism Value: A. thaliana
  misc_feature: MA Experiment 20001560 PARAMETER Experiment Name: At_Drought_Soil_Dry_P Parameter: Plant Line Value: WS
  misc_feature: MA Experiment 20001560 PARAMETER Experiment Name: At_Drought_Soil_Dry_P Parameter: Post Timepoint (hr) Value: None
  misc_feature: MA Experiment 20001560 PARAMETER Experiment Name: At_Drought_Soil_Dry_P Parameter: Post-Treatment Value: None
  misc_feature: MA Experiment 20001560 PARAMETER Experiment Name: At_Drought_Soil_Dry_P Parameter: Timepoint (day) Value: 14
  misc_feature: MA Experiment 20001560 PARAMETER Experiment Name: At_Drought_Soil_Dry_P Parameter: Treatment Value: Drought vs. No Drought
  misc_feature: MA Experiment ID: 20001757 Result: Up-regulated in Transcription
  misc_feature: MA Experiment 20001757 PARAMETER Experiment Name: At_50mM_NH4NO3_L-to-H_P Parameter: Timepoint (hr) Value: 6
  misc_feature: MA Experiment 20001757 PARAMETER Experiment Name: At_50mM_NH4NO3_L-to-H_P Parameter: Tissue Value: Leaf
  misc_feature: MA Experiment 20001757 PARAMETER Experiment Name: At_50mM_NH4NO3_L-to-H_P Parameter: Treatment Value: 50mM NH4NO3 vs 100mM Mannitol
  misc_feature: MA Experiment ID: 20001906 Result: Down-regulated in Transcription
  misc_feature: MA Experiment 20001906 PARAMETER Experiment Name: At_Drought_Reproduction_P Parameter: Age (day) Value: 35
  misc_feature: MA Experiment 20001906 PARAMETER Experiment Name: At_Drought_Reproduction_P Parameter: Organism Value: A. thaliana
  misc_feature: MA Experiment 20001906 PARAMETER Experiment Name: At_Drought_Reproduction_P Parameter: Plant Line Value: WS
  misc_feature: MA Experiment 20001906 PARAMETER Experiment Name: At_Drought_Reproduction_P Parameter: Timepoint (day) Value: 5
  misc_feature: MA Experiment 20001906 PARAMETER Experiment Name: At_Drought_Reproduction_P Parameter: Tissue Value: Siliques
  misc_feature: MA Experiment 20001906 PARAMETER Experiment Name: At_Drought_Reproduction_P Parameter: Treatment Value: Drought vs. No Drought
  misc_feature: MA Experiment ID: 20001908 Result: Down-regulated in Transcription
  misc_feature: MA Experiment 20001908 PARAMETER Experiment Name: At_Drought_Reproduction_P Parameter: Age (day) Value: 40
  misc_feature: MA Experiment 20001908 PARAMETER Experiment Name: At_Drought_Reproduction_P Parameter: Organism Value: A. thaliana
  misc_feature: MA Experiment 20001908 PARAMETER Experiment Name: At_Drought_Reproduction_P Parameter: Plant Line Value: WS
  misc_feature: MA Experiment 20001908 PARAMETER Experiment Name: At_Drought_Reproduction_P Parameter: Timepoint (day) Value: 10
  misc_feature: MA Experiment 20001908 PARAMETER Experiment Name: At_Drought_Reproduction_P Parameter: Tissue Value: Siliques
  misc_feature: MA Experiment 20001908 PARAMETER Experiment Name: At_Drought_Reproduction_P Parameter: Treatment Value: Drought vs. No Drought
gtaattaacttctaacttgaggggcgtttcattatctcctcctcgtcgtcctccctccatttttcttcacgtctggttttctctctcttttcctctatctctctcctctctttgtctctctcgcttctgtgatttgggctttttcagatgggaaatgcgaacggcaaagacgaagacgccgccgccggtagcggtggtgcagatgttacctcgtcctcggcgagatctaatggcggcgatccttctgcacgcagtcgtcaccgtcgtccttcttcagactctatgagcagttctcctcccggaagtcctgctcgatctccatctcctttcttattcgctcctcaggttcccgtggctccattgcagagagcaaacgcccctcctcctaataacatccaatggaaccaatcacagagagtttttgataatcccccagagcaaggaatccctaccatcattacatggaaccaaggaggtaatgatgtggcggtggaaggatcatgggacaattggagatcaaggaagaagctgcagaaatcagggaaagaccactcgattctctttgtccttccatctggcatataccactacaaggtgattgtggacggtgaatccaaatacatcccagatttaccctttgtagcagacgaagttggcaatgtctgtaacattctcgatgttcataactttgtgccagaaaacccagaaagcatagtggagtttgaggcgccaccatcacctgatcatagctacggtcaaaccctaccagccgcagaagattacgcgaaagagccactggcggtgccacctcagcttcatctaacacttcttggcactactgaagagacagccatagccacaaagcctcaacatgtggtgcttaaccatgtgttcatagagcaaggatggactcctcaatccatagtagctttgggtttaacccacaggttcgagtctaagtacataactgttgtcctctacaaaccgctcacacggtaaccctaaaaattcagtgccacattgttctctctctttctttctttttcatctctcaattatgtgaaaacatgttctttgttcatagtgactagtgagtgcccaacatttgagtttattaacctctttcttacctggtttgtggtgcttgtgtacaaagcttctctcattgtaacgattgttgttttattttctgcaaaaactgtaaaatacattcgctaataatggctataacaagcttatctgctagc

SEQ ID NO: 86076 - protein, 283 aa, Arabidopsis thaliana
  peptide (1)..(283): Ceres Seq. ID no. 12685896
  misc_feature (0)..(0): Pfam Name: 5'-AMP-activated protein kinase, beta subunit, Pfam Description: 5'-AMP-activated protein kinase, beta subunit,
  misc_feature (1)..(283): Homolog of NCBI NO: 15242175 NR Description: AKIN beta1; protein id: At5g21170.1, supported by
  misc_feature (1)..(283): Homolog of NCBI NO: 6686782 NR Description: AKIN gamma [Arabidopsis thaliana]
  misc_feature (1)..(283): Homolog of NCBI NO: 5702015 NR Description: GAL83 protein [Solanum tuberosum]
  misc_feature (1)..(283): Homolog of NCBI NO: 6686784 NR Description: AKIN beta2 [Arabidopsis thaliana]
  misc_feature (23)..(241): Homolog of NCBI NO: 29725558 NR Description: SNF1 kinase complex anchoring protein
  misc_feature (38)..(283): Homolog of NCBI NO: 15234895 NR Description: kinase like protein; protein id: At4g16360.1
  misc_feature (47)..(283): Homolog of NCBI NO: 22324436 NR Description: AKIN beta1-like protein [Oryza sativa (japonica
  misc_feature (62)..(283): Homolog of NCBI NO: 11935162 NR Description: SNF1-related kinase complex anchoring protein
  misc_feature (83)..(281): Homolog of NCBI NO: 4885561 NR Description: protein kinase, AMP-activated, beta 2
  misc_feature (83)..(281): Homolog of NCBI NO: 12018316 NR Description: AMP-activated protein kinase beta-2 regulatory
MGNANGKDEDAAAGSGGADVTSSSARSNGGDPSARSRHRRPSSDSMSSSPPGSPARSPSPFLFAPQVPVAPLQRANAPPPNNIQWNQSQRVFDNPPEQGIPTIITWNQGGNDVAVEGSWDNWRSRKKLQKSGKDHSILFVLPSGIYHYKVIVDGESKYIPDLPFVADEVGNVCNILDVHNFVPENPESIVEFEAPPSPDHSYGQTLPAAEDYAKEPLAVPPQLHLTLLGTTEETAIATKPQHVVLNHVFIEQGWTPQSIVALGLTHRFESKYITVVLYKPLTR

SEQ ID NO: 86077 - protein, 238 aa, Arabidopsis thaliana
  peptide (1)..(238): Ceres Seq. ID no. 12685897
  misc_feature (0)..(0): Pfam Name: 5'-AMP-activated protein kinase, beta subunit, Pfam Description: 5'-AMP-activated protein kinase, beta subunit,
  misc_feature (1)..(238): Homolog of NCBI NO: 15242175 NR Description: AKIN beta1; protein id: At5g21170.1, supported by
  misc_feature (1)..(238): Homolog of NCBI NO: 6686782 NR Description: AKIN gamma [Arabidopsis thaliana]
  misc_feature (1)..(238): Homolog of NCBI NO: 5702015 NR Description: GAL83 protein [Solanum tuberosum]
  misc_feature (1)..(238): Homolog of NCBI NO: 6686784 NR Description: AKIN beta2 [Arabidopsis thaliana]
  misc_feature (1)..(196): Homolog of NCBI NO: 29725558 NR Description: SNF1 kinase complex anchoring protein
  misc_feature (1)..(238): Homolog of NCBI NO: 15234895 NR Description: kinase like protein; protein id: At4g16360.1
  misc_feature (2)..(238): Homolog of NCBI NO: 22324436 NR Description: AKIN beta1-like protein [Oryza sativa (japonica
  misc_feature (17)..(238): Homolog of NCBI NO: 11935162 NR Description: SNF1-related kinase complex anchoring protein
  misc_feature (38)..(236): Homolog of NCBI NO: 4885561 NR Description: protein kinase, AMP-activated, beta 2
  misc_feature (38)..(236): Homolog of NCBI NO: 12018316 NR Description: AMP-activated protein kinase beta-2 regulatory
MSSSPPGSPARSPSPFLFAPQVPVAPLQRANAPPPNNIQWNQSQRVFDNPPEQGIPTIITWNQGGNDVAVEGSWDNWRSRKKLQKSGKDHSILFVLPSGIYHYKVIVDGESKYIPDLPFVADEVGNVCNILDVHNFVPENPESIVEFEAPPSPDHSYGQTLPAAEDYAKEPLAVPPQLHLTLLGTTEETAIATKPQHVVLNHVFIEQGWTPQSIVALGLTHRFESKYITVVLYKPLTR

SEQ ID NO: 86078 - DNA, 1467 bp, Arabidopsis thaliana
  misc_feature (1)..(1467): Ceres Seq. ID no. 12685956
  misc_feature: MA Experiment ID: 20000355 Result: Down-regulated in Transcription
  misc_feature: MA Experiment 20000355 PARAMETER Experiment Name: At_Siliques_Sub_P Parameter: Age (day) Value: 21
  misc_feature: MA Experiment 20000355 PARAMETER Experiment Name: At_Siliques_Sub_P Parameter: Organism Value: A. thaliana
  misc_feature: MA Experiment 20000355 PARAMETER Experiment Name: At_Siliques_Sub_P Parameter: Plant Line Value: WS
  misc_feature: MA Experiment 20000355 PARAMETER Experiment Name: At_Siliques_Sub_P Parameter: Tissue Value: Less Than 5mm Siliques vs. Whole Plant
atgcaagacgcggagagaaccaccaatgatccggtagacagaattgagaaagtgacatggagagatctgcaagacggatctttcaccgcagaactcaagaggcttatctgctttgcggctcctatggctgccgtggttatcattcagttcatgatacagataatctcaatggtgatggtgggtcacctcggtagactctccctcgctagcgcttccttcgcagtctccttctgtaacgtcactggcttcagcttcattataggattgtcatgtgccttagatactttgagtggtcaagcttatggagctaagctatatcggaaactaggtgttcaggcttacacagctatgttctgtcttactttagtgtgtctccctctctctctcctatggttcaacatgggaaagcttattgtgatccttggccaagaccctgctattgctcacgaagctggtagatatgccgcttggctcatcccaggactgttcgcttacgccgttcttcagccgctcattcgctacttcaaaaaccagagcttgatcacacctctcctcgtcacctcttctgttgtgttttgtatccacgttcctctctgctggcttttggtttataagtcagggcttggtcatattggaggagccttggctctcagcttgtcatactggctctatgccattttccttggatctttcatgtactactcctctgcctgttctgagacacgcgcgccgcttaccatggagatattcgagggcgttagagagtttatcaaatatgctcttccttctgcggctatgctttgcctggagtggtggtcatatgaactcataatattactttctggtctgttacccaacccacagctggagacttctgtgctctctatctgtttcgaaacactttcaataacttattcaataccactagcgatcgcggctgcagcaagcacaagaatctcaaatgagttaggagctggaaactctcgagcagcacatattgtggtctatgcggcaatgtctcttgcagtaatggatgcattgatggtgagtatgtctctattagccggcaggcatgttttcggccatgttttcagcagtgacaagaaaaccatcgaatatgttgcaaagatggctccgttggtctctatttctatcatactggacagtttacaaggggttctctcaggtgttgcaagcggatgcgggtggcagcatataggggcttacataaacttcggagctttctatctctgggggatacccattgcagcatctttagccttctgggttcatctgaaaggtgttggcctttggattggaatactagccggtgcagttctgcagactcttctgctggctcttgtcacaggctgcacaaactggaaaacccagctcgcttatacctgtaacacagtagttgcgagtcaggaaatagatgtgggagctgcttctgagtcttggagctag

SEQ ID NO: 86079 - protein, 488 aa, Arabidopsis thaliana
  peptide (1)..(488): Ceres Seq. ID no. 12685957
  misc_feature (1)..(464): Homolog of NCBI NO: 22329577 NR Description: hypothetical protein; protein id: At1g15150.1, by cDNA: gi_17979411 [Arabidopsis thaliana] unknown protein [Arabidopsis thaliana]
  misc_feature (1)..(465): Homolog of NCBI NO: 25518472 NR Description: hypothetical protein F9L1.9 [imported] - thaliana >gi|5103815|gb|AAD39645.1|AC007591_10 Strong similarity gi|4734005 F3L12.7 hypothetical protein from Arabidopsis thaliana
  misc_feature (1)..(467): Homolog of NCBI NO: 25518548 NR Description: hypothetical protein F9L1.10 - Arabidopsis >gi|5103818|gb|AAD39648.1|AC007591_13 Strong similarity to F3L12.7 hypothetical protein from Arabidopsis thaliana BAC
  misc_feature (1)..(464): Homolog of NCBI NO: 15218068 NR Description: hypothetical protein; protein id: At1g15160.1
  misc_feature (1)..(465): Homolog of NCBI NO: 25511632 NR Description: F9L1.11 protein - Arabidopsis thaliana Strong similarity to gi|4734005 F3L12.7 hypothetical protein from
  misc_feature (1)..(464): Homolog of NCBI NO: 15218070 NR Description: hypothetical protein; protein id: At1g15170.1 thaliana] >gi|22655074|gb|AAM98128.1| unknown protein
  misc_feature (1)..(465): Homolog of NCBI NO: 25518684 NR Description: hypothetical protein F9L1.12 [imported] - thaliana >gi|5103816|gb|AAD39646.1|AC007591_11 Strong similarity gi|4734005 F3L12.7 hypothetical protein from Arabidopsis thaliana
  misc_feature (1)..(464): Homolog of NCBI NO: 18394206 NR Description: expressed protein; protein id: At1g15180.1, by cDNA: gi_15028308, supported by cDNA: gi_19310610 [Arabidopsis >gi|15028309|gb|AAK76631.1| unknown protein [Arabidopsis
  misc_feature (1)..(464): Homolog of NCBI NO: 15223961 NR Description: hypothetical protein; protein id: At1g71140.1
  misc_feature (17)..(476): Homolog of NCBI NO: 15228073 NR Description: hypothetical protein; protein id: At2g04050.1
MQDAERTTNDPVDRIEKVTWRDLQDGSFTAELKRLICFAAPMAAVVIIQFMIQIISMVMVGHLGRLSLASASFAVSFCNVTGFSFIIGLSCALDTLSGQAYGAKLYRKLGVQAYTAMFCLTLVCLPLSLLWFNMGKLIVILGQDPAIAHEAGRYAAWLIPGLFAYAVLQPLIRYFKNQSLITPLLVTSSVVFCIHVPLCWLLVYKSGLGHIGGALALSLSYWLYAIFLGSFMYYSSACSETRAPLTMEIFEGVREFIKYALPSAAMLCLEWWSYELIILLSGLLPNPQLETSVLSICFETLSITYSIPLAIAAAASTRISNELGAGNSRAAHIVVYAAMSLAVMDALMVSMSLLAGRHVFGHVFSSDKKTIEYVAKMAPLVSISIILDSLQGVLSGVASGCGWQHIGAYINFGAFYLWGIPIAASLAFWVHLKGVGLWIGILAGAVLQTLLLALVTGCTNWKTQLAYTCNTVVASQEIDVGAASESWS

SEQ ID NO: 86080 - protein, 447 aa, Arabidopsis thaliana
  peptide (1)..(447): Ceres Seq. ID no. 12685958
  misc_feature (1)..(423): Homolog of NCBI NO: 22329577 NR Description: hypothetical protein; protein id: At1g15150.1, by cDNA: gi_17979411 [Arabidopsis thaliana] unknown protein [Arabidopsis thaliana]
  misc_feature (1)..(424): Homolog of NCBI NO: 25518472 NR Description: hypothetical protein F9L1.9 [imported] - thaliana >gi|5103815|gb|AAD39645.1|AC007591_10 Strong similarity gi|4734005 F3L12.7 hypothetical protein from Arabidopsis thaliana
  misc_feature (1)..(426): Homolog of NCBI NO: 25518548 NR Description: hypothetical protein F9L1.10 - Arabidopsis >gi|5103818|gb|AAD39648.1|AC007591_13 Strong similarity to F3L12.7 hypothetical protein from Arabidopsis thaliana BAC
  misc_feature (1)..(423): Homolog of NCBI NO: 15218068 NR Description: hypothetical protein; protein id: At1g15160.1
  misc_feature (1)..(424): Homolog of NCBI NO: 25511632 NR Description: F9L1.11 protein - Arabidopsis thaliana Strong similarity to gi|4734005 F3L12.7 hypothetical protein from
  misc_feature (1)..(423): Homolog of NCBI NO: 15218070 NR Description: hypothetical protein; protein id: At1g15170.1 thaliana] >gi|22655074|gb|AAM98128.1| unknown protein
  misc_feature (1)..(424): Homolog of NCBI NO: 25518684 NR Description: hypothetical protein F9L1.12 [imported] - thaliana >gi|5103816|gb|AAD39646.1|AC007591_11 Strong similarity gi|4734005 F3L12.7 hypothetical protein from Arabidopsis thaliana
  misc_feature (1)..(423): Homolog of NCBI NO: 18394206 NR Description: expressed protein; protein id: At1g15180.1, by cDNA: gi_15028308, supported by cDNA: gi_19310610 [Arabidopsis >gi|15028309|gb|AAK76631.1| unknown protein [Arabidopsis
  misc_feature (1)..(423): Homolog of NCBI NO: 15223961 NR Description: hypothetical protein; protein id: At1g71140.1
  misc_feature (1)..(435): Homolog of NCBI NO: 15228073 NR Description: hypothetical protein; protein id: At2g04050.1
MAAVVIIQFMIQIISMVMVGHLGRLSLASASFAVSFCNVTGFSFIIGLSCALDTLSGQAYGAKLYRKLGVQAYTAMFCLTLVCLPLSLLWFNMGKLIVILGQDPAIAHEAGRYAAWLIPGLFAYAVLQPLIRYFKNQSLITPLLVTSSVVFCIHVPLCWLLVYKSGLGHIGGALALSLSYWLYAIFLGSFMYYSSACSETRAPLTMEIFEGVREFIKYALPSAAMLCLEWWSYELIILLSGLLPNPQLETSVLSICFETLSITYSIPLAIAAAASTRISNELGAGNSRAAHIVVYAAMSLAVMDALMVSMSLLAGRHVFGHVFSSDKKTIEYVAKMAPLVSISIILDSLQGVLSGVASGCGWQHIGAYINFGAFYLWGIPIAASLAFWVHLKGVGLWIGILAGAVLQTLLLALVTGCTNWKTQLAYTCNTVVASQEIDVGAASESWS

SEQ ID NO: 86081 - protein, 438 aa, Arabidopsis thaliana
  peptide (1)..(438): Ceres Seq. ID no. 12685959
  misc_feature (1)..(414): Homolog of NCBI NO: 22329577 NR Description: hypothetical protein; protein id: At1g15150.1, by cDNA: gi_17979411 [Arabidopsis thaliana] unknown protein [Arabidopsis thaliana]
  misc_feature (1)..(415): Homolog of NCBI NO: 25518472 NR Description: hypothetical protein F9L1.9 [imported] - thaliana >gi|5103815|gb|AAD39645.1|AC007591_10 Strong similarity gi|4734005 F3L12.7 hypothetical protein from Arabidopsis thaliana
  misc_feature (1)..(417): Homolog of NCBI NO: 25518548 NR Description: hypothetical protein F9L1.10 - Arabidopsis >gi|5103818|gb|AAD39648.1|AC007591_13 Strong similarity to F3L12.7 hypothetical protein from Arabidopsis thaliana BAC
  misc_feature (1)..(414): Homolog of NCBI NO: 15218068 NR Description: hypothetical protein; protein id: At1g15160.1
  misc_feature (1)..(415): Homolog of NCBI NO: 25511632 NR Description: F9L1.11 protein - Arabidopsis thaliana Strong similarity to gi|4734005 F3L12.7 hypothetical protein from
  misc_feature (1)..(414): Homolog of NCBI NO: 15218070 NR Description: hypothetical protein; protein id: At1g15170.1 thaliana] >gi|22655074|gb|AAM98128.1| unknown protein
  misc_feature (1)..(415): Homolog of NCBI NO: 25518684 NR Description: hypothetical protein F9L1.12 [imported] - thaliana >gi|5103816|gb|AAD39646.1|AC007591_11 Strong similarity gi|4734005 F3L12.7 hypothetical protein from Arabidopsis thaliana
  misc_feature (1)..(414): Homolog of NCBI NO: 18394206 NR Description: expressed protein; protein id: At1g15180.1, by cDNA: gi_15028308, supported by cDNA: gi_19310610 [Arabidopsis >gi|15028309|gb|AAK76631.1| unknown protein [Arabidopsis
  misc_feature (1)..(414): Homolog of NCBI NO: 15223961 NR Description: hypothetical protein; protein id: At1g71140.1
  misc_feature (1)..(426): Homolog of NCBI NO: 15228073 NR Description: hypothetical protein; protein id: At2g04050.1
MIQIISMVMVGHLGRLSLASASFAVSFCNVTGFSFIIGLSCALDTLSGQAYGAKLYRKLGVQAYTAMFCLTLVCLPLSLLWFNMGKLIVILGQDPAIAHEAGRYAAWLIPGLFAYAVLQPLIRYFKNQSLITPLLVTSSVVFCIHVPLCWLLVYKSGLGHIGGALALSLSYWLYAIFLGSFMYYSSACSETRAPLTMEIFEGVREFIKYALPSAAMLCLEWWSYELIILLSGLLPNPQLETSVLSICFETLSITYSIPLAIAAAASTRISNELGAGNSRAAHIVVYAAMSLAVMDALMVSMSLLAGRHVFGHVFSSDKKTIEYVAKMAPLVSISIILDSLQGVLSGVASGCGWQHIGAYINFGAFYLWGIPIAASLAFWVHLKGVGLWIGILAGAVLQTLLLALVTGCTNWKTQLAYTCNTVVASQEIDVGAASESWS

SEQ ID NO: 86082 - DNA, 1785 bp, Arabidopsis thaliana
  misc_feature (1)..(1785): Ceres Seq. ID no. 12686008
  misc_feature: MA Experiment ID: 20000227 Result: Up-regulated in Transcription
  misc_feature: MA Experiment 20000227 PARAMETER Experiment Name: At_Root-Tips-vs-Tops_P Parameter: Tissue Value: Root Tips vs. Root Tops
  misc_feature: MA Experiment ID: 20000286 Result: Up-regulated in Transcription
  misc_feature: MA Experiment 20000286 PARAMETER Experiment Name: At_Open_Flower_P Parameter: Age (day) Value: 21
  misc_feature: MA Experiment 20000286 PARAMETER Experiment Name: At_Open_Flower_P Parameter: Plant Line Value: WS
  misc_feature: MA Experiment 20000286 PARAMETER Experiment Name: At_Open_Flower_P Parameter: Tissue Value: Half Open vs. Whole Plant
  misc_feature: MA Experiment ID: 20001451 Result: Down-regulated in Transcription
  misc_feature: MA Experiment 20001451 PARAMETER Experiment Name: At_Far-red-induction_P Parameter: Age (day) Value: 7
  misc_feature: MA Experiment 20001451 PARAMETER Experiment Name: At_Far-red-induction_P Parameter: Light Value: Far-red vs. White
  misc_feature: MA Experiment 20001451 PARAMETER Experiment Name: At_Far-red-induction_P Parameter: Organism Value: A. thaliana
  misc_feature: MA Experiment 20001451 PARAMETER Experiment Name: At_Far-red-induction_P Parameter: Plant Line Value: Columbia
  misc_feature: MA Experiment 20001451 PARAMETER Experiment Name: At_Far-red-induction_P Parameter: Timepoint (hr) Value: 24
  misc_feature: MA Experiment 20001451 PARAMETER Experiment Name: At_Far-red-induction_P Parameter: Tissue Value: Whole Plant
  misc_feature: MA Experiment ID: 20001557 Result: Up-regulated in Transcription
  misc_feature: MA Experiment 20001557 PARAMETER Experiment Name: At_Drought_Soil_Dry_P Parameter: Age (day) Value: 27
  misc_feature: MA Experiment 20001557 PARAMETER Experiment Name: At_Drought_Soil_Dry_P Parameter: Organism Value: A. thaliana
  misc_feature: MA Experiment 20001557 PARAMETER Experiment Name: At_Drought_Soil_Dry_P Parameter: Plant Line Value: WS
  misc_feature: MA Experiment 20001557 PARAMETER Experiment Name: At_Drought_Soil_Dry_P Parameter: Post Timepoint (hr) Value: 3
  misc_feature: MA Experiment 20001557 PARAMETER Experiment Name: At_Drought_Soil_Dry_P Parameter: Post-Treatment Value: Re-Water vs. No Drought
  misc_feature: MA Experiment 20001557 PARAMETER Experiment Name: At_Drought_Soil_Dry_P Parameter: Timepoint (day) Value: 13
  misc_feature: MA Experiment 20001557 PARAMETER Experiment Name: At_Drought_Soil_Dry_P Parameter: Treatment Value: Drought vs. No Drought
  misc_feature: MA Experiment ID: 20001558 Result: Up-regulated in Transcription
  misc_feature: MA Experiment 20001558 PARAMETER Experiment Name: At_Drought_Soil_Dry_P Parameter: Age (day) Value: 27
  misc_feature: MA Experiment 20001558 PARAMETER Experiment Name: At_Drought_Soil_Dry_P Parameter: Organism Value: A. thaliana
  misc_feature: MA Experiment 20001558 PARAMETER Experiment Name: At_Drought_Soil_Dry_P Parameter: Plant Line Value: WS
  misc_feature: MA Experiment 20001558 PARAMETER Experiment Name: At_Drought_Soil_Dry_P Parameter: Post Timepoint (hr) Value: 6
  misc_feature: MA Experiment 20001558 PARAMETER Experiment Name: At_Drought_Soil_Dry_P Parameter: Post-Treatment Value: Re-Water vs. No Drought
  misc_feature: MA Experiment 20001558 PARAMETER Experiment Name: At_Drought_Soil_Dry_P Parameter: Timepoint (day) Value: 13
  misc_feature: MA Experiment 20001558 PARAMETER Experiment Name: At_Drought_Soil_Dry_P Parameter: Treatment Value: Drought vs. No Drought
  misc_feature: MA Experiment ID: 20001757 Result: Up-regulated in Transcription
  misc_feature: MA Experiment 20001757 PARAMETER Experiment Name: At_50mM_NH4NO3_L-to-H_P Parameter: Timepoint (hr) Value: 6
  misc_feature: MA Experiment 20001757 PARAMETER Experiment Name: At_50mM_NH4NO3_L-to-H_P Parameter: Tissue Value: Leaf
  misc_feature: MA Experiment 20001757 PARAMETER Experiment Name: At_50mM_NH4NO3_L-to-H_P Parameter: Treatment Value: 50mM NH4NO3 vs 100mM Mannitol
atgtttgctctttccaaggttttgcggagaagtcagagtctccgcctaggagcttgcaatgctgtctactctaagctagatataccattgggagaaagaaacattgctattgaatcaaacgctttgattcatgataaacacgaagctttgcctagattttatgagctctcttggtcttcctctaccggaagacgttcactttcctcggacgctggagctaaaactaccggagatgacgatgacctcgaagacaagaatgtagaccttgcaactccagacgagactagtagtgatagtgaagatggtgaggagttttccggtgatgaaggggatattgaaggagcagagctggaactacatgtcccggaaagcaagagaccatcggagatgtttaaggccattgtttctgtctcaggtctgtctgtagggagtgctcttgataagtgggttgaacaaggaaaggataccaaccgtaaagagtttgaaagtgcgatgctacaactccgtaaacgtcggatgtttgggagagcattgcagatgacagaatggttagacgaaaataagcagtttgaaatggaggagagagattatgcttgtcggcttgatctgatttccaaggtacgtggctggtacaagggagaagcttatatcaaaacaatcccggaatctttcagaggggaattggtctaccgaaccctcctggcgaatcatgtggcaactagcaatgtgagaacagctgaagcagttttcaacaaaatgaaggacttgggattccctctgtcaacattcacctgtaatcagatgcttattctttacaaaagggtcgacaagaagaaaatagccgatgtgttattgctgttggagaaggaaaatctgaagccgaatcttaacacatacaaaatcctgattgataccaaaggatcatcaaatgacataactgggatggaacaaattgtggagacaatgaaaagtgaaggtgttgagcttgaccttcgtgcacgagctctcattgcaagacactatgcatcagctgggcttaaagagaaggctgagaaagtgctgaaagagatggaaggtgaaagcttggaggaaaatcggcatatgtgcaaggatttgctttccgtctatggctatctccagagggaggatgaagtgcgcagagtttggaagatctgtgaagaaaacccccgttataacgaggtccttgctgcaatcttggcttttggaaagatcgataaagtcaaagatgcagaggcggtttttgagaaggtgttgaagatgtcccatagagtttcttctaatgtttactccgttctcttgagggtttacgtggatcacaagatggtctcagagggtaaggatcttgttaagcagatgtcagacagcgggtgcaatattggggccttaacatgggatgcagtgatcaagctctatgtggaagccggggaagtagaaaaggctgagtcttcactgagcaaggcaatacagtcgaaacagattaaaccgttgatgagctccttcatgtacttaatgcacgagtatgtgagaaggggtgatgttcataacacagagaaaatcttccagaggatgaagcaagctggctatcaatctcgcttctgggcgtaccaaacccttatccaagcttatgtcaatgccaaagctccagcttatggaatgaaggaaagaatgaaagctgataacatcttcccaaataaaagattagctgctcaactcgctaaagccgatcccttcaagaagacccctctctcggatctccttgattga

SEQ ID NO: 86083 - protein, 594 aa, Arabidopsis thaliana
  peptide (1)..(594): Ceres Seq. ID no. 12686009
  misc_feature (505)..(539): Pfam Name: PPR repeat Pfam Description: PPR repeat
  misc_feature (11)..(594): Homolog of NCBI NO: 15218196 NR Description: hypothetical protein; protein id: At1g15480.1 thaliana] >gi|5103846|gb|AAD39676.1|AC007591_41 F9L1.43
  misc_feature (1)..(594): Homolog of NCBI NO: 15220095 NR Description: hypothetical protein; protein id: At1g80270.1, by cDNA: gi_17064897, supported by cDNA: gi_20259917 [Arabidopsis
  misc_feature (51)..(594): Homolog of NCBI NO: 6958202 NR Description: DNA-binding protein [Triticum aestivum]
  misc_feature (1)..(594): Homolog of NCBI NO: 22331104 NR Description: DNA-binding protein, putative; protein id:
  misc_feature (71)..(594): Homolog of NCBI NO: 34903362 NR Description: unnamed protein product [Oryza sativa (japonica group)] >gi|6498438|dbj|BAA87841.1| unnamed protein product
  misc_feature (67)..(578): Homolog of NCBI NO: 34900334 NR Description: P0592C06.16 [Oryza sativa (japonica
  misc_feature (225)..(578): Homolog of NCBI NO: 34394024 NR Description: putative DNA-binding protein [Oryza sativa
  misc_feature (141)..(585): Homolog of NCBI NO: 34905294 NR Description: putative DNA-binding protein [Oryza sativa
  misc_feature (148)..(568): Homolog of NCBI NO: 15235508 NR Description: hypothetical protein; protein id: At4g02820.1, by cDNA: gi_17064737 [Arabidopsis thaliana]
  misc_feature (148)..(568): Homolog of NCBI NO: 17064738 NR Description: Unknown protein [Arabidopsis thaliana]
MFALSKVLRRSQSLRLGACNAVYSKLDIPLGERNIAIESNALIHDKHEALPRFYELSWSSSTGRRSLSSDAGAKTTGDDDDLEDKNVDLATPDETSSDSEDGEEFSGDEGDIEGAELELHVPESKRPSEMFKAIVSVSGLSVGSALDKWVEQGKDTNRKEFESAMLQLRKRRMFGRALQMTEWLDENKQFEMEERDYACRLDLISKVRGWYKGEAYIKTIPESFRGELVYRTLLANHVATSNVRTAEAVFNKMKDLGFPLSTFTCNQMLILYKRVDKKKIADVLLLLEKENLKPNLNTYKILIDTKGSSNDITGMEQIVETMKSEGVELDLRARALIARHYASAGLKEKAEKVLKEMEGESLEENRHMCKDLLSVYGYLQREDEVRRVWKICEENPRYNEVLAAILAFGKIDKVKDAEAVFEKVLKMSHRVSSNVYSVLLRVYVDHKMVSEGKDLVKQMSDSGCNIGALTWDAVIKLYVEAGEVEKAESSLSKAIQSKQIKPLMSSFMYLMHEYVRRGDVHNTEKIFQRMKQAGYQSRFWAYQTLIQAYVNAKAPAYGMKERMKADNIFPNKRLAAQLAKADPFKKTPLSDLLD

SEQ ID NO: 86084 - protein, 465 aa, Arabidopsis thaliana; identical to SEQ ID NO: 69543
  peptide (1)..(465): Ceres Seq. ID no. 12686010
  misc_feature (376)..(410): Pfam Name: PPR repeat Pfam Description: PPR repeat
  misc_feature (1)..(465): Homolog of NCBI NO: 15218196 NR Description: hypothetical protein; protein id: At1g15480.1 thaliana] >gi|5103846|gb|AAD39676.1|AC007591_41 F9L1.43
  misc_feature (1)..(465): Homolog of NCBI NO: 15220095 NR Description: hypothetical protein; protein id: At1g80270.1, by cDNA: gi_17064897, supported by cDNA: gi_20259917 [Arabidopsis
  misc_feature (1)..(465): Homolog of NCBI NO: 6958202 NR Description: DNA-binding protein [Triticum aestivum]
  misc_feature (1)..(465): Homolog of NCBI NO: 22331104 NR Description: DNA-binding protein, putative; protein id:
  misc_feature (1)..(465): Homolog of NCBI NO: 34903362 NR Description: unnamed protein product [Oryza sativa (japonica group)] >gi|6498438|dbj|BAA87841.1| unnamed protein product
  misc_feature (1)..(449): Homolog of NCBI NO: 34900334 NR Description: P0592C06.16 [Oryza sativa (japonica
  misc_feature (96)..(449): Homolog of NCBI NO: 34394024 NR Description: putative DNA-binding protein [Oryza sativa
  misc_feature (12)..(456): Homolog of NCBI NO: 34905294 NR Description: putative DNA-binding protein [Oryza sativa
  misc_feature (19)..(439): Homolog of NCBI NO: 15235508 NR Description: hypothetical protein; protein id: At4g02820.1, by cDNA: gi_17064737 [Arabidopsis thaliana]
  misc_feature (19)..(439): Homolog of NCBI NO: 17064738 NR Description: Unknown protein [Arabidopsis thaliana]

SEQ ID NO: 86085 - protein, 430 aa, Arabidopsis thaliana; identical to SEQ ID NO: 69544
  peptide (1)..(430): Ceres Seq. ID no. 12686011
  misc_feature (341)..(375): Pfam Name: PPR repeat Pfam Description: PPR repeat
  misc_feature (1)..(430): Homolog of NCBI NO: 15218196 NR Description: hypothetical protein; protein id: At1g15480.1 thaliana] >gi|5103846|gb|AAD39676.1|AC007591_41 F9L1.43
  misc_feature (1)..(430): Homolog of NCBI NO: 15220095 NR Description: hypothetical protein; protein id: At1g80270.1, by cDNA: gi_17064897, supported by cDNA: gi_20259917 [Arabidopsis
  misc_feature (1)..(430): Homolog of NCBI NO: 6958202 NR Description: DNA-binding protein [Triticum aestivum]
  misc_feature (1)..(430): Homolog of NCBI NO: 22331104 NR Description: DNA-binding protein, putative; protein id:
  misc_feature (1)..(430): Homolog of NCBI NO: 34903362 NR Description: unnamed protein product [Oryza sativa (japonica group)] >gi|6498438|dbj|BAA87841.1| unnamed protein product
  misc_feature (1)..(414): Homolog of NCBI NO: 34900334 NR Description: P0592C06.16 [Oryza sativa (japonica
  misc_feature (61)..(414): Homolog of NCBI NO: 34394024 NR Description: putative DNA-binding protein [Oryza sativa
  misc_feature (1)..(421): Homolog of NCBI NO: 34905294 NR Description: putative DNA-binding protein [Oryza sativa
  misc_feature (1)..(404): Homolog of NCBI NO: 15235508 NR Description: hypothetical protein; protein id: At4g02820.1, by cDNA: gi_17064737 [Arabidopsis thaliana]
  misc_feature (1)..(404): Homolog of NCBI NO: 17064738 NR Description: Unknown protein [Arabidopsis thaliana]

SEQ ID NO: 86086 - DNA, 788 bp, Arabidopsis thaliana
  misc_feature (1)..(788): Ceres Seq. ID no. 12686065
  misc_feature: MA Experiment ID: 20000227 Result: Down-regulated in Transcription
  misc_feature: MA Experiment 20000227 PARAMETER Experiment Name: At_Root-Tips-vs-Tops_P Parameter: Tissue Value: Root Tips vs. Root Tops
  misc_feature: MA Experiment ID: 20000234 Result: Down-regulated in Transcription
  misc_feature: MA Experiment 20000234 PARAMETER Experiment Name: At_Siliques_P Parameter: Age (day) Value: 21
  misc_feature: MA Experiment 20000234 PARAMETER Experiment Name: At_Siliques_P Parameter: Organism Value: A. thaliana
  misc_feature: MA Experiment 20000234 PARAMETER Experiment Name: At_Siliques_P Parameter: Plant Line Value: WS
  misc_feature: MA Experiment 20000234 PARAMETER Experiment Name: At_Siliques_P Parameter: Tissue Value: Less Than 5mm Siliques vs. Whole Plant
  misc_feature: MA Experiment ID: 20000235 Result: Down-regulated in Transcription
  misc_feature: MA Experiment 20000235 PARAMETER Experiment Name: At_Siliques_P Parameter: Age (day) Value: 21
  misc_feature: MA Experiment 20000235 PARAMETER Experiment Name: At_Siliques_P Parameter: Organism Value: A. thaliana
  misc_feature: MA Experiment 20000235 PARAMETER Experiment Name: At_Siliques_P Parameter: Plant Line Value: WS
  misc_feature: MA Experiment 20000235 PARAMETER Experiment Name: At_Siliques_P Parameter: Tissue Value: 5-10mm Siliques vs. Whole Plant
  misc_feature: MA Experiment ID: 20000264 Result: Down-regulated in Transcription
  misc_feature: MA Experiment 20000264 PARAMETER Experiment Name: At_Open_Flower_P Parameter: Age (day) Value: 21
  misc_feature: MA Experiment 20000264 PARAMETER Experiment Name: At_Open_Flower_P Parameter: Plant Line Value: WS
  misc_feature: MA Experiment 20000264 PARAMETER Experiment Name: At_Open_Flower_P Parameter: Tissue Value: Open Flower vs. Whole Plant
  misc_feature: MA Experiment ID: 20000265 Result: Down-regulated in Transcription
  misc_feature: MA Experiment 20000265 PARAMETER Experiment Name: At_Open_Flower_P Parameter: Age (day) Value: 21
  misc_feature: MA Experiment 20000265 PARAMETER Experiment Name: At_Open_Flower_P Parameter: Plant Line Value: WS
  misc_feature: MA Experiment 20000265 PARAMETER Experiment Name: At_Open_Flower_P Parameter: Tissue Value: Closed Flower vs. Whole Plant
  misc_feature: MA Experiment ID: 20000286 Result: Down-regulated in Transcription
  misc_feature: MA Experiment 20000286 PARAMETER Experiment Name: At_Open_Flower_P Parameter: Age (day) Value: 21
  misc_feature: MA Experiment 20000286 PARAMETER Experiment Name: At_Open_Flower_P Parameter: Plant Line Value: WS
  misc_feature: MA Experiment 20000286 PARAMETER Experiment Name: At_Open_Flower_P Parameter: Tissue Value: Half Open vs. Whole Plant
  misc_feature: MA Experiment ID: 20001450 Result: Up-regulated in Transcription
  misc_feature: MA Experiment 20001450 PARAMETER Experiment Name: At_Far-red-induction_P Parameter: Age (day) Value: 7
  misc_feature: MA Experiment 20001450 PARAMETER Experiment Name: At_Far-red-induction_P Parameter: Light Value: Far-red vs. White
  misc_feature: MA Experiment 20001450 PARAMETER Experiment Name: At_Far-red-induction_P Parameter: Organism Value: A. thaliana
  misc_feature: MA Experiment 20001450 PARAMETER Experiment Name: At_Far-red-induction_P Parameter: Plant Line Value: Columbia
  misc_feature: MA Experiment 20001450 PARAMETER Experiment Name: At_Far-red-induction_P Parameter: Timepoint (hr) Value: 8
  misc_feature: MA Experiment 20001450 PARAMETER Experiment Name: At_Far-red-induction_P Parameter: Tissue Value: Whole Plant
atggatgtgcctagctcttgggatgctttacggaaacaggctagaaagattgaagctcagcttgacgagcagatgcattcatatcgtagacttgtttccacaaaggctttatcaaaatcagatggtaatgagagtgatcttgaagctgggattgacttacttcttaggcaactgcaacaagttaatgctcagatgcaagcatgggtatcttctggtgggtcagaaatggtctcccatactttaactcgacatcaagagatccttcaagatctgacacaggagttttatcgacaccgctccagtcttagagcaaaacaagagcatgcttcacttcttgaggactttagagaatttgatcggactagattagatttagaagatggatatgggtctgaacaagccctgatcaaggaacatatgggaatcaaccgcaatacagctcagatggacggtgtcatttcacaagctcaggcaacactcggtacgcttgtgtttcaacgttcaacttttggaggcatcaactcaaagcttagcaatgtcgccagccgtctacctacggtgaacactattctggcagcgataaagaggaaaaagtcgatggatacaatcattctttcactcgttgcggctgtatgcacatttctcatattcatttactggataaccaagtagaatttgcccatttctttcgtttcatctttatgttgggccacgtctggttttcccatgatgtcaatttgttctgcaattatcggtgttctagtaaagaatctaaagatcaaaaacat

SEQ ID NO: 86087 - protein, 223 aa, Arabidopsis thaliana
  peptide (1)..(223): Ceres Seq. ID no. 12686066
  misc_feature (51)..(201): Pfam Name: Vesicle transport v-SNARE protein Pfam Description: Vesicle transport v-SNARE protein
  misc_feature (1)..(223): Homolog of NCBI NO: 18394296 NR Description: cis-Golgi SNARE protein, putative; protein id: supported by cDNA: gi_12083259, supported by cDNA: gi_13898892, by cDNA: gi_15294143, supported by cDNA: gi_20147266 gb|F14225,
  misc_feature (38)..(223): Homolog of NCBI NO: 6850926 NR Description: hypothetical protein [Cicer arietinum]
  misc_feature (5)..(223): Homolog of NCBI NO: 15225431 NR Description: cis-Golgi SNARE protein, putative; protein id: supported by cDNA: gi_13898894 [Arabidopsis thaliana]
  misc_feature (51)..(219): Homolog of NCBI NO: 4758456 NR Description: golgi SNAP receptor complex member 1; Golgi SNARE kDa [Homo sapiens] >gi|12643659|sp|O95249|GS28_HUMAN 28 kDa Golgi
  misc_feature (51)..(219): Homolog of NCBI NO: 11132038 NR Description: 28 kDa Golgi SNARE protein (Golgi SNAP receptor
  misc_feature (51)..(219): Homolog of NCBI NO: 16758358 NR Description: golgi SNAP receptor complex member 1; cis-Golgi (p28) [Rattus norvegicus] >gi|11131963|sp|Q62931|GS28_RAT 28 kDa
  misc_feature (51)..(219): Homolog of NCBI NO: 30388705 NR Description: Gosr1 protein [Mus musculus]
  misc_feature (6)..(221): Homolog of NCBI NO: 17552950 NR Description: Predicted CDS, putative protein, with 2 coiled domains, of eukaryotic origin [Caenorhabditis elegans]
  misc_feature (51)..(219): Homolog of NCBI NO: 3335132 NR Description: GOS28/P28 protein [Homo sapiens]
  misc_feature (38)..(219): Homolog of NCBI NO: 28280046 NR Description: Similar to golgi SNAP receptor complex member 1
MDVPSSWDALRKQARKIEAQLDEQMHSYRRLVSTKALSKSDGNESDLEAGIDLLLRQLQQVNAQMQAWVSSGGSEMVSHTLTRHQEILQDLTQEFYRHRSSLRAKQEHASLLEDFREFDRTRLDLEDGYGSEQALIKEHMGINRNTAQMDGVISQAQATLGTLVFQRSTFGGINSKLSNVASRLPTVNTILAAIKRKKSMDTIILSLVAAVCTFLIFIYWITK

SEQ ID NO: 86088 - protein, 199 aa, Arabidopsis thaliana
  peptide (1)..(199): Ceres Seq. ID no. 12686067
  misc_feature (27)..(177): Pfam Name: Vesicle transport v-SNARE protein Pfam Description: Vesicle transport v-SNARE protein
  misc_feature (1)..(199): Homolog of NCBI NO: 18394296 NR Description: cis-Golgi SNARE protein, putative; protein id: supported by cDNA: gi_12083259, supported by cDNA: gi_13898892, by cDNA: gi_15294143, supported by cDNA: gi_20147266 gb|F14225,
  misc_feature (14)..(199): Homolog of NCBI NO: 6850926 NR Description: hypothetical protein [Cicer arietinum]
  misc_feature (1)..(199): Homolog of NCBI NO: 15225431 NR Description: cis-Golgi SNARE protein, putative; protein id: supported by cDNA: gi_13898894 [Arabidopsis thaliana]
  misc_feature (27)..(195): Homolog of NCBI NO: 4758456 NR Description: golgi SNAP receptor complex member 1; Golgi SNARE kDa [Homo sapiens] >gi|12643659|sp|O95249|GS28_HUMAN 28 kDa Golgi
  misc_feature (27)..(195): Homolog of NCBI NO: 11132038 NR Description: 28 kDa Golgi SNARE protein (Golgi SNAP receptor
  misc_feature (27)..(195): Homolog of NCBI NO: 16758358 NR Description: golgi SNAP receptor complex member 1; cis-Golgi (p28) [Rattus norvegicus] >gi|11131963|sp|Q62931|GS28_RAT 28 kDa
  misc_feature (27)..(195): Homolog of NCBI NO: 30388705 NR Description: Gosr1 protein [Mus musculus]
  misc_feature (1)..(197): Homolog of NCBI NO: 17552950 NR Description: Predicted CDS, putative protein, with 2 coiled domains, of eukaryotic origin [Caenorhabditis elegans]
  misc_feature (27)..(195): Homolog of NCBI NO: 3335132 NR Description: GOS28/P28 protein [Homo sapiens]
  misc_feature (14)..(195): Homolog of NCBI NO: 28280046 NR Description: Similar to golgi SNAP receptor complex member 1
MHSYRRLVSTKALSKSDGNESDLEAGIDLLLRQLQQVNAQMQAWVSSGGSEMVSHTLTRHQEILQDLTQEFYRHRSSLRAKQEHASLLEDFREFDRTRLDLEDGYGSEQALIKEHMGINRNTAQMDGVISQAQATLGTLVFQRSTFGGINSKLSNVASRLPTVNTILAAIKRKKSMDTIILSLVAAVCTFLIFIYWITK

SEQ ID NO: 86089 - protein, 159 aa, Arabidopsis thaliana
  peptide (1)..(159): Ceres Seq. ID no. 12686068
  misc_feature (1)..(137): Pfam Name: Vesicle transport v-SNARE protein Pfam Description: Vesicle transport v-SNARE protein
  misc_feature (1)..(159): Homolog of NCBI NO: 18394296 NR Description: cis-Golgi SNARE protein, putative; protein id: supported by cDNA: gi_12083259, supported by cDNA: gi_13898892, by cDNA: gi_15294143, supported by cDNA: gi_20147266 gb|F14225,
  misc_feature (1)..(159): Homolog of NCBI NO: 6850926 NR Description: hypothetical protein [Cicer arietinum]
  misc_feature (1)..(159): Homolog of NCBI NO: 15225431 NR Description: cis-Golgi SNARE protein, putative; protein id: supported by cDNA: gi_13898894 [Arabidopsis thaliana]
  misc_feature (1)..(155): Homolog of NCBI NO: 4758456 NR Description: golgi SNAP receptor complex member 1; Golgi SNARE kDa [Homo sapiens] >gi|12643659|sp|O95249|GS28_HUMAN 28 kDa Golgi
  misc_feature (1)..(155): Homolog of NCBI NO: 11132038 NR Description: 28 kDa Golgi SNARE protein (Golgi SNAP receptor
  misc_feature (1)..(155): Homolog of NCBI NO: 16758358 NR Description: golgi SNAP receptor complex member 1; cis-Golgi (p28) [Rattus norvegicus] >gi|11131963|sp|Q62931|GS28_RAT 28 kDa
  misc_feature (1)..(155): Homolog of NCBI NO: 30388705 NR Description: Gosr1 protein [Mus musculus]
  misc_feature (1)..(157): Homolog of NCBI NO: 17552950 NR Description: Predicted CDS, putative protein, with 2 coiled domains, of eukaryotic origin [Caenorhabditis elegans]
  misc_feature (1)..(155): Homolog of NCBI NO: 3335132 NR Description: GOS28/P28 protein [Homo sapiens]
  misc_feature (1)..(155): Homolog of NCBI NO: 28280046 NR Description: Similar to golgi SNAP receptor complex member 1
MQAWVSSGGSEMVSHTLTRHQEILQDLTQEFYRHRSSLRAKQEHASLLEDFREFDRTRLDLEDGYGSEQALIKEHMGINRNTAQMDGVISQAQATLGTLVFQRSTFGGINSKLSNVASRLPTVNTILAAIKRKKSMDTIILSLVAAVCTFLIFIYWITK

SEQ ID NO: 86090 - DNA, 4128 bp, Arabidopsis thaliana
  misc_feature (1)..(4128): Ceres Seq. ID no. 12686104
  misc_feature: MA Experiment ID: 20000315 Result: Down-regulated in Transcription
  misc_feature: MA Experiment 20000315 PARAMETER Experiment Name: At_14day_Shoots-Roots_Sub_P Parameter: Age (day) Value: 14
  misc_feature: MA Experiment 20000315 PARAMETER Experiment Name: At_14day_Shoots-Roots_Sub_P Parameter: Organism Value: A. thaliana
  misc_feature: MA Experiment 20000315 PARAMETER Experiment Name: At_14day_Shoots-Roots_Sub_P Parameter: Plant Line Value: WS
  misc_feature: MA Experiment 20000315 PARAMETER Experiment Name: At_14day_Shoots-Roots_Sub_P Parameter: Tissue Value: Shoots vs. Whole Plant
  misc_feature: MA Experiment ID: 20000355 Result: Down-regulated in Transcription
  misc_feature: MA Experiment 20000355 PARAMETER Experiment Name: At_Siliques_Sub_P Parameter: Age (day) Value: 21
  misc_feature: MA Experiment 20000355 PARAMETER Experiment Name: At_Siliques_Sub_P Parameter: Organism Value: A. thaliana
  misc_feature: MA Experiment 20000355 PARAMETER Experiment Name: At_Siliques_Sub_P Parameter: Plant Line Value: WS
  misc_feature: MA Experiment 20000355 PARAMETER Experiment Name: At_Siliques_Sub_P Parameter: Tissue Value: Less Than 5mm Siliques vs. Whole Plant
  misc_feature: MA Experiment ID: 20000440 Result: Down-regulated in Transcription
  misc_feature: MA Experiment 20000440 PARAMETER Experiment Name: At_Closed-Flower__Sub_P Parameter: Tissue Value: Closed Flower vs. Whole Plant
  misc_feature: MA Experiment ID: 20000634 Result: Up-regulated in Transcription
  misc_feature: MA Experiment 20000634 PARAMETER Experiment Name: At_10percent_PEG_Sub_P Parameter: Age (day) Value: 12
  misc_feature: MA Experiment 20000634 PARAMETER Experiment Name: At_10percent_PEG_Sub_P Parameter: Organism Value: A. thaliana
  misc_feature: MA Experiment 20000634 PARAMETER Experiment Name: At_10percent_PEG_Sub_P Parameter: Plant Line Value: WS
  misc_feature: MA Experiment 20000634 PARAMETER Experiment Name: At_10percent_PEG_Sub_P Parameter: Timepoint (day) Value: 12
  misc_feature: MA Experiment 20000634 PARAMETER Experiment Name: At_10percent_PEG_Sub_P Parameter: Tissue Value: Whole Plant
  misc_feature: MA Experiment 20000634 PARAMETER Experiment Name: At_10percent_PEG_Sub_P Parameter: Treatment Value: 10% PEG vs. No Treatment
atgcagcccttgcaaaattttggatcagcaacacctccacctccaattagcaattcttcaacgtcttgtaacaaaacctgtggaggaatctcgatcccgttcccattcggaattggcgggaaagattgttatctcaacggttggtacgaggttatctgcaacacaaccacttccgattctaacacaactgttcctttactctctatgatcaatcgggaagtggtgaatatctctctcccagacagtaacgaaccatacggacttgttcaaatcaaaggtcctgtgacatcgttgggttgttctagtaatactagtgaaggaccccaaaactcgctcccggttttgaatgtcacaggtaagggcagcccatatttcctgaccgacgagaaccgtcttgtggcggttggttgtggtataaaggcattgatgacagatacagaatcagagatcttgggttgtgaatcgagctgcgaacacagaaagagtggtgaagaagtaacaaatttgatctgtactggttacagatgctgccaggcgaggctaccggtggggcgtcctcaggctataaccgtaaatatagagaactctagtggaggagaagaaacgtgcaaagttgcgttcttgacggacaagaggtattcgccgtctaatgttacagagccagaacagtttcataacaatggatatgtggtgctagagttaggatggtactttgccacttcgaactctcgctttaagagcctcttgggttgtacaaatatgagccgaaaaggttctgggttctcggatgataattgcagttgcgagtatgattacttctccgggatgagttataggaattgttattgcgactatggctacacagggaacccataccttcgaggtggctgcgtaggcattcttataggtttgtcaggattagtattttttgttgggctattctggctatttaaactcataaagaagcgaaggaacatcaaccgcagcaagaagtttttcaaacggaacggaggcttgctgttgaaacaacaattaactacaaaggacggaaatgtagaaatgtctaagattttcagttcaaaggagttaagaaaagccactgataacttcagcatagatagagtgcttgggcaaggcggtcaaggcactgtgtacaaaggaatgttggtagatgggagcatcgttgcggttaaaagatccaaagttgtggatgaagacaaaatggaagagtttatcaatgagattgttcttctgtcacaaatcaatcaccgcaacattgtgaaactcttgggatgttgcttggagacagaagttccaatcttggtgtacgaatatattcccaatggagatctgttcaagcggcttcatgatgaatctgatgattacaccatgacttgggaagtgcggcttcgcatagccatagagatagcaggagctcttacatacatgcactcagctgcaagttttccaatattccatagagatattaagactaccaatatcctactggacgagaaataccgagccaaagtgtctgactttggaacttcaagatcagtaaccttagatcaaactcacttgacaacattagttgcaggaacttttggttacatggatccagagtacttcttgtcaagccaatacactcacaagagcgatgtttatagtttcggggtcgtcttggtggagctcataaccggagaaaaaccattgtcccgtgtccggtctgaagaaggtagaggcttggcaactcatttcctcgaggccatgaaagagaacagagtgattgacataattgatattcggatcaaagacgaaagcaaactggagcaagtaatggcggtagcaaaactcgccagaaaatgtcttaaccggaaagggaagaaccggccaaacatgaaagaggtttcaaatgagctagagaggatccgttcatcacccgaagatttagatgtccattgctatctaaacccgtggtacgaggttgtctgtaacagcacaaactctgttccgttcctctcaaggatcaacagagaattggtgaacatctctctcaatggagttgtccacatcaaagctcccgtaacttcctccggctgttctacaggaacatctcagccacttacaccgccgcctttaaacgttgctggccaaggcagcccctatttcctcacggacaagaacctactcgtggcggttggttgcaaattcaaggctgttatggcgggtattacatcgcagatcaccagttgtgagtcgagttgtaacgagagaaacagtagcagccaagaaggaagaaacaaaatctgcaatggttataaatgttgccagacgaggataccagaagggcagccgcaagtaatcagtgtggatatagagatccctcaaggtaacaacacaacaggagaaggaggatgcagagttgcgtttttgacgagcgacaagtattcaagtttaaatgttacagagccagaaaagtttcatggtcatggatacgcggcggtcgagcttggatggttctttgatacttccgattctcgtgatacacaacccataagttgtaaaaatgcgtcagatacaacaccgtacacttccgatacgaggtgtagttgctcatacggctacttttctggattcagctatagggactgctactgtaactccccaggttataaagggaatccgttccttccaggtggttgtgtagacgtggatgaatgtaaactagatataggacgcaaccagtgtaaagatcaaagctgtgtgaatctgcccggttggtttgactgccagcccaagaaaccagagcagctcaagcgggtgattcaaggtaaaattgaactggattttattactatcttgagcgtcttgcaaaacgttctgttatttactgtttggttttttggtggtgcaggtgttcttataggttcagcactgttgcttttcgccttcggaatcttcgggttgtacaagttcgtacagaagcggaggaaactaatccgaatgaggaagttcttcagacgtaatggaggtatgttgttaaaacaacagttagctagaaaagaaggcaatgtagagatgtcaagaatattcagctcacatgagttggagaaagctactgataacttcaacaagaatagggttcttgggcaaggaggtcaaggtacagtgtataagggaatgctcgttgatggtagaatcgtcgcagtaaaaaggtcgaaagctgtggatgaagatagggtagaagagttcatcaatgaagttgttgttcttgcgcagatcaatcatagaaatattgttaaacttttggggtgttgtcttgaaacggaagttccagtcttagtttatgagtttgttccaaatggagacttatgcaagcgtcttcatgatgaatctgatgattacacaatgacatgggaggtgcgtcttcacattgctatagagattgcaggagcactttcttatttgcattctgctgcatctttccccatatatcatagagatatcaagactactaatatactcttagatgagagaaaccgagctaaggtgtcggatttcggaacttcaagatcagtaactatagatcaaactcacttgacaactcaagttgcaggcacttttggatatgtggatccagagtactttcaatcaagcaagtttacggaaaaaagtgatgtttatagttttggagttgtccttgtggagctcttaaccggagaaaaaccttcctcccgtgtccggtctgaagaaaacaggggccttgcagctcactttgtcgaagccgtgaaagagaacagagtgcttgacatagttgatgatcggatcaaagatgaatgcaacatggaccaagtaatgtcagtggcaaatctagctagaaggtgtttaaaccgaaaagggaagaagaggccaaacatgagagaggtttcaattgagctggagatgattcgttcatcacattatgattcaggaattcatatagaggacgacgatgaggaagatgatcaagccatggaactcaactttaacgacacttgggaggttggtgcgactgctccagcctccatgtttaacaatgcatcccccacgtctgatgctgagcctctggtgcctttacgaacatggtaa

SEQ ID NO: 86091 - protein, 1375 aa, Arabidopsis thaliana
  peptide (1)..(1375): Ceres Seq. ID no. 12686105
  misc_feature (23)..(300): Homolog of NCBI NO: 15219134 NR Description: WAK-like kinase (WLK); protein id: At1g16130.1
  misc_feature (969)..(1375): Homolog of NCBI NO: 25287660 NR Description: hypothetical protein T24D18.23 [imported] - thaliana >gi|6587819|gb|AAF18510.1|AC010924_23 Contains
  misc_feature (654)..(875): Homolog of NCBI NO: 25287660 NR Description: hypothetical protein T24D18.23 [imported] - thaliana >gi|6587819|gb|AAF18510.1|AC010924_23 Contains
  misc_feature (647)..(957): Homolog of NCBI NO: 25518691 NR Description: hypothetical protein T24D18.19 - Arabidopsis >gi|6587815|gb|AAF18506.1|AC010924_19 Similar to gb|U44028 thaliana transcription factor CKC and contains a PF|00069
  misc_feature (972)..(1248): Homolog of NCBI NO: 25518691 NR Description: hypothetical protein T24D18.19 - Arabidopsis >gi|6587815|gb|AAF18506.1|AC010924_19 Similar to gb|U44028 thaliana transcription factor CKC and contains a PF|00069
  misc_feature (21)..(237): Homolog of NCBI NO: 25518691 NR Description: hypothetical protein T24D18.19 - Arabidopsis >gi|6587815|gb|AAF18506.1|AC010924_19 Similar to gb|U44028 thaliana transcription factor CKC and contains a PF|00069
  misc_feature (298)..(369): Homolog of NCBI NO: 25518691 NR Description: hypothetical protein T24D18.19 - Arabidopsis >gi|6587815|gb|AAF18506.1|AC010924_19 Similar to gb|U44028 thaliana transcription factor CKC and contains a PF|00069
  misc_feature (972)..(1341): Homolog of NCBI NO: 15219143 NR Description: WAK-like kinase (WLK); protein id: At1g16160.1
  misc_feature (9)..(298): Homolog of NCBI NO: 15219143 NR Description: WAK-like kinase (WLK); protein id: At1g16160.1
  misc_feature (4)..(343): Homolog of NCBI NO: 25287660 NR Description: hypothetical protein T24D18.23 [imported] - thaliana >gi|6587819|gb|AAF18510.1|AC010924_23 Contains
MQPLQNFGSATPPPPISNSSTSCNKTCGGISIPFPFGIGGKDCYLNGWYEVICNTTTSDSNTTVPLLSMINREVVNISLPDSNEPYGLVQIKGPVTSLGCSSNTSEGPQNSLPVLNVTGKGSPYFLTDENRLVAVGCGIKALMTDTESEILGCESSCEHRKSGEEVTNLICTGYRCCQARLPVGRPQAITVNIENSSGGEETCKVAFLTDKRYSPSNVTEPEQFHNNGYVVLELGWYFATSNSRFKSLLGCTNMSRKGSGFSDDNCSCEYDYFSGMSYRNCYCDYGYTGNPYLRGGCVGILIGLSGLVFFVGLFWLFKLIKKRRNINRSKKFFKRNGGLLLKQQLTTKDGNVEMSKIFSSKELRKATDNFSIDRVLGQGGQGTVYKGMLVDGSIVAVKRSKVVDEDKMEEFINEIVLLSQINHRNIVKLLGCCLETEVPILVYEYIPNGDLFKRLHDESDDYTMTWEVRLRIAIEIAGALTYMHSAASFPIFHRDIKTTNILLDEKYRAKVSDFGTSRSVTLDQTHLTTLVAGTFGYMDPEYFLSSQYTHKSDVYSFGVVLVELITGEKPLSRVRSEEGRGLATHFLEAMKENRVIDIIDIRIKDESKLEQVMAVAKLARKCLNRKGKNRPNMKEVSNELERIRSSPEDLDVHCYLNPWYEVVCNSTNSVPFLSRINRELVNISLNGVVHIKAPVTSSGCSTGTSQPLTPPPLNVAGQGSPYFLTDKNLLVAVGCKFKAVMAGITSQITSCESSCNERNSSSQEGRNKICNGYKCCQTRIPEGQPQVISVDIEIPQGNNTTGEGGCRVAFLTSDKYSSLNVTEPEKFHGHGYAAVELGWFFDTSDSRDTQPISCKNASDTTPYTSDTRCSCSYGYFSGFSYRDCYCNSPGYKGNPFLPGGCVDVDECKLDIGRNQCKDQSCVNLPGWFDCQPKKPEQLKRVIQGKIELDFITILSVLQNVLLFTVWFFGGAGVLIGSALLLFAFGIFGLYKFVQKRRKLIRMRKFFRRNGGMLLKQQLARKEGNVEMSRIFSSHELEKATDNFNKNRVLGQGGQGTVYKGMLVDGRIVAVKRSKAVDEDRVEEFINEVVVLAQINHRNIVKLLGCCLETEVPVLVYEFVPNGDLCKRLHDESDDYTMTWEVRLHIAIEIAGALSYLHSAASFPIYHRDIKTTNILLDERNRAKVSDFGTSRSVTIDQTHLTTQVAGTFGYVDPEYFQSSKFTEKSDVYSFGVVLVELLTGEKPSSRVRSEENRGLAAHFVEAVKENRVLDIVDDRIKDECNMDQVMSVANLARRCLNRKGKKRPNMREVSIELEMIRSSHYDSGIHIEDDDEEDDQAMELNFNDTWEVGATAPASMFNNASPTSDAEPLVPLRTW

SEQ ID NO: 86092 - protein, 1307 aa, Arabidopsis thaliana
  peptide (1)..(1307): Ceres Seq. ID no. 12686106
  misc_feature (1)..(232): Homolog of NCBI NO: 15219134 NR Description: WAK-like kinase (WLK); protein id: At1g16130.1
  misc_feature (901)..(1307): Homolog of NCBI NO: 25287660 NR Description: hypothetical protein T24D18.23 [imported] - thaliana >gi|6587819|gb|AAF18510.1|AC010924_23 Contains
  misc_feature (586)..(807): Homolog of NCBI NO: 25287660 NR Description: hypothetical protein T24D18.23 [imported] - thaliana >gi|6587819|gb|AAF18510.1|AC010924_23 Contains
  misc_feature (579)..(889): Homolog of NCBI NO: 25518691 NR Description: hypothetical protein T24D18.19 - Arabidopsis >gi|6587815|gb|AAF18506.1|AC010924_19 Similar to gb|U44028 thaliana transcription factor CKC and contains a PF|00069
  misc_feature (904)..(1180): Homolog of NCBI NO: 25518691 NR Description: hypothetical protein T24D18.19 - Arabidopsis >gi|6587815|gb|AAF18506.1|AC010924_19 Similar to gb|U44028 thaliana transcription factor CKC and contains a PF|00069
  misc_feature (1)..(169): Homolog of NCBI NO: 25518691 NR Description: hypothetical protein T24D18.19 - Arabidopsis >gi|6587815|gb|AAF18506.1|AC010924_19 Similar to gb|U44028 thaliana transcription factor CKC and contains a PF|00069
  misc_feature (230)..(301): Homolog of NCBI NO: 25518691 NR Description: hypothetical protein T24D18.19 - Arabidopsis >gi|6587815|gb|AAF18506.1|AC010924_19 Similar to gb|U44028 thaliana transcription factor CKC and contains a PF|00069
  misc_feature (904)..(1273): Homolog of NCBI NO: 15219143 NR Description: WAK-like kinase (WLK); protein id: At1g16160.1
  misc_feature (1)..(230): Homolog of NCBI NO: 15219143 NR Description: WAK-like kinase (WLK); protein id: At1g16160.1
  misc_feature (1)..(275): Homolog of NCBI NO: 25287660 NR Description: hypothetical protein T24D18.23 [imported] - thaliana >gi|6587819|gb|AAF18510.1|AC010924_23 Contains
MINREVVNISLPDSNEPYGLVQIKGPVTSLGCSSNTSEGPQNSLPVLNVTGKGSPYFLTDENRLVAVGCGIKALMTDTESEILGCESSCEHRKSGEEVTNLICTGYRCCQARLPVGRPQAITVNIENSSGGEETCKVAFLTDKRYSPSNVTEPEQFHNNGYVVLELGWYFATSNSRFKSLLGCTNMSRKGSGFSDDNCSCEYDYFSGMSYRNCYCDYGYTGNPYLRGGCVGILIGLSGLVFFVGLFWLFKLIKKRRNINRSKKFFKRNGGLLLKQQLTTKDGNVEMSKIFSSKELRKATDNFSIDRVLGQGGQGTVYKGMLVDGSIVAVKRSKVVDEDKMEEFINEIVLLSQINHRNIVKLLGCCLETEVPILVYEYIPNGDLFKRLHDESDDYTMTWEVRLRIAIEIAGALTYMHSAASFPIFHRDIKTTNILLDEKYRAKVSDFGTSRSVTLDQTHLTTLVAGTFGYMDPEYFLSSQYTHKSDVYSFGVVLVELITGEKPLSRVRSEEGRGLATHFLEAMKENRVIDIIDIRIKDESKLEQVMAVAKLARKCLNRKGKNRPNMKEVSNELERIRSSPEDLDVHCYLNPWYEVVCNSTNSVPFLSRINRELVNISLNGVVHIKAPVTSSGCSTGTSQPLTPPPLNVAGQGSPYFLTDKNLLVAVGCKFKAVMAGITSQITSCESSCNERNSSSQEGRNKICNGYKCCQTRIPEGQPQVISVDIEIPQGNNTTGEGGCRVAFLTSDKYSSLNVTEPEKFHGHGYAAVELGWFFDTSDSRDTQPISCKNASDTTPYTSDTRCSCSYGYFSGFSYRDCYCNSPGYKGNPFLPGGCVDVDECKLDIGRNQCKDQSCVNLPGWFDCQPKKPEQLKRVIQGKIELDFITILSVLQNVLLFTVWFFGGAGVLIGSALLLFAFGIFGLYKFVQKRRKLIRMRKFFRRNGGMLLKQQLARKEGNVEMSRIFSSHELEKATDNFNKNRVLGQGGQGTVYKGMLVDGRIVAVKRSKAVDEDRVEEFINEVVVLAQINHRNIVKLLGCCLETEVPVLVYEFVPNGDLCKRLHDESDDYTMTWEVRLHIAIEIAGALSYLHSAASFPIYHRDIKTTNILLDERNRAKVSDFGTSRSVTIDQTHLTTQVAGTFGYVDPEYFQSSKFTEKSDVYSFGVVLVELLTGEKPSSRVRSEENRGLAAHFVEAVKENRVLDIVDDRIKDECNMDQVMSVANLARRCLNRKGKKRPNMREVSIELEMIRSSHYDSGIHIEDDDEEDDQAMELNFNDTWEVGATAPASMFNNASPTSDAEPLVPLRTW

SEQ ID NO: 86093 - protein, 1233 aa, Arabidopsis thaliana
  peptide (1)..(1233): Ceres Seq. ID no. 12686107
  misc_feature (1)..(158): Homolog of NCBI NO: 15219134 NR Description: WAK-like kinase (WLK); protein id: At1g16130.1
  misc_feature (827)..(1233): Homolog of NCBI NO: 25287660 NR Description: hypothetical protein T24D18.23 [imported] - thaliana >gi|6587819|gb|AAF18510.1|AC010924_23 Contains
  misc_feature (512)..(733): Homolog of NCBI NO: 25287660 NR Description: hypothetical protein T24D18.23 [imported] - thaliana >gi|6587819|gb|AAF18510.1|AC010924_23 Contains
  misc_feature (505)..(815): Homolog of NCBI NO: 25518691 NR Description: hypothetical protein T24D18.19 - Arabidopsis >gi|6587815|gb|AAF18506.1|AC010924_19 Similar to gb|U44028 thaliana transcription factor CKC and contains a PF|00069
  misc_feature (830)..(1106): Homolog of NCBI NO: 25518691 NR Description: hypothetical protein T24D18.19 - Arabidopsis >gi|6587815|gb|AAF18506.1|AC010924_19 Similar to gb|U44028 thaliana transcription factor CKC and contains a PF|00069
  misc_feature (1)..(95): Homolog of NCBI NO: 25518691 NR Description: hypothetical protein T24D18.19 - Arabidopsis >gi|6587815|gb|AAF18506.1|AC010924_19 Similar to gb|U44028 thaliana transcription factor CKC and contains a PF|00069
  misc_feature (156)..(227): Homolog of NCBI NO: 25518691 NR Description: hypothetical protein T24D18.19 - Arabidopsis >gi|6587815|gb|AAF18506.1|AC010924_19 Similar to gb|U44028 thaliana transcription factor CKC and contains a PF|00069
  misc_feature (830)..(1199): Homolog of NCBI NO: 15219143 NR Description: WAK-like kinase (WLK); protein id: At1g16160.1
  misc_feature (1)..(156): Homolog of NCBI NO: 15219143 NR Description: WAK-like kinase (WLK); protein id: At1g16160.1
  misc_feature (1)..(201): Homolog of NCBI NO: 25287660 NR Description: hypothetical protein T24D18.23 [imported] - thaliana >gi|6587819|gb|AAF18510.1|AC010924_23 Contains
MTDTESEILGCESSCEHRKSGEEVTNLICTGYRCCQARLPVGRPQAITVNIENSSGGEETCKVAFLTDKRYSPSNVTEPEQFHNNGYVVLELGWYFATSNSRFKSLLGCTNMSRKGSGFSDDNCSCEYDYFSGMSYRNCYCDYGYTGNPYLRGGCVGILIGLSGLVFFVGLFWLFKLIKKRRNINRSKKFFKRNGGLLLKQQLTTKDGNVEMSKIFSSKELRKATDNFSIDRVLGQGGQGTVYKGMLVDGSIVAVKRSKVVDEDKMEEFINEIVLLSQINHRNIVKLLGCCLETEVPILVYEYIPNGDLFKRLHDESDDYTMTWEVRLRIAIEIAGALTYMHSAASFPIFHRDIKTTNILLDEKYRAKVSDFGTSRSVTLDQTHLTTLVAGTFGYMDPEYFLSSQYTHKSDVYSFGVVLVELITGEKPLSRVRSEEGRGLATHFLEAMKENRVIDIIDIRIKDESKLEQVMAVAKLARKCLNRKGKNRPNMKEVSNELERIRSSPEDLDVHCYLNPWYEVVCNSTNSVPFLSRINRELVNISLNGVVHIKAPVTSSGCSTGTSQPLTPPPLNVAGQGSPYFLTDKNLLVAVGCKFKAVMAGITSQITSCESSCNERNSSSQEGRNKICNGYKCCQTRIPEGQPQVISVDIEIPQGNNTTGEGGCRVAFLTSDKYSSLNVTEPEKFHGHGYAAVELGWFFDTSDSRDTQPISCKNASDTTPYTSDTRCSCSYGYFSGFSYRDCYCNSPGYKGNPFLPGGCVDVDECKLDIGRNQCKDQSCVNLPGWFDCQPKKPEQLKRVIQGKIELDFITILSVLQNVLLFTVWFFGGAGVLIGSALLLFAFGIFGLYKFVQKRRKLIRMRKFFRRNGGMLLKQQLARKEGNVEMSRIFSSHELEKATDNFNKNRVLGQGGQGTVYKGMLVDGRIVAVKRSKAVDEDRVEEFINEVVVLAQINHRNIVKLLGCCLETEVPVLVYEFVPNGDLCKRLHDESDDYTMTWEVRLHIAIEIAGALSYLHSAASFPIYHRDIKTTNILLDERNRAKVSDFGTSRSVTIDQTHLTTQVAGTFGYVDPEYFQSSKFTEKSDVYSFGVVLVELLTGEKPSSRVRSEENRGLAAHFVEAVKENRVLDIVDDRIKDECNMDQVMSVANLARRCLNRKGKKRPNMREVSIELEMIRSSHYDSGIHIEDDDEEDDQAMELNFNDTWEVGATAPASMFNNASPTSDAEPLVPLRTW

SEQ ID NO: 86094 - DNA, 1458 bp, Arabidopsis thaliana
  misc_feature (1)..(1458): Ceres Seq. ID no. 12686108
  misc_feature: MA Experiment ID: 20000315 Result: Down-regulated in Transcription
  misc_feature: MA Experiment 20000315 PARAMETER Experiment Name: At_14day_Shoots-Roots_Sub_P Parameter: Age (day) Value: 14
  misc_feature: MA Experiment 20000315 PARAMETER Experiment Name: At_14day_Shoots-Roots_Sub_P Parameter: Organism Value: A. thaliana
  misc_feature: MA Experiment 20000315 PARAMETER Experiment Name: At_14day_Shoots-Roots_Sub_P Parameter: Plant Line Value: WS
  misc_feature: MA Experiment 20000315 PARAMETER Experiment Name: At_14day_Shoots-Roots_Sub_P Parameter: Tissue Value: Shoots vs. Whole Plant
  misc_feature: MA Experiment ID: 20000327 Result: Down-regulated in Transcription
  misc_feature: MA Experiment 20000327 PARAMETER Experiment Name: At_42deg_Heat_Sub_P Parameter: Age (day) Value: 14
  misc_feature: MA Experiment 20000327 PARAMETER Experiment Name: At_42deg_Heat_Sub_P Parameter: Organism Value: A. thaliana
  misc_feature: MA Experiment 20000327 PARAMETER Experiment Name: At_42deg_Heat_Sub_P Parameter: Plant Line Value: WS
  misc_feature: MA Experiment 20000327 PARAMETER Experiment Name: At_42deg_Heat_Sub_P Parameter: Temperature (deg C) Value: 42 vs. 22
  misc_feature: MA Experiment 20000327 PARAMETER Experiment Name: At_42deg_Heat_Sub_P Parameter: Timepoint (hr) Value: 1
  misc_feature: MA Experiment 20000327 PARAMETER Experiment Name: At_42deg_Heat_Sub_P Parameter: Tissue Value: Aerial
  misc_feature: MA Experiment ID: 20000328 Result: Down-regulated in Transcription
  misc_feature: MA Experiment 20000328 PARAMETER Experiment Name: At_42deg_Heat_Sub_P Parameter: Age (day) Value: 14
  misc_feature: MA Experiment 20000328 PARAMETER Experiment Name: At_42deg_Heat_Sub_P Parameter: Organism Value: A. thaliana
  misc_feature: MA Experiment 20000328 PARAMETER Experiment Name: At_42deg_Heat_Sub_P Parameter: Plant Line Value: WS
  misc_feature: MA Experiment 20000328 PARAMETER Experiment Name: At_42deg_Heat_Sub_P Parameter: Temperature (deg C) Value: 42 vs. 22
  misc_feature: MA Experiment 20000328 PARAMETER Experiment Name: At_42deg_Heat_Sub_P Parameter: Timepoint (hr) Value: 6
  misc_feature: MA Experiment 20000328 PARAMETER Experiment Name: At_42deg_Heat_Sub_P Parameter: Tissue Value: Aerial
  misc_feature: MA Experiment ID: 20000332 Result: Down-regulated in Transcription
  misc_feature: MA Experiment 20000332 PARAMETER Experiment Name: At_4deg_Cold_Sub_P Parameter: Age (day) Value: 14
  misc_feature: MA Experiment 20000332 PARAMETER Experiment Name: At_4deg_Cold_Sub_P Parameter: Organism Value: A. thaliana
  misc_feature: MA Experiment 20000332 PARAMETER Experiment Name: At_4deg_Cold_Sub_P Parameter: Plant Line Value: WS
  misc_feature: MA Experiment 20000332 PARAMETER Experiment Name: At_4deg_Cold_Sub_P Parameter: Temperature (deg C) Value: 4 vs. 22
  misc_feature: MA Experiment 20000332 PARAMETER Experiment Name: At_4deg_Cold_Sub_P Parameter: Timepoint (hr) Value: 2
  misc_feature: MA Experiment 20000332 PARAMETER Experiment Name: At_4deg_Cold_Sub_P Parameter: Tissue Value: Aerial
  misc_feature: MA Experiment ID: 20000440 Result: Down-regulated in Transcription
  misc_feature: MA Experiment 20000440 PARAMETER Experiment Name: At_Closed-Flower__Sub_P Parameter: Tissue Value: Closed Flower vs. Whole Plant
atggctcatgagcagcaacacctccaaatagtaattcttcaagctcttgtaacagaacctttggaggaatctcaatcccgttcccatttggaatcggcgggaaggattgctatctcaatagttggtacgaggttgtctgtaacagcaccacttccgggtcctgcaaaacttggctacagaggaaacccatacatacgaggtggatgcatcgacattgatgaatgcgaagtacccaacaagtgtggagaagacacttgtgtgaacatggctggaaggtacagttgcgtgccaaagataaccaagcctgccaaactcgctcatgtgcttcgaggggttcttataggtttgttgggacttctgttttttgttatagggatttttgggttatacaaatttatcagaaagcgaaggcggatcatccgtagcatgaagttcttcaaacgtaatggaggcctattgttgaaacaacagttaacaacaaaggacggcagtgtcgagatgtcaaaaatattcagctcgagagagttggagaaagccactgataacttcagcatagatagagtgcttgggcaaggcggtcaaggcactgtgtacaaaagaatgcttgtagatgggagtattgttgcggttaaaagatccaaagttgtggatgaagacaaaatggaagagtttatcaatgagattgttcttctgtcacaaatcaatcaccgcaacattgtgaaactcttgggatgttgcttggagacagaagttccaatcttggtgtacgaatatattcccaatggagatctgttcaagcggcttcatgatgaatatgatgattacatgatgacttgggaagtgcgacttcgcatagccgtagagatagcaggagctctttcgtacatgcactcagctgcatcttttccaatattccatagagatatcaaaactaccaatatactgttggatgagaaatacagagcaaaaatatctgatttcggaacttcaagatcggtagcgactgatcaaactcacttaacaacattagttgcaggaacttttgggtacatggatccagagtacttcctgtcgagccaatacactcacaaaagcgatgtatatagtttcggtgttgtgttggtggagctcataacgggagaaaaaccaatgtcacgtgtccggtctgaagaaggcataggtttggcaacttatttcctcgaggcaatgaaagagaacagagctgttgacataattgatattaggatcaaagacgaaagcaagcaagtaatggcggtagcaaaactcgccagaagatgtcttaatcgaaaagggaataagcggccaaacatgagagaggtttcaataaagctagagaggatccgttcatcacccaaagatttagatgtccataccgaaaacgaagaagaagaagaagaggatcaacttatggaaatcaatagaatatatgattcttga

SEQ ID NO: 86095 - protein, 485 aa, Arabidopsis thaliana
  peptide (1)..(485): Ceres Seq. ID no. 12686109
  misc_feature (58)..(485): Homolog of NCBI NO: 15219137 NR Description: WAK-like kinase (WLK); protein id: At1g16140.1
  misc_feature (1)..(57): Homolog of NCBI NO: 15219137 NR Description: WAK-like kinase (WLK); protein id: At1g16140.1
  misc_feature (58)..(480): Homolog of NCBI NO: 15219132 NR Description: WAK-like kinase (WLK); protein id: At1g16120.1
  misc_feature (57)..(481): Homolog of NCBI NO: 15219143 NR Description: WAK-like kinase (WLK); protein id: At1g16160.1
  misc_feature (58)..(480): Homolog of NCBI NO: 15219134 NR Description: WAK-like kinase (WLK); protein id: At1g16130.1
  misc_feature (56)..(480): Homolog of NCBI NO: 15219445 NR Description: WAK-like kinase (WLK); protein id: At1g79670.1, by cDNA: gi_19310446 [Arabidopsis thaliana]
  misc_feature (56)..(480): Homolog of NCBI NO: 30699443 NR Description: WAK-like kinase (WLK) [Arabidopsis thaliana]
  misc_feature (70)..(480): Homolog of NCBI NO: 15219140 NR Description: WAK-like kinase (WLK); protein id: At1g16150.1
  misc_feature (57)..(111): Homolog of NCBI NO: 15219140 NR Description: WAK-like kinase (WLK); protein id: At1g16150.1
  misc_feature (111)..(480): Homolog of NCBI NO: 25405037 NR Description: protein F20B17.10 [imported] - Arabidopsis >gi|7715604|gb|AAF68122.1|AC010793_17 F20B17.10 [Arabidopsis
MAHEQQHLQIVILQALVTEPLEESQSRSHLESAGRIAISIVGTRLSVTAPLPGPAKLGYRGNPYIRGGCIDIDECEVPNKCGEDTCVNMAGRYSCVPKITKPAKLAHVLRGVLIGLLGLLFFVIGIFGLYKFIRKRRRIIRSMKFFKRNGGLLLKQQLTTKDGSVEMSKIFSSRELEKATDNFSIDRVLGQGGQGTVYKRMLVDGSIVAVKRSKVVDEDKMEEFINEIVLLSQINHRNIVKLLGCCLETEVPILVYEYIPNGDLFKRLHDEYDDYMMTWEVRLRIAVEIAGALSYMHSAASFPIFHRDIKTTNILLDEKYRAKISDFGTSRSVATDQTHLTTLVAGTFGYMDPEYFLSSQYTHKSDVYSFGVVLVELITGEKPMSRVRSEEGIGLATYFLEAMKENRAVDIIDIRIKDESKQVMAVAKLARRCLNRKGNKRPNMREVSIKLERIRSSPKDLDVHTENEEEEEEDQLMEINRIYDS

SEQ ID NO: 86096 - protein, 397 aa, Arabidopsis thaliana
  peptide (1)..(397): Ceres Seq. ID no. 12686110
  misc_feature (1)..(397): Homolog of NCBI NO: 15219137 NR Description: WAK-like kinase (WLK); protein id: At1g16140.1
  misc_feature (1)..(392): Homolog of NCBI NO: 15219132 NR Description: WAK-like kinase (WLK); protein id: At1g16120.1
  misc_feature (1)..(393): Homolog of NCBI NO: 15219143 NR Description: WAK-like kinase (WLK); protein id: At1g16160.1
  misc_feature (1)..(392): Homolog of NCBI NO: 15219134 NR Description: WAK-like kinase (WLK); protein id: At1g16130.1
  misc_feature (1)..(392): Homolog of NCBI NO: 15219445 NR Description: WAK-like kinase (WLK); protein id: At1g79670.1, by cDNA: gi_19310446 [Arabidopsis thaliana]
  misc_feature (1)..(392): Homolog of NCBI NO: 30699443 NR Description: WAK-like kinase (WLK) [Arabidopsis thaliana]
  misc_feature (1)..(392): Homolog of NCBI NO: 15219140 NR Description: WAK-like kinase (WLK); protein id: At1g16150.1
  misc_feature (1)..(23): Homolog of NCBI NO: 15219140 NR Description: WAK-like kinase (WLK); protein id: At1g16150.1
  misc_feature (23)..(392): Homolog of NCBI NO: 25405037 NR Description: protein F20B17.10 [imported] - Arabidopsis >gi|7715604|gb|AAF68122.1|AC010793_17 F20B17.10 [Arabidopsis
  misc_feature (1)..(66): Homolog of NCBI NO: 25405037 NR Description: protein F20B17.10 [imported] - Arabidopsis >gi|7715604|gb|AAF68122.1|AC010793_17 F20B17.10 [Arabidopsis
MAGRYSCVPKITKPAKLAHVLRGVLIGLLGLLFFVIGIFGLYKFIRKRRRIIRSMKFFKRNGGLLLKQQLTTKDGSVEMSKIFSSRELEKATDNFSIDRVLGQGGQGTVYKRMLVDGSIVAVKRSKVVDEDKMEEFINEIVLLSQINHRNIVKLLGCCLETEVPILVYEYIPNGDLFKRLHDEYDDYMMTWEVRLRIAVEIAGALSYMHSAASFPIFHRDIKTTNILLDEKYRAKISDFGTSRSVATDQTHLTTLVAGTFGYMDPEYFLSSQYTHKSDVYSFGVVLVELITGEKPMSRVRSEEGIGLATYFLEAMKENRAVDIIDIRIKDESKQVMAVAKLARRCLNRKGNKRPNMREVSIKLERIRSSPKDLDVHTENEEEEEEDQLMEINRIYDS

SEQ ID NO: 86097 - protein, 343 aa, Arabidopsis thaliana
  peptide (1)..(343): Ceres Seq. ID no. 12686111
  misc_feature (1)..(343): Homolog of NCBI NO: 15219137 NR Description: WAK-like kinase (WLK); protein id: At1g16140.1
  misc_feature (1)..(338): Homolog of NCBI NO: 15219132 NR Description: WAK-like kinase (WLK); protein id: At1g16120.1
  misc_feature (1)..(339): Homolog of NCBI NO: 15219143 NR Description: WAK-like kinase (WLK); protein id: At1g16160.1
  misc_feature (1)..(338): Homolog of NCBI NO: 15219134 NR Description: WAK-like kinase (WLK); protein id: At1g16130.1
  misc_feature (1)..(338): Homolog of NCBI NO: 15219445 NR Description: WAK-like kinase (WLK); protein id: At1g79670.1, by cDNA: gi_19310446 [Arabidopsis thaliana]
  misc_feature (1)..(338): Homolog of NCBI NO: 30699443 NR Description: WAK-like kinase (WLK) [Arabidopsis thaliana]
  misc_feature (1)..(338): Homolog of NCBI NO: 15219140 NR Description: WAK-like kinase (WLK); protein id: At1g16150.1
  misc_feature (1)..(338): Homolog of NCBI NO: 25405037 NR Description: protein F20B17.10 [imported] - Arabidopsis >gi|7715604|gb|AAF68122.1|AC010793_17 F20B17.10 [Arabidopsis
  misc_feature (1)..(12): Homolog of NCBI NO: 25405037 NR Description: protein F20B17.10 [imported] - Arabidopsis >gi|7715604|gb|AAF68122.1|AC010793_17 F20B17.10 [Arabidopsis
  misc_feature (1)..(338): Homolog of NCBI NO: 25287658 NR Description: hypothetical protein T24D18.21 - Arabidopsis
MKFFKRNGGLLLKQQLTTKDGSVEMSKIFSSRELEKATDNFSIDRVLGQGGQGTVYKRMLVDGSIVAVKRSKVVDEDKMEEFINEIVLLSQINHRNIVKLLGCCLETEVPILVYEYIPNGDLFKRLHDEYDDYMMTWEVRLRIAVEIAGALSYMHSAASFPIFHRDIKTTNILLDEKYRAKISDFGTSRSVATDQTHLTTLVAGTFGYMDPEYFLSSQYTHKSDVYSFGVVLVELITGEKPMSRVRSEEGIGLATYFLEAMKENRAVDIIDIRIKDESKQVMAVAKLARRCLNRKGNKRPNMREVSIKLERIRSSPKDLDVHTENEEEEEEDQLMEINRIYDS

SEQ ID NO: 86098 - DNA, 1243 bp, Arabidopsis thaliana
  misc_feature (1)..(1243): Ceres Seq. ID no. 12686201
  misc_feature: MA Experiment ID: 108462 Result: Up-regulated in Transcription
  misc_feature: MA Experiment 108462 PARAMETER Experiment Name: At_Germinating_Seeds_cDNA_P Parameter: Age (day) Value: 2 vs. 0
  misc_feature: MA Experiment 108462 PARAMETER Experiment Name: At_Germinating_Seeds_cDNA_P Parameter: Tissue Value: Germinating Seeds
  misc_feature: MA Experiment ID: 108595 Result: Up-regulated in Transcription
  misc_feature: MA Experiment 108595 PARAMETER Experiment Name: At_Ler-pi_Ovule_cDNA_P Parameter: Plant Line Value: null
  misc_feature: MA Experiment ID: 20000264 Result: Up-regulated in Transcription
  misc_feature: MA Experiment 20000264 PARAMETER Experiment Name: At_Open_Flower_P Parameter: Age (day) Value: 21
  misc_feature: MA Experiment 20000264 PARAMETER Experiment Name: At_Open_Flower_P Parameter: Plant Line Value: WS
  misc_feature: MA Experiment 20000264 PARAMETER Experiment Name: At_Open_Flower_P Parameter: Tissue Value: Open Flower vs. Whole Plant
  misc_feature: MA Experiment ID: 20000265 Result: Up-regulated in Transcription
  misc_feature: MA Experiment 20000265 PARAMETER Experiment Name: At_Open_Flower_P Parameter: Age (day) Value: 21
  misc_feature: MA Experiment 20000265 PARAMETER Experiment Name: At_Open_Flower_P Parameter: Plant Line Value: WS
  misc_feature: MA Experiment 20000265 PARAMETER Experiment Name: At_Open_Flower_P Parameter: Tissue Value: Closed Flower vs. Whole Plant
  misc_feature: MA Experiment ID: 20000286 Result: Up-regulated in Transcription
  misc_feature: MA Experiment 20000286 PARAMETER Experiment Name: At_Open_Flower_P Parameter: Age (day) Value: 21
  misc_feature: MA Experiment 20000286 PARAMETER Experiment Name: At_Open_Flower_P Parameter: Plant Line Value: WS
  misc_feature: MA Experiment 20000286 PARAMETER Experiment Name: At_Open_Flower_P Parameter: Tissue Value: Half Open vs. Whole Plant
  misc_feature: MA Experiment ID: 20000436 Result: Up-regulated in Transcription
  misc_feature: MA Experiment 20000436 PARAMETER Experiment Name: At_Drought_P Parameter: Age (day) Value: 7
  misc_feature: MA Experiment 20000436 PARAMETER Experiment Name: At_Drought_P Parameter: Organism Value: A. thaliana
  misc_feature: MA Experiment 20000436 PARAMETER Experiment Name: At_Drought_P Parameter: Plant Line Value: WS
  misc_feature: MA Experiment 20000436 PARAMETER Experiment Name: At_Drought_P Parameter: Timepoint (hr) Value: 12
  misc_feature: MA Experiment 20000436 PARAMETER Experiment Name: At_Drought_P Parameter: Tissue Value: Whole Plant
  misc_feature: MA Experiment 20000436 PARAMETER Experiment Name: At_Drought_P Parameter: Treatment Value: Drought vs. No Drought
  misc_feature: MA Experiment ID: 20000437 Result: Up-regulated in Transcription
  misc_feature: MA Experiment 20000437 PARAMETER Experiment Name: At_Drought_P Parameter: Age (day) Value: 8
  misc_feature: MA Experiment 20000437 PARAMETER Experiment Name: At_Drought_P Parameter: Organism Value: A. thaliana
  misc_feature: MA Experiment 20000437 PARAMETER Experiment Name: At_Drought_P Parameter: Plant Line Value: WS
  misc_feature: MA Experiment 20000437 PARAMETER Experiment Name: At_Drought_P Parameter: Timepoint (hr) Value: 24
  misc_feature: MA Experiment 20000437 PARAMETER Experiment Name: At_Drought_P Parameter: Tissue Value: Whole Plant
  misc_feature: MA Experiment 20000437 PARAMETER Experiment Name: At_Drought_P Parameter: Treatment Value: Drought vs. No Drought
  misc_feature: MA Experiment ID: 20000441 Result: Down-regulated in Transcription
  misc_feature: MA Experiment 20000441 PARAMETER Experiment Name: At_1uM_BR-BRZ__P Parameter: Tissue Value: Shoot Apices
  misc_feature: MA Experiment 20000441 PARAMETER Experiment Name: At_1uM_BR-BRZ__P Parameter: Treatment Value: 1uM BR vs. No Treatment
  misc_feature: MA Experiment ID: 20000443 Result: Down-regulated in Transcription
  misc_feature: MA Experiment 20000443 PARAMETER Experiment Name: At_1uM_BR-BRZ__P Parameter: Tissue Value: Shoot Apices
  misc_feature: MA Experiment 20000443 PARAMETER Experiment Name: At_1uM_BR-BRZ__P Parameter: Treatment Value: 1uM BRZ vs. No Treatment
  misc_feature: MA Experiment ID: 20001907 Result: Up-regulated in Transcription
  misc_feature: MA Experiment 20001907 PARAMETER Experiment Name: At_Drought_Reproduction_P Parameter: Age (day) Value: 37
  misc_feature: MA Experiment 20001907 PARAMETER Experiment Name: At_Drought_Reproduction_P Parameter: Organism Value: A. thaliana
  misc_feature: MA Experiment 20001907 PARAMETER Experiment Name: At_Drought_Reproduction_P Parameter: Plant Line Value: WS
  misc_feature: MA Experiment 20001907 PARAMETER Experiment Name: At_Drought_Reproduction_P Parameter: Timepoint (day) Value: 7
  misc_feature: MA Experiment 20001907 PARAMETER Experiment Name: At_Drought_Reproduction_P Parameter: Tissue Value: Siliques
  misc_feature: MA Experiment 20001907 PARAMETER Experiment Name: At_Drought_Reproduction_P Parameter: Treatment Value: Drought vs. No Drought
  misc_feature: MA Experiment ID: 20001910 Result: Up-regulated in Transcription
  misc_feature: MA Experiment 20001910 PARAMETER Experiment Name: At_Drought_Reproduction_P Parameter: Age (day) Value: 37
  misc_feature: MA Experiment 20001910 PARAMETER Experiment Name: At_Drought_Reproduction_P Parameter: Organism Value: A. thaliana
  misc_feature: MA Experiment 20001910 PARAMETER Experiment Name: At_Drought_Reproduction_P Parameter: Plant Line Value: WS
  misc_feature: MA Experiment 20001910 PARAMETER Experiment Name: At_Drought_Reproduction_P Parameter: Timepoint (day) Value: 7
  misc_feature: MA Experiment 20001910 PARAMETER Experiment Name: At_Drought_Reproduction_P Parameter: Tissue Value: Flowers
  misc_feature: MA Experiment 20001910 PARAMETER Experiment Name: At_Drought_Reproduction_P Parameter: Treatment Value: Drought vs. No Drought
atgcctcgatccgacctaacccgcggatactctgatggagacagcctggtcggagaaattgtccgagaggaaggtcacatttactcgttagcggcaacaaatgatcttttgtacacgggatcggacaataattacattagggtttggaaaaacttaaacgagtttagtgggtttaaatcgaacagcggattggttaaagcgatagtgataagtcgggaggctaaggtatttacgggtcatcaagacggtaagatccgggtttggaaaacctcgtccaaaaacccgcgagtgtacacacgcgccgggagcttgccggctttgaaagacgttttgaagagttcagtgaaaccgagtaactacgtggaggtgagaagatgtcgtacggccttatggatcaagcattccgacgccgtttcgtgtttgagcttagcggaagatcaagggctgttgtactccgcttcatgggatcggacggtcaaggtttggcgtatccatgacttgaaatgtatcgagtctattaaagctcatgatgacgctgtgaattctgtaacgaccgccgagagccttgtgttcacgggatcggcggatggaacggttaaggtttggaaacgtgagatcagagggaagcgtacggcgcactctttgttccaaactttgctaaagcaagaatcagcggtcacggctttggtcacgagccacatggcagtgtatagtggttcaagcgacggagctgtgaatttttgggagatgggagacaagaaactcttgaagcattgtgaagttttcaagaagcataggcttgctgtcctctgtatcgcggcagccggaaaattgttgtttagcggtgcggcggataagaagatatgcgtgtggaggagggaagggaaggtacacacgtgtgtctctgtgttaaccggtcataccggaccagttaagtgtttggcggtggtggagccatcgggaggtgaagaagaagacggaggagatgggaggttggttttgtatagtggaagtcttgacaaatcggtcaaagtgtggagggtaccacgtcattaaatgtaggattttattcggtgcttaagagatttgggatgtatgtaggtaagtaagaacaaaaacccaagtcaaatgatgaattatgaggttcgtaatatatgatatttattagtaatttaatatatctttgatacatgtataattgaactagggttatcgtttacggtgaatatcaaatatcaatatt

SEQ ID NO: 86099 - protein, 351 aa, Arabidopsis thaliana
  peptide (1)..(351): Ceres Seq. ID no. 12686202
  misc_feature (1)..(351): Homolog of NCBI NO: 15220271 NR Description: G-protein beta family; protein id: At1g47610.1
  misc_feature (14)..(348): Homolog of NCBI NO: 15225317 NR Description: G-protein beta family; protein id: At2g26490.1
  misc_feature (12)..(348): Homolog of NCBI NO: 15222143 NR Description: En/Spm-like transposon protein, putative; protein At1g49450.1, supported by cDNA: gi_17979258 [Arabidopsis >gi|25405310|pir||B96531 hypothetical protein F13F21.11
  misc_feature (12)..(348): Homolog of NCBI NO: 17979259 NR Description: At1g49450/F13F21_11 [Arabidopsis thaliana]
  misc_feature (7)..(348): Homolog of NCBI NO: 15230244 NR Description: hypothetical protein; protein id: At3g18950.1
  misc_feature (13)..(348): Homolog of NCBI NO: 31126785 NR Description: putative WD repeat-protein [Oryza sativa
  misc_feature (14)..(348): Homolog of NCBI NO: 15235354 NR Description: G-protein beta family; protein id: At4g34380.1
  misc_feature (4)..(348): Homolog of NCBI NO: 15229740 NR Description: G-protein beta family; protein id: At3g50390.1
  misc_feature (23)..(348): Homolog of NCBI NO: 15221675 NR Description: G-protein beta family; protein id: At1g24130.1
  misc_feature (25)..(350): Homolog of NCBI NO: 15231088 NR Description: G-protein beta family; protein id: At3g51930.1
MPRSDLTRGYSDGDSLVGEIVREEGHIYSLAATNDLLYTGSDNNYIRVWKNLNEFSGFKSNSGLVKAIVISREAKVFTGHQDGKIRVWKTSSKNPRVYTRAGSLPALKDVLKSSVKPSNYVEVRRCRTALWIKHSDAVSCLSLAEDQGLLYSASWDRTVKVWRIHDLKCIESIKAHDDAVNSVTTAESLVFTGSADGTVKVWKREIRGKRTAHSLFQTLLKQESAVTALVTSHMAVYSGSSDGAVNFWEMGDKKLLKHCEVFKKHRLAVLCIAAAGKLLFSGAADKKICVWRREGKVHTCVSVLTGHTGPVKCLAVVEPSGGEEEDGGDGRLVLYSGSLDKSVKVWRVPRH

SEQ ID NO: 86100 - DNA, 1260 bp, Arabidopsis thaliana
  misc_feature (1)..(1260): Ceres Seq. ID no. 12686275
  misc_feature: MA Experiment ID: 20000173 Result: Down-regulated in Transcription
  misc_feature: MA Experiment 20000173 PARAMETER Experiment Name: At_42deg_Heat_P Parameter: Age (day) Value: 14
  misc_feature: MA Experiment 20000173 PARAMETER Experiment Name: At_42deg_Heat_P Parameter: Organism Value: A. thaliana
  misc_feature: MA Experiment 20000173 PARAMETER Experiment Name: At_42deg_Heat_P Parameter: Plant Line Value: WS
  misc_feature: MA Experiment 20000173 PARAMETER Experiment Name: At_42deg_Heat_P Parameter: Temperature (deg C) Value: 42 vs. 22
  misc_feature: MA Experiment 20000173 PARAMETER Experiment Name: At_42deg_Heat_P Parameter: Timepoint (hr) Value: 6
  misc_feature: MA Experiment 20000173 PARAMETER Experiment Name: At_42deg_Heat_P Parameter: Tissue Value: Aerial
  misc_feature: MA Experiment ID: 20000180 Result: Up-regulated in Transcription
  misc_feature: MA Experiment 20000180 PARAMETER Experiment Name: At_Germinating_Seeds_P Parameter: Age (hr) Value: 24 vs. 0
  misc_feature: MA Experiment 20000180 PARAMETER Experiment Name: At_Germinating_Seeds_P Parameter: Tissue Value: Germinating Seeds
  misc_feature: MA Experiment ID: 20000185 Result: Up-regulated in Transcription
  misc_feature: MA Experiment 20000185 PARAMETER Experiment Name: At_Roots__P Parameter: Age (day) Value: 7 vs. 21
  misc_feature: MA Experiment 20000185 PARAMETER Experiment Name: At_Roots__P Parameter: Organism Value: A. thaliana
  misc_feature: MA Experiment 20000185 PARAMETER Experiment Name: At_Roots__P Parameter: Tissue Value: Roots vs. Whole Plant
  misc_feature: MA Experiment ID: 20000227 Result: Up-regulated in Transcription
  misc_feature: MA Experiment 20000227 PARAMETER Experiment Name: At_Root-Tips-vs-Tops_P Parameter: Tissue Value: Root Tips vs. Root Tops
  misc_feature: MA Experiment ID: 20000234 Result: Down-regulated in Transcription
  misc_feature: MA Experiment 20000234 PARAMETER Experiment Name: At_Siliques_P Parameter: Age (day) Value: 21
  misc_feature: MA Experiment 20000234 PARAMETER Experiment Name: At_Siliques_P Parameter: Organism Value: A. thaliana
  misc_feature: MA Experiment 20000234 PARAMETER Experiment Name: At_Siliques_P Parameter: Plant Line Value: WS
  misc_feature: MA Experiment 20000234 PARAMETER Experiment Name: At_Siliques_P Parameter: Tissue Value: Less Than 5mm Siliques vs. Whole Plant
  misc_feature: MA Experiment ID: 20000235 Result: Down-regulated in Transcription
  misc_feature: MA Experiment 20000235 PARAMETER Experiment Name: At_Siliques_P Parameter: Age (day) Value: 21
  misc_feature: MA Experiment 20000235 PARAMETER Experiment Name: At_Siliques_P Parameter: Organism Value: A. thaliana
  misc_feature: MA Experiment 20000235 PARAMETER Experiment Name: At_Siliques_P Parameter: Plant Line Value: WS
  misc_feature: MA Experiment 20000235 PARAMETER Experiment Name: At_Siliques_P Parameter: Tissue Value: 5-10mm Siliques vs. Whole Plant
  misc_feature: MA Experiment ID: 20000264 Result: Down-regulated in Transcription
  misc_feature: MA Experiment 20000264 PARAMETER Experiment Name: At_Open_Flower_P Parameter: Age (day) Value: 21
  misc_feature: MA Experiment 20000264 PARAMETER Experiment Name: At_Open_Flower_P Parameter: Plant Line Value: WS
  misc_feature: MA Experiment 20000264 PARAMETER Experiment Name: At_Open_Flower_P Parameter: Tissue Value: Open Flower vs. Whole Plant
  misc_feature: MA Experiment ID: 20000439 Result: Up-regulated in Transcription
  misc_feature: MA Experiment 20000439 PARAMETER Experiment Name: At_Roots__P Parameter: Age (day) Value: 14 vs. 21
  misc_feature: MA Experiment 20000439 PARAMETER Experiment Name: At_Roots__P Parameter: Organism Value: A. thaliana
  misc_feature: MA Experiment 20000439 PARAMETER Experiment Name: At_Roots__P Parameter: Tissue Value: Roots vs. Whole Plant
  misc_feature: MA Experiment ID: 20000495 Result: Up-regulated in Transcription
  misc_feature: MA Experiment 20000495 PARAMETER Experiment Name: At_Guard_Cells_P Parameter: Harvest Date Value: 8/2/2002
  misc_feature: MA Experiment 20000495 PARAMETER Experiment Name: At_Guard_Cells_P Parameter: Organism Value: A. thaliana
  misc_feature: MA Experiment 20000495 PARAMETER Experiment Name: At_Guard_Cells_P Parameter: Tissue Value: Guard Cells vs. Leaves
  misc_feature: MA Experiment ID: 20001248 Result: Up-regulated in Transcription
  misc_feature: MA Experiment 20001248 PARAMETER Experiment Name: At_Far-red-induction_P Parameter: Age (day) Value: 7
  misc_feature: MA Experiment 20001248 PARAMETER Experiment Name: At_Far-red-induction_P Parameter: Light Value: Far-red vs. White
  misc_feature: MA Experiment 20001248 PARAMETER Experiment Name: At_Far-red-induction_P Parameter: Organism Value: A. thaliana
  misc_feature: MA Experiment 20001248 PARAMETER Experiment Name: At_Far-red-induction_P Parameter: Plant Line Value: Columbia
  misc_feature: MA Experiment 20001248 PARAMETER Experiment Name: At_Far-red-induction_P Parameter: Timepoint (hr) Value: 4
  misc_feature: MA Experiment 20001248 PARAMETER Experiment Name: At_Far-red-induction_P Parameter: Tissue Value: Whole Plant
  misc_feature: MA Experiment ID: 20001451 Result: Up-regulated in Transcription
  misc_feature: MA Experiment 20001451 PARAMETER Experiment Name: At_Far-red-induction_P Parameter: Age (day) Value: 7
  misc_feature: MA Experiment 20001451 PARAMETER Experiment Name: At_Far-red-induction_P Parameter: Light Value: Far-red vs. White
  misc_feature: MA Experiment 20001451 PARAMETER Experiment Name: At_Far-red-induction_P Parameter: Organism Value: A. thaliana
  misc_feature: MA Experiment 20001451 PARAMETER Experiment Name: At_Far-red-induction_P Parameter: Plant Line Value: Columbia
  misc_feature: MA Experiment 20001451 PARAMETER Experiment Name: At_Far-red-induction_P Parameter: Timepoint (hr) Value: 24
  misc_feature: MA Experiment 20001451 PARAMETER Experiment Name: At_Far-red-induction_P Parameter: Tissue Value: Whole Plant
  misc_feature: MA Experiment ID: 20001554 Result: Down-regulated in Transcription
  misc_feature: MA Experiment 20001554 PARAMETER Experiment Name: At_Drought_Soil_Dry_P Parameter: Age (day) Value: 21
  misc_feature: MA Experiment 20001554 PARAMETER Experiment Name: At_Drought_Soil_Dry_P Parameter: Organism Value: A. thaliana
  misc_feature: MA Experiment 20001554 PARAMETER Experiment Name: At_Drought_Soil_Dry_P Parameter: Plant Line Value: WS
  misc_feature: MA Experiment 20001554 PARAMETER Experiment Name: At_Drought_Soil_Dry_P Parameter: Post Timepoint (hr) Value: None
  misc_feature: MA Experiment 20001554 PARAMETER Experiment Name: At_Drought_Soil_Dry_P Parameter: Post-Treatment Value: None
  misc_feature: MA Experiment 20001554 PARAMETER Experiment Name: At_Drought_Soil_Dry_P Parameter: Timepoint (day) Value: 7
  misc_feature: MA Experiment 20001554 PARAMETER Experiment Name: At_Drought_Soil_Dry_P Parameter: Treatment Value: Drought vs. No Drought
  misc_feature: MA Experiment ID: 20001555 Result: Down-regulated in Transcription
  misc_feature: MA Experiment 20001555 PARAMETER Experiment Name: At_Drought_Soil_Dry_P Parameter: Age (day) Value: 24
  misc_feature: MA Experiment 20001555 PARAMETER Experiment Name: At_Drought_Soil_Dry_P Parameter: Organism Value: A. thaliana
  misc_feature: MA Experiment 20001555 PARAMETER Experiment Name: At_Drought_Soil_Dry_P Parameter: Plant Line Value: WS
  misc_feature: MA Experiment 20001555 PARAMETER Experiment Name: At_Drought_Soil_Dry_P Parameter: Post Timepoint (hr) Value: None
  misc_feature: MA Experiment 20001555 PARAMETER Experiment Name: At_Drought_Soil_Dry_P Parameter: Post-Treatment Value: None
  misc_feature: MA Experiment 20001555 PARAMETER Experiment Name: At_Drought_Soil_Dry_P Parameter: Timepoint (day) Value: 10
  misc_feature: MA Experiment 20001555 PARAMETER Experiment Name: At_Drought_Soil_Dry_P Parameter: Treatment Value: Drought vs. No Drought
  misc_feature: MA Experiment ID: 20001904 Result: Down-regulated in Transcription
  misc_feature: MA Experiment 20001904 PARAMETER Experiment Name: At_Drought_Reproduction_P Parameter: Age (day) Value: 37
  misc_feature: MA Experiment 20001904 PARAMETER Experiment Name: At_Drought_Reproduction_P Parameter: Organism Value: A. thaliana
  misc_feature: MA Experiment 20001904 PARAMETER Experiment Name: At_Drought_Reproduction_P Parameter: Plant Line Value: WS
  misc_feature: MA Experiment 20001904 PARAMETER Experiment Name: At_Drought_Reproduction_P Parameter: Timepoint (day) Value: 7
  misc_feature: MA Experiment 20001904 PARAMETER Experiment Name: At_Drought_Reproduction_P Parameter: Tissue Value: Rosettes
  misc_feature: MA Experiment 20001904 PARAMETER Experiment Name: At_Drought_Reproduction_P Parameter: Treatment Value: Drought vs. No Drought
atggctcctctccctttcataccggaacaaacccgttcgcaaacgcgtttatcttcagacacaaagaagaagaacagaaacaagaaaacgtcccaaccaccgcctcaaacgcaaaagataaagcagaagacggtaccatcaacatcatcatcgtcgtcatggagccagataaagaaccttttgagttgcaaacaaatcgaagggccacgagtgcacgaaccatcaaagattacgtcatcatcttgtggctcctctctttgtaagtttagtgatgttatttacggtaatgcccgtgtgattcaccgctccgatcactcccctgagagtagcaatcttggacaagatacccggttgttgacccgaaaacccattagtacccgtggatcttcttcatcggttagatccaacggttgtggcgcttacacgtcatattcaacttccaaagctatgcacttcagaaacctctcaggttgctatgagtgtcacatgattgttgatccaagcaggtatccaatagcaccaagaatatgtgcatgtccacagtgtggggaggtcttccctaagcttgaatcattggagcatcatcaagcagttcgtcacgctgtgtcggagttggggccagaggattcagggagaaacatagtggacatcatcttcaaatctagctggttacgtaaagacagtcccatctacaagatcgaacggatattaaaagtccacaacactcaacgaacgatccaacggtttgaagattgtcgcgacgcagtcaagtcccatgcacatgcctctaccagaaaagaggctcggtccgccgccgacggcaacgagcttctccgcttccactgcaccacagtttcttgctccctcggctcacgcggctcgacctccatttgctccgccatccctggctgccgcgtttgcaccattatccgccatggcttccacgccaaaacggtacgtgtaggcaatggtgaaggaaaagaggagattaagggcgtgaggaccactgcaagcagtggaagagcacacgatgcgttgaggtgttttgaccagcggagggcgatgcttgtttgccgtgtgatcgcgggaagagtgaggcgcgtgcagagtgatgtgccggaagatgaaagtggttctggctcgtatgattcggttgcgggggccgctggggtctacacaaaccttgacgacttggttgtgtataatccaaaagctatacttccttgctttgtagttatctacaaagtctccgagccttaa

SEQ ID NO: 86101 - protein, 419 aa, Arabidopsis thaliana
  peptide (1)..(419): Ceres Seq. ID no. 12686276
  misc_feature (177)..(200): Pfam Name: Zinc finger, C2H2 type Pfam Description: Zinc finger, C2H2 type
  misc_feature (1)..(419): Homolog of NCBI NO: 9802582 NR Description: T2E6.3 [Arabidopsis thaliana]
  misc_feature (1)..(415): Homolog of NCBI NO: 15220992 NR Description: hypothetical protein; protein id: At1g47860.1
  misc_feature (22)..(418): Homolog of NCBI NO: 15222333 NR Description: unknown protein; protein id: At1g75710.1 thaliana] >gi|9369383|gb|AAF87132.1|AC006434_28 F10A5.10
  misc_feature (202)..(416): Homolog of NCBI NO: 38346001 NR Description: OSJNBa0073L13.11 [Oryza sativa (japonica
  misc_feature (9)..(202): Homolog of NCBI NO: 38346001 NR Description: OSJNBa0073L13.11 [Oryza sativa (japonica
  misc_feature (125)..(415): Homolog of NCBI NO: 38345520 NR Description: OSJNBa0039K24.23 [Oryza sativa (japonica
  misc_feature (125)..(415): Homolog of NCBI NO: 5777616 NR Description: CAA30374.1 protein [Oryza sativa]
  misc_feature (178)..(415): Homolog of NCBI NO: 18416951 NR Description: expressed protein; protein id: At4g27240.1, by cDNA: 2944. [Arabidopsis thaliana] >gi|7486806|pir||T05748
  misc_feature (178)..(415): Homolog of NCBI NO: 34910152 NR Description: B1070A12.19 [Oryza sativa (japonica
  misc_feature (178)..(415): Homolog of NCBI NO: 15239695 NR Description: putative protein; protein id: At5g54630.1, by cDNA: gi_15010657 [Arabidopsis thaliana] gene_id:MRB17.13~pir||T05748~strong similarity to unknown protein
MAPLPFIPEQTRSQTRLSSDTKKKNRNKKTSQPPPQTQKIKQKTVPSTSSSSSWSQIKNLLSCKQIEGPRVHEPSKITSSSCGSSLCKFSDVIYGNARVIHRSDHSPESSNLGQDTRLLTRKPISTRGSSSSVRSNGCGAYTSYSTSKAMHFRNLSGCYECHMIVDPSRYPIAPRICACPQCGEVFPKLESLEHHQAVRHAVSELGPEDSGRNIVDIIFKSSWLRKDSPIYKIERILKVHNTQRTIQRFEDCRDAVKSHAHASTRKEARSAADGNELLRFHCTTVSCSLGSRGSTSICSAIPGCRVCTIIRHGFHAKTVRVGNGEGKEEIKGVRTTASSGRAHDALRCFDQRRAMLVCRVIAGRVRRVQSDVPEDESGSGSYDSVAGAAGVYTNLDDLVVYNPKAILPCFVVIYKVSEP

SEQ ID NO: 86102 - protein, 270 aa, Arabidopsis thaliana
  peptide (1)..(270): Ceres Seq. ID no. 12686277
  misc_feature (28)..(51): Pfam Name: Zinc finger, C2H2 type Pfam Description: Zinc finger, C2H2 type
  misc_feature (1)..(270): Homolog of NCBI NO: 9802582 NR Description: T2E6.3 [Arabidopsis thaliana]
  misc_feature (1)..(266): Homolog of NCBI NO: 15220992 NR Description: hypothetical protein; protein id: At1g47860.1
  misc_feature (1)..(269): Homolog of NCBI NO: 15222333 NR Description: unknown protein; protein id: At1g75710.1 thaliana] >gi|9369383|gb|AAF87132.1|AC006434_28 F10A5.10
  misc_feature (53)..(267): Homolog of NCBI NO: 38346001 NR Description: OSJNBa0073L13.11 [Oryza sativa (japonica
  misc_feature (1)..(53): Homolog of NCBI NO: 38346001 NR Description: OSJNBa0073L13.11 [Oryza sativa (japonica
  misc_feature (1)..(266): Homolog of NCBI NO: 38345520 NR Description: OSJNBa0039K24.23 [Oryza sativa (japonica
  misc_feature (1)..(266): Homolog of NCBI NO: 5777616 NR Description: CAA30374.1 protein [Oryza sativa]
  misc_feature (29)..(266): Homolog of NCBI NO: 18416951 NR Description: expressed protein; protein id: At4g27240.1, by cDNA: 2944. [Arabidopsis thaliana] >gi|7486806|pir||T05748
  misc_feature (29)..(266): Homolog of NCBI NO: 34910152 NR Description: B1070A12.19 [Oryza sativa (japonica
  misc_feature (29)..(266): Homolog of NCBI NO: 15239695 NR Description: putative protein; protein id: At5g54630.1, by cDNA: gi_15010657 [Arabidopsis thaliana] gene_id:MRB17.13~pir||T05748~strong similarity to unknown protein
MHFRNLSGCYECHMIVDPSRYPIAPRICACPQCGEVFPKLESLEHHQAVRHAVSELGPEDSGRNIVDIIFKSSWLRKDSPIYKIERILKVHNTQRTIQRFEDCRDAVKSHAHASTRKEARSAADGNELLRFHCTTVSCSLGSRGSTSICSAIPGCRVCTIIRHGFHAKTVRVGNGEGKEEIKGVRTTASSGRAHDALRCFDQRRAMLVCRVIAGRVRRVQSDVPEDESGSGSYDSVAGAAGVYTNLDDLVVYNPKAILPCFVVIYKVSEP

SEQ ID NO: 86103 - protein, 257 aa, Arabidopsis thaliana
  peptide (1)..(257): Ceres Seq. ID no. 12686278
  misc_feature (15)..(38): Pfam Name: Zinc finger, C2H2 type Pfam Description: Zinc finger, C2H2 type
  misc_feature (1)..(257): Homolog of NCBI NO: 9802582 NR Description: T2E6.3 [Arabidopsis thaliana]
  misc_feature (1)..(253): Homolog of NCBI NO: 15220992 NR Description: hypothetical protein; protein id: At1g47860.1
  misc_feature (1)..(256): Homolog of NCBI NO: 15222333 NR Description: unknown protein; protein id: At1g75710.1 thaliana] >gi|9369383|gb|AAF87132.1|AC006434_28 F10A5.10
  misc_feature (40)..(254): Homolog of NCBI NO: 38346001 NR Description: OSJNBa0073L13.11 [Oryza sativa (japonica
  misc_feature (1)..(40): Homolog of NCBI NO: 38346001 NR Description: OSJNBa0073L13.11 [Oryza sativa (japonica
  misc_feature (1)..(253): Homolog of NCBI NO: 38345520 NR Description: OSJNBa0039K24.23 [Oryza sativa (japonica
  misc_feature (1)..(253): Homolog of NCBI NO: 5777616 NR Description: CAA30374.1 protein [Oryza sativa]
  misc_feature (16)..(253): Homolog of NCBI NO: 18416951 NR Description: expressed protein; protein id: At4g27240.1, by cDNA: 2944. [Arabidopsis thaliana] >gi|7486806|pir||T05748
  misc_feature (16)..(253): Homolog of NCBI NO: 34910152 NR Description: B1070A12.19 [Oryza sativa (japonica
  misc_feature (16)..(253): Homolog of NCBI NO: 15239695 NR Description: putative protein; protein id: At5g54630.1, by cDNA: gi_15010657 [Arabidopsis thaliana] gene_id:MRB17.13~pir||T05748~strong similarity to unknown protein
MIVDPSRYPIAPRICACPQCGEVFPKLESLEHHQAVRHAVSELGPEDSGRNIVDIIFKSSWLRKDSPIYKIERILKVHNTQRTIQRFEDCRDAVKSHAHASTRKEARSAADGNELLRFHCTTVSCSLGSRGSTSICSAIPGCRVCTIIRHGFHAKTVRVGNGEGKEEIKGVRTTASSGRAHDALRCFDQRRAMLVCRVIAGRVRRVQSDVPEDESGSGSYDSVAGAAGVYTNLDDLVVYNPKAILPCFVVIYKVSEP

SEQ ID NO: 86104 - DNA, 2334 bp, Arabidopsis thaliana
  misc_feature (1)..(2334): Ceres Seq. ID no. 12686397
  misc_feature: MA Experiment ID: 20000307 Result: Down-regulated in Transcription
  misc_feature: MA Experiment 20000307 PARAMETER Experiment Name: At_Germinating_Seeds_Sub_P Parameter: Age (hr) Value: 24 vs. 0
  misc_feature: MA Experiment 20000307 PARAMETER Experiment Name: At_Germinating_Seeds_Sub_P Parameter: Organism Value: A. thaliana
  misc_feature: MA Experiment 20000307 PARAMETER Experiment Name: At_Germinating_Seeds_Sub_P Parameter: Plant Line Value: WS
  misc_feature: MA Experiment 20000307 PARAMETER Experiment Name: At_Germinating_Seeds_Sub_P Parameter: Tissue Value: Germinating Seeds
  misc_feature: MA Experiment ID: 20000315 Result: Down-regulated in Transcription
  misc_feature: MA Experiment 20000315 PARAMETER Experiment Name: At_14day_Shoots-Roots_Sub_P Parameter: Age (day) Value: 14
  misc_feature: MA Experiment 20000315 PARAMETER Experiment Name: At_14day_Shoots-Roots_Sub_P Parameter: Organism Value: A. thaliana
  misc_feature: MA Experiment 20000315 PARAMETER Experiment Name: At_14day_Shoots-Roots_Sub_P Parameter: Plant Line Value: WS
  misc_feature: MA Experiment 20000315 PARAMETER Experiment Name: At_14day_Shoots-Roots_Sub_P Parameter: Tissue Value: Shoots vs. Whole Plant
atggttgtttatcccaacgaagaagctgaaaatggttcacttcgcttcgtagatttcgtaaacaagacatttgctctgttaggcaattctcccatcaaaaagttctctctgcgtcatgagcctagactttactgtgtagatgcatacttacgttggattttcactgcaatggaacaagaacgtggtttactggaactacacttgtacgcggatcgatattattatcctgttggtatagagagagagctgttcacgagcaacacactggttaagctcacactatccggtagatatgattttcaagttgagactgtgtttctccctgcccttaaatcactttccctctcatcttctttcgagattggttttgacaaatattgtaacctcctcgatggcttccctgcattggaagagttatacattcgtgaagctgtatctgaactttctaatgctttactatctagcggtacgtttgtgaaatgtgcatccatcaagagacttgtggtttttaccgattgtccaaagtttaaagaggatgaggatcaccaagaaccttgttttatagcaccaagtcttgtctaccttgactattctagttatctctccgaaaattatgaccttattgatttgaattcgcttgttgaagccaggctgaatctcagactattggagtcatttaacaattatggttcgtctgataatgatggtgatgtttatggttgggattttaatgttccttttgattattatggtgatgttacaaatctagttgcgggtataaccaacattacaacccttcacttgtctcctgattcccttgaggtatttcatttccgctgtaaatccataccggtgttcaacaatctcctccttaatttatctattgagagtaacaagcgaaatggttggcaagtaatgccacttttgatcaggagttgtccaaatctgcacactttagtcatcaagggttttgtccacagagtaacaagtaaatgcggagacgcatgtgcttgcatccctaagaagcagaggaagattggaaagaaagaggagatttcagagtatggaggttcttttcaagagctggaacagatgagacatttcttgggcaagttggaacgtcttgaaactgtgaaagttggtgttcacgcagaaaacaataacaacaatgagttcttgcgagctaatctactgactctccccagactctcatcaaaaagaattttcgaagaaaaattagagagagtagaagaagcagaagcagtaatggtacgagcttcatcgtcgaagaaaggaggatcaaaaggaggagacaaagacgacgcagagtcaaaacagaggaagagattaaaaaccctagctctcgataaccaattgctctctgattctccggcgaaatctcattcctctctcaaaccttcaaagcaagttctcaaacaccatggcaccgacatcatccgcaaatctcagcgcaagaatcgctttctcttctccttccctggtcttctcgctcctatctccgccgctaccatcggcgatctcgatcgattatctaccaaaaaccctgtcctctaccttaatttcccacagggtcgtatgaaactttttggaacgattttgtatccgaagaacagatacttgactcttcaattctctagaggaggcaaaaatgtcttatgtgatgattattttgataacatgattgtgttctctgagtcatggtggattgggacaaaagaggagaatccagaagaagctcgtcttgatttccctaaagaactagctcaggcagagaatactgagtttgatttccaaggcggtgctggaggagcagcttcggtgaagaagctggcgagtcctgaaattggtagccaaccaacagagacagactcacctgaagttgacaacgaggatgttttgtctgaggatggagaattcttggacgataagatccaagtaacaccaccagttcaattaacaccaccagtccaagtaactccggtccgacagtctcagagaaattctgggaagaaattcaactttgcagaaacttcctcagaggcctcctctggtgaaagtgaaggcaatacatctgatgaagatgagaaacctctgttggaacctgaatcttcaacaagaagtcgtgaggaatctcaagatggtaatggtattactgcatctgcaagcaagttgcctgaagaacttccggctaaaagggaaaaactaaagagcaaagacagtaagctcgttcaagctactttgtctaaccttttcaagaaagctgaggagaaaacagctggaacttccaaggctaaatcatcctcaaaagcttaa

SEQ ID NO: 86105 - protein, 777 aa, Arabidopsis thaliana
  peptide (1)..(777): Ceres Seq. ID no. 12686398
  misc_feature (1)..(406): Homolog of NCBI NO: 15221171 NR Description: hypothetical protein; protein id: At1g48390.1
  misc_feature (1)..(282): Homolog of NCBI NO: 25405274 NR Description: F11A17.6 [imported] - Arabidopsis thaliana
  misc_feature (321)..(406): Homolog of NCBI NO: 25405274 NR Description: F11A17.6 [imported] - Arabidopsis thaliana
  misc_feature (423)..(777): Homolog of NCBI NO: 18402164 NR Description: root hairless 1 (RHL1); protein id: At1g48380.1, by cDNA: gi_16323205, supported by cDNA: gi_3219354 [Arabidopsis >gi|25456561|pir||T52177 root hairless protein 1 HAIRLESS 1
  misc_feature (423)..(777): Homolog of NCBI NO: 3811320 NR Description: ROOT HAIRLESS 1 [Arabidopsis thaliana]
  misc_feature (1)..(237): Homolog of NCBI NO: 15221174 NR Description: hypothetical protein; protein id: At1g48400.1
  misc_feature (233)..(406): Homolog of NCBI NO: 15221174 NR Description: hypothetical protein; protein id: At1g48400.1
  misc_feature (11)..(350): Homolog of NCBI NO: 25352367 NR Description: hypothetical protein T6B12.5 [imported] -
  misc_feature (351)..(406): Homolog of NCBI NO: 25352367 NR Description: hypothetical protein T6B12.5 [imported] -
  misc_feature (60)..(350): Homolog of NCBI NO: 22330096 NR Description: hypothetical protein; protein id: At1g47920.1
MVVYPNEEAENGSLRFVDFVNKTFALLGNSPIKKFSLRHEPRLYCVDAYLRWIFTAMEQERGLLELHLYADRYYYPVGIERELFTSNTLVKLTLSGRYDFQVETVFLPALKSLSLSSSFEIGFDKYCNLLDGFPALEELYIREAVSELSNALLSSGTFVKCASIKRLVVFTDCPKFKEDEDHQEPCFIAPSLVYLDYSSYLSENYDLIDLNSLVEARLNLRLLESFNNYGSSDNDGDVYGWDFNVPFDYYGDVTNLVAGITNITTLHLSPDSLEVFHFRCKSIPVFNNLLLNLSIESNKRNGWQVMPLLIRSCPNLHTLVIKGFVHRVTSKCGDACACIPKKQRKIGKKEEISEYGGSFQELEQMRHFLGKLERLETVKVGVHAENNNNNEFLRANLLTLPRLSSKRIFEEKLERVEEAEAVMVRASSSKKGGSKGGDKDDAESKQRKRLKTLALDNQLLSDSPAKSHSSLKPSKQVLKHHGTDIIRKSQRKNRFLFSFPGLLAPISAATIGDLDRLSTKNPVLYLNFPQGRMKLFGTILYPKNRYLTLQFSRGGKNVLCDDYFDNMIVFSESWWIGTKEENPEEARLDFPKELAQAENTEFDFQGGAGGAASVKKLASPEIGSQPTETDSPEVDNEDVLSEDGEFLDDKIQVTPPVQLTPPVQVTPVRQSQRNSGKKFNFAETSSEASSGESEGNTSDEDEKPLLEPESSTRSREESQDGNGITASASKLPEELPAKREKLKSKDSKLVQATLSNLFKKAEEKTAGTSKAKSSSKA

SEQ ID NO: 86106 - protein, 721 aa, Arabidopsis thaliana
  peptide (1)..(721): Ceres Seq. ID no. 12686399
  misc_feature (1)..(350): Homolog of NCBI NO: 15221171 NR Description: hypothetical protein; protein id: At1g48390.1
  misc_feature (1)..(226): Homolog of NCBI NO: 25405274 NR Description: F11A17.6 [imported] - Arabidopsis thaliana
  misc_feature (265)..(350): Homolog of NCBI NO: 25405274 NR Description: F11A17.6 [imported] - Arabidopsis thaliana
  misc_feature (367)..(721): Homolog of NCBI NO: 18402164 NR Description: root hairless 1 (RHL1); protein id: At1g48380.1, by cDNA: gi_16323205, supported by cDNA: gi_3219354 [Arabidopsis >gi|25456561|pir||T52177 root hairless protein 1 HAIRLESS 1
  misc_feature (367)..(721): Homolog of NCBI NO: 3811320 NR Description: ROOT HAIRLESS 1 [Arabidopsis thaliana]
  misc_feature (1)..(181): Homolog of NCBI NO: 15221174 NR Description: hypothetical protein; protein id: At1g48400.1
  misc_feature (177)..(350): Homolog of NCBI NO: 15221174 NR Description: hypothetical protein; protein id: At1g48400.1
  misc_feature (1)..(294): Homolog of NCBI NO: 25352367 NR Description: hypothetical protein T6B12.5 [imported] -
  misc_feature (295)..(350): Homolog of NCBI NO: 25352367 NR Description: hypothetical protein T6B12.5 [imported] -
  misc_feature (4)..(294): Homolog of NCBI NO: 22330096 NR Description: hypothetical protein; protein id: At1g47920.1
MEQERGLLELHLYADRYYYPVGIERELFTSNTLVKLTLSGRYDFQVETVFLPALKSLSLSSSFEIGFDKYCNLLDGFPALEELYIREAVSELSNALLSSGTFVKCASIKRLVVFTDCPKFKEDEDHQEPCFIAPSLVYLDYSSYLSENYDLIDLNSLVEARLNLRLLESFNNYGSSDNDGDVYGWDFNVPFDYYGDVTNLVAGITNITTLHLSPDSLEVFHFRCKSIPVFNNLLLNLSIESNKRNGWQVMPLLIRSCPNLHTLVIKGFVHRVTSKCGDACACIPKKQRKIGKKEEISEYGGSFQELEQMRHFLGKLERLETVKVGVHAENNNNNEFLRANLLTLPRLSSKRIFEEKLERVEEAEAVMVRASSSKKGGSKGGDKDDAESKQRKRLKTLALDNQLLSDSPAKSHSSLKPSKQVLKHHGTDIIRKSQRKNRFLFSFPGLLAPISAATIGDLDRLSTKNPVLYLNFPQGRMKLFGTILYPKNRYLTLQFSRGGKNVLCDDYFDNMIVFSESWWIGTKEENPEEARLDFPKELAQAENTEFDFQGGAGGAASVKKLASPEIGSQPTETDSPEVDNEDVLSEDGEFLDDKIQVTPPVQLTPPVQVTPVRQSQRNSGKKFNFAETSSEASSGESEGNTSDEDEKPLLEPESSTRSREESQDGNGITASASKLPEELPAKREKLKSKDSKLVQATLSNLFKKAEEKTAGTSKAKSSSKA

SEQ ID NO: 86107 - protein, 472 aa, Arabidopsis thaliana
  peptide (1)..(472): Ceres Seq. ID no. 12686400
  misc_feature (1)..(101): Homolog of NCBI NO: 15221171 NR Description: hypothetical protein; protein id: At1g48390.1
  misc_feature (16)..(101): Homolog of NCBI NO: 25405274 NR Description: F11A17.6 [imported] - Arabidopsis thaliana
  misc_feature (118)..(472): Homolog of NCBI NO: 18402164 NR Description: root hairless 1 (RHL1); protein id: At1g48380.1, by cDNA: gi_16323205, supported by cDNA: gi_3219354 [Arabidopsis >gi|25456561|pir||T52177 root hairless protein 1 HAIRLESS 1
  misc_feature (118)..(472): Homolog of NCBI NO: 3811320 NR Description: ROOT HAIRLESS 1 [Arabidopsis thaliana]
  misc_feature (1)..(101): Homolog of NCBI NO: 15221174 NR Description: hypothetical protein; protein id: At1g48400.1
  misc_feature (1)..(45): Homolog of NCBI NO: 25352367 NR Description: hypothetical protein T6B12.5 [imported] -
  misc_feature (46)..(101): Homolog of NCBI NO: 25352367 NR Description: hypothetical protein T6B12.5 [imported] -
  misc_feature (1)..(45): Homolog of NCBI NO: 22330096 NR Description: hypothetical protein; protein id: At1g47920.1
  misc_feature (46)..(101): Homolog of NCBI NO: 22330096 NR Description: hypothetical protein; protein id: At1g47920.1
  misc_feature (1)..(101): Homolog of NCBI NO: 15217679 NR Description: unknown protein; protein id: At1g64540.1
MPLLIRSCPNLHTLVIKGFVHRVTSKCGDACACIPKKQRKIGKKEEISEYGGSFQELEQMRHFLGKLERLETVKVGVHAENNNNNEFLRANLLTLPRLSSKRIFEEKLERVEEAEAVMVRASSSKKGGSKGGDKDDAESKQRKRLKTLALDNQLLSDSPAKSHSSLKPSKQVLKHHGTDIIRKSQRKNRFLFSFPGLLAPISAATIGDLDRLSTKNPVLYLNFPQGRMKLFGTILYPKNRYLTLQFSRGGKNVLCDDYFDNMIVFSESWWIGTKEENPEEARLDFPKELAQAENTEFDFQGGAGGAASVKKLASPEIGSQPTETDSPEVDNEDVLSEDGEFLDDKIQVTPPVQLTPPVQVTPVRQSQRNSGKKFNFAETSSEASSGESEGNTSDEDEKPLLEPESSTRSREESQDGNGITASASKLPEELPAKREKLKSKDSKLVQATLSNLFKKAEEKTAGTSKAKSSSKA

SEQ ID NO: 86108 - DNA, 668 bp, Arabidopsis thaliana
  misc_feature (1)..(668): Ceres Seq. ID no. 12686404
  misc_feature: MA Experiment ID: 108434 Result: Up-regulated in Transcription
  misc_feature: MA Experiment 108434 PARAMETER Experiment Name: At_Root_Tips_cDNA_P Parameter: Tissue Value: Root Tips
  misc_feature: MA Experiment ID: 108435 Result: Down-regulated in Transcription
  misc_feature: MA Experiment 108435 PARAMETER Experiment Name: At_stm_Mutants_cDNA_P Parameter: Plant Line Value: wt Landsburg vs stm
  misc_feature: MA Experiment 108435 PARAMETER Experiment Name: At_stm_Mutants_cDNA_P Parameter: Tissue Value: Shoot Apical Meristem Region
  misc_feature: MA Experiment ID: 108573 Result: Down-regulated in Transcription
  misc_feature: MA Experiment 108573 PARAMETER Experiment Name: At_Drought_cDNA_P Parameter: Timepoint (hr) Value: 6
  misc_feature: MA Experiment 108573 PARAMETER Experiment Name: At_Drought_cDNA_P Parameter: Tissue Value: Aerial
  misc_feature: MA Experiment 108573 PARAMETER Experiment Name: At_Drought_cDNA_P Parameter: Treatment Value: Drought vs. No Drought
  misc_feature: MA Experiment ID: 108595 Result: Down-regulated in Transcription
  misc_feature: MA Experiment 108595 PARAMETER Experiment Name: At_Ler-pi_Ovule_cDNA_P Parameter: Plant Line Value: null
  misc_feature: MA Experiment ID: 20000070 Result: Down-regulated in Transcription
  misc_feature: MA Experiment 20000070 PARAMETER Experiment Name: At_100uM_ABA_Mutants_cDNA_P Parameter: Plant Line Value: CS24
  misc_feature: MA Experiment 20000070 PARAMETER Experiment Name: At_100uM_ABA_Mutants_cDNA_P Parameter: Timepoint (hr) Value: 6
  misc_feature: MA Experiment 20000070 PARAMETER Experiment Name: At_100uM_ABA_Mutants_cDNA_P Parameter: Tissue Value: Aerial
  misc_feature: MA Experiment 20000070 PARAMETER Experiment Name: At_100uM_ABA_Mutants_cDNA_P Parameter: Treatment Value: 100uM ABA vs. No Treatment
  misc_feature: MA Experiment ID: 20000071 Result: Down-regulated in Transcription
  misc_feature: MA Experiment 20000071 PARAMETER Experiment Name: At_100uM_ABA_Mutants_cDNA_P Parameter: Plant Line Value: CS8104
  misc_feature: MA Experiment 20000071 PARAMETER Experiment Name: At_100uM_ABA_Mutants_cDNA_P Parameter: Timepoint (hr) Value: 6
  misc_feature: MA Experiment 20000071 PARAMETER Experiment Name: At_100uM_ABA_Mutants_cDNA_P Parameter: Tissue Value: Aerial
  misc_feature: MA Experiment 20000071 PARAMETER Experiment Name: At_100uM_ABA_Mutants_cDNA_P Parameter: Treatment Value: 100uM ABA vs. No Treatment
  misc_feature: MA Experiment ID: 20000180 Result: Up-regulated in Transcription
  misc_feature: MA Experiment 20000180 PARAMETER Experiment Name: At_Germinating_Seeds_P Parameter: Age (hr) Value: 24 vs. 0
  misc_feature: MA Experiment 20000180 PARAMETER Experiment Name: At_Germinating_Seeds_P Parameter: Tissue Value: Germinating Seeds
  misc_feature: MA Experiment ID: 20000185 Result: Down-regulated in Transcription
  misc_feature: MA Experiment 20000185 PARAMETER Experiment Name: At_Roots__P Parameter: Age (day) Value: 7 vs. 21
  misc_feature: MA Experiment 20000185 PARAMETER Experiment Name: At_Roots__P Parameter: Organism Value: A. thaliana
  misc_feature: MA Experiment 20000185 PARAMETER Experiment Name: At_Roots__P Parameter: Tissue Value: Roots vs. Whole Plant
  misc_feature: MA Experiment ID: 20000437 Result: Down-regulated in Transcription
  misc_feature: MA Experiment 20000437 PARAMETER Experiment Name: At_Drought_P Parameter: Age (day) Value: 8
  misc_feature: MA Experiment 20000437 PARAMETER Experiment Name: At_Drought_P Parameter: Organism Value: A. thaliana
  misc_feature: MA Experiment 20000437 PARAMETER Experiment Name: At_Drought_P Parameter: Plant Line Value: WS
  misc_feature: MA Experiment 20000437 PARAMETER Experiment Name: At_Drought_P Parameter: Timepoint (hr) Value: 24
  misc_feature: MA Experiment 20000437 PARAMETER Experiment Name: At_Drought_P Parameter: Tissue Value: Whole Plant
  misc_feature: MA Experiment 20000437 PARAMETER Experiment Name: At_Drought_P Parameter: Treatment Value: Drought vs. No Drought
  misc_feature: MA Experiment ID: 20000439 Result: Down-regulated in Transcription
  misc_feature: MA Experiment 20000439 PARAMETER Experiment Name: At_Roots__P Parameter: Age (day) Value: 14 vs. 21
  misc_feature: MA Experiment 20000439 PARAMETER Experiment Name: At_Roots__P Parameter: Organism Value: A. thaliana
  misc_feature: MA Experiment 20000439 PARAMETER Experiment Name: At_Roots__P Parameter: Tissue Value: Roots vs. Whole Plant
  misc_feature: MA Experiment ID: 20000794 Result: Down-regulated in Transcription
  misc_feature: MA Experiment 20000794 PARAMETER Experiment Name: At_Petals_P Parameter: Age (day) Value: 23-25 days
  misc_feature: MA Experiment 20000794 PARAMETER Experiment Name: At_Petals_P Parameter: Plant Line Value: WS
  misc_feature: MA Experiment 20000794 PARAMETER Experiment Name: At_Petals_P Parameter: Tissue Value: Petals vs. Whole plant
  misc_feature: MA Experiment ID: 20001558 Result: Up-regulated in Transcription
  misc_feature: MA Experiment 20001558 PARAMETER Experiment Name: At_Drought_Soil_Dry_P Parameter: Age (day) Value: 27
  misc_feature: MA Experiment 20001558 PARAMETER Experiment Name: At_Drought_Soil_Dry_P Parameter: Organism Value: A. thaliana
  misc_feature: MA Experiment 20001558 PARAMETER Experiment Name: At_Drought_Soil_Dry_P Parameter: Plant Line Value: WS
  misc_feature: MA Experiment 20001558 PARAMETER Experiment Name: At_Drought_Soil_Dry_P Parameter: Post Timepoint (hr) Value: 6
  misc_feature: MA Experiment 20001558 PARAMETER Experiment Name: At_Drought_Soil_Dry_P Parameter: Post-Treatment Value: Re-Water vs. No Drought
  misc_feature: MA Experiment 20001558 PARAMETER Experiment Name: At_Drought_Soil_Dry_P Parameter: Timepoint (day) Value: 13
  misc_feature: MA Experiment 20001558 PARAMETER Experiment Name: At_Drought_Soil_Dry_P Parameter: Treatment Value: Drought vs. No Drought
  misc_feature: MA Experiment ID: 20001560 Result: Up-regulated in Transcription
  misc_feature: MA Experiment 20001560 PARAMETER Experiment Name: At_Drought_Soil_Dry_P Parameter: Age (day) Value: 28
  misc_feature: MA Experiment 20001560 PARAMETER Experiment Name: At_Drought_Soil_Dry_P Parameter: Organism Value: A. thaliana
  misc_feature: MA Experiment 20001560 PARAMETER Experiment Name: At_Drought_Soil_Dry_P Parameter: Plant Line Value: WS
  misc_feature: MA Experiment 20001560 PARAMETER Experiment Name: At_Drought_Soil_Dry_P Parameter: Post Timepoint (hr) Value: None
  misc_feature: MA Experiment 20001560 PARAMETER Experiment Name: At_Drought_Soil_Dry_P Parameter: Post-Treatment Value: None
  misc_feature: MA Experiment 20001560 PARAMETER Experiment Name: At_Drought_Soil_Dry_P Parameter: Timepoint (day) Value: 14
  misc_feature: MA Experiment 20001560 PARAMETER Experiment Name: At_Drought_Soil_Dry_P Parameter: Treatment Value: Drought vs. No Drought
  misc_feature: MA Experiment ID: 20001757 Result: Up-regulated in Transcription
  misc_feature: MA Experiment 20001757 PARAMETER Experiment Name: At_50mM_NH4NO3_L-to-H_P Parameter: Timepoint (hr) Value: 6
  misc_feature: MA Experiment 20001757 PARAMETER Experiment Name: At_50mM_NH4NO3_L-to-H_P Parameter: Tissue Value: Leaf
  misc_feature: MA Experiment 20001757 PARAMETER Experiment Name: At_50mM_NH4NO3_L-to-H_P Parameter: Treatment Value: 50mM NH4NO3 vs 100mM Mannitol
  misc_feature: MA Experiment ID: 20001906 Result: Down-regulated in Transcription
  misc_feature: MA Experiment 20001906 PARAMETER Experiment Name: At_Drought_Reproduction_P Parameter: Age (day) Value: 35
  misc_feature: MA Experiment 20001906 PARAMETER Experiment Name: At_Drought_Reproduction_P Parameter: Organism Value: A. thaliana
  misc_feature: MA Experiment 20001906 PARAMETER Experiment Name: At_Drought_Reproduction_P Parameter: Plant Line Value: WS
  misc_feature: MA Experiment 20001906 PARAMETER Experiment Name: At_Drought_Reproduction_P Parameter: Timepoint (day) Value: 5
  misc_feature: MA Experiment 20001906 PARAMETER Experiment Name: At_Drought_Reproduction_P Parameter: Tissue Value: Siliques
  misc_feature: MA Experiment 20001906 PARAMETER Experiment Name: At_Drought_Reproduction_P Parameter: Treatment Value: Drought vs. No Drought
ataaggcaaaaaggatttgcttttacgaacagagagcgagccagagagagtgagtaagagagaatgacgagcgtgagtgggtgtggttcagtgagtctgataactaaccgcagtgcgttcttgggaaacggacttcaacaccgtgccgttttccttaaaccatggtcgtcttcttcgcttcagtctcggtccatggttgtcgaagccaaaaccaaaaccagcagcgaagacagaatcgcccgccactctcgtatccgtaagaaggttaatggtacaacggagaggccaaggctatgtgttttccgatcaaacaagcatctttatgttcaagtgattgatgataccaagatgcacaccttagcttcagcttccactaagcagaaaccaatctctgaagagttcgactacacctctggaccaaccattgaggtagcgaagaaagttggggaagtgatagcaaaatcttgcttggagaaaggtatcacaaaggtagcctttgaccgtggtggttacccttaccatggacgtattgaggctcttgctgctgcagcacgtgaacacggtcttcagttttaaccgtcgttttctttccttgtttctttccgatgaacagcagtgtatgaatgtagagaacccattttccccaattgaaatgttgagatttttct

SEQ ID NO: 86109 - protein, 170 aa, Arabidopsis thaliana; identical to SEQ ID NO: 35246
  peptide (1)..(170): Ceres Seq. ID no. 12686405
  misc_feature (52)..(170): Pfam Name: Ribosomal L18p/L5e family Pfam Description: Ribosomal L18p/L5e family
  misc_feature (1)..(170): Homolog of NCBI NO: 15221153 NR Description: ribosomal protein L18, putative; protein id: supported by cDNA: gi_12484208 [Arabidopsis thaliana] hypothetical protein F11A17.10 [imported] ESTs gb|AI993387,
  misc_feature (33)..(170): Homolog of NCBI NO: 34897318 NR Description: putative ribosomal protein L18 [Oryza sativa]
  misc_feature (49)..(170): Homolog of NCBI NO: 15644232 NR Description: ribosomal protein L18 [Thermotoga maritima]
  misc_feature (49)..(170): Homolog of NCBI NO: 3980238 NR Description: ribosomal protein L18 [Thermotoga maritima]
  misc_feature (57)..(170): Homolog of NCBI NO: 132724 NR Description: 50S RIBOSOMAL PROTEIN L18 >gi|71259|pir||R5BS8F
  misc_feature (57)..(170): Homolog of NCBI NO: 143423 NR Description: ribosomal protein L18
  misc_feature (50)..(170): Homolog of NCBI NO: 1172978 NR Description: 50S ribosomal protein L18
  misc_feature (49)..(170): Homolog of NCBI NO: 15606750 NR Description: ribosomal protein L18 [Aquifex aeolicus]
  misc_feature (50)..(170): Homolog of NCBI NO: 17231692 NR Description: 50S ribosomal protein L18 [Nostoc sp. PCC 7120]
  misc_feature (50)..(170): Homolog of NCBI NO: 16077200 NR Description: ribosomal protein L18 [Bacillus subtilis]

SEQ ID NO: 86110 - protein, 127 aa, Arabidopsis thaliana; identical to SEQ ID NO: 35247
  peptide (1)..(127): Ceres Seq. ID no. 12686406
  misc_feature (9)..(127): Pfam Name: Ribosomal L18p/L5e family Pfam Description: Ribosomal L18p/L5e family
  misc_feature (1)..(127): Homolog of NCBI NO: 15221153 NR Description: ribosomal protein L18, putative; protein id: supported by cDNA: gi_12484208 [Arabidopsis thaliana] hypothetical protein F11A17.10 [imported] ESTs gb|AI993387,
  misc_feature (1)..(127): Homolog of NCBI NO: 34897318 NR Description: putative ribosomal protein L18 [Oryza sativa]
  misc_feature (6)..(127): Homolog of NCBI NO: 15644232 NR Description: ribosomal protein L18 [Thermotoga maritima]
  misc_feature (6)..(127): Homolog of NCBI NO: 3980238 NR Description: ribosomal protein L18 [Thermotoga maritima]
  misc_feature (14)..(127): Homolog of NCBI NO: 132724 NR Description: 50S RIBOSOMAL PROTEIN L18 >gi|71259|pir||R5BS8F
  misc_feature (14)..(127): Homolog of NCBI NO: 143423 NR Description: ribosomal protein L18
  misc_feature (7)..(127): Homolog of NCBI NO: 1172978 NR Description: 50S ribosomal protein L18
  misc_feature (6)..(127): Homolog of NCBI NO: 15606750 NR Description: ribosomal protein L18 [Aquifex aeolicus]
  misc_feature (7)..(127): Homolog of NCBI NO: 17231692 NR Description: 50S ribosomal protein L18 [Nostoc sp. PCC 7120]
  misc_feature (7)..(127): Homolog of NCBI NO: 16077200 NR Description: ribosomal protein L18 [Bacillus subtilis]

SEQ ID NO: 86111 - DNA, 1202 bp, Arabidopsis thaliana
  misc_feature (1)..(1202): Ceres Seq. ID no. 12686452
  misc_feature: MA Experiment ID: 20000184 Result: Up-regulated in Transcription
  misc_feature: MA Experiment 20000184 PARAMETER Experiment Name: At_Shoots__P Parameter: Age (day) Value: 7
  misc_feature: MA Experiment 20000184 PARAMETER Experiment Name: At_Shoots__P Parameter: Tissue Value: Shoots vs. Whole Plant
  misc_feature: MA Experiment ID: 20000234 Result: Up-regulated in Transcription
  misc_feature: MA Experiment 20000234 PARAMETER Experiment Name: At_Siliques_P Parameter: Age (day) Value: 21
  misc_feature: MA Experiment 20000234 PARAMETER Experiment Name: At_Siliques_P Parameter: Organism Value: A. thaliana
  misc_feature: MA Experiment 20000234 PARAMETER Experiment Name: At_Siliques_P Parameter: Plant Line Value: WS
  misc_feature: MA Experiment 20000234 PARAMETER Experiment Name: At_Siliques_P Parameter: Tissue Value: Less Than 5mm Siliques vs. Whole Plant
  misc_feature: MA Experiment ID: 20000264 Result: Up-regulated in Transcription
  misc_feature: MA Experiment 20000264 PARAMETER Experiment Name: At_Open_Flower_P Parameter: Age (day) Value: 21
  misc_feature: MA Experiment 20000264 PARAMETER Experiment Name: At_Open_Flower_P Parameter: Plant Line Value: WS
  misc_feature: MA Experiment 20000264 PARAMETER Experiment Name: At_Open_Flower_P Parameter: Tissue Value: Open Flower vs. Whole Plant
  misc_feature: MA Experiment ID: 20000265 Result: Up-regulated in Transcription
  misc_feature: MA Experiment 20000265 PARAMETER Experiment Name: At_Open_Flower_P Parameter: Age (day) Value: 21
  misc_feature: MA Experiment 20000265 PARAMETER Experiment Name: At_Open_Flower_P Parameter: Plant Line Value: WS
  misc_feature: MA Experiment 20000265 PARAMETER Experiment Name: At_Open_Flower_P Parameter: Tissue Value: Closed Flower vs. Whole Plant
  misc_feature: MA Experiment ID: 20000436 Result: Down-regulated in Transcription
  misc_feature: MA Experiment 20000436 PARAMETER Experiment Name: At_Drought_P Parameter: Age (day) Value: 7
  misc_feature: MA Experiment 20000436 PARAMETER Experiment Name: At_Drought_P Parameter: Organism Value: A. thaliana
  misc_feature: MA Experiment 20000436 PARAMETER Experiment Name: At_Drought_P Parameter: Plant Line Value: WS
  misc_feature: MA Experiment 20000436 PARAMETER Experiment Name: At_Drought_P Parameter: Timepoint (hr) Value: 12
  misc_feature: MA Experiment 20000436 PARAMETER Experiment Name: At_Drought_P Parameter: Tissue Value: Whole Plant
  misc_feature: MA Experiment 20000436 PARAMETER Experiment Name: At_Drought_P Parameter: Treatment Value: Drought vs. No Drought
  misc_feature: MA Experiment ID: 20000437 Result: Down-regulated in Transcription
  misc_feature: MA Experiment 20000437 PARAMETER Experiment Name: At_Drought_P Parameter: Age (day) Value: 8
  misc_feature: MA Experiment 20000437 PARAMETER Experiment Name: At_Drought_P Parameter: Organism Value: A. thaliana
  misc_feature: MA Experiment 20000437 PARAMETER Experiment Name: At_Drought_P Parameter: Plant Line Value: WS
  misc_feature: MA Experiment 20000437 PARAMETER Experiment Name: At_Drought_P Parameter: Timepoint (hr) Value: 24
  misc_feature: MA Experiment 20000437 PARAMETER Experiment Name: At_Drought_P Parameter: Tissue Value: Whole Plant
  misc_feature: MA Experiment 20000437 PARAMETER Experiment Name: At_Drought_P Parameter: Treatment Value: Drought vs. No Drought
  misc_feature: MA Experiment ID: 20000453 Result: Down-regulated in Transcription
  misc_feature: MA Experiment 20000453 PARAMETER Experiment Name: At_100uM_ABA_P Parameter: Age (day) Value: 15
  misc_feature: MA Experiment 20000453 PARAMETER Experiment Name: At_100uM_ABA_P Parameter: Organism Value: A. thaliana
  misc_feature: MA Experiment 20000453 PARAMETER Experiment Name: At_100uM_ABA_P Parameter: Plant Line Value: WS
  misc_feature: MA Experiment 20000453 PARAMETER Experiment Name: At_100uM_ABA_P Parameter: Timepoint (hr) Value: 24
  misc_feature: MA Experiment 20000453 PARAMETER Experiment Name: At_100uM_ABA_P Parameter: Tissue Value: Aerial
  misc_feature: MA Experiment 20000453 PARAMETER Experiment Name: At_100uM_ABA_P Parameter: Treatment Value: 100uM ABA vs. No Treatment
  misc_feature: MA Experiment ID: 20000794 Result: Down-regulated in Transcription
  misc_feature: MA Experiment 20000794 PARAMETER Experiment Name: At_Petals_P Parameter: Age (day) Value: 23-25 days
  misc_feature: MA Experiment 20000794 PARAMETER Experiment Name: At_Petals_P Parameter: Plant Line Value: WS
  misc_feature: MA Experiment 20000794 PARAMETER Experiment Name: At_Petals_P Parameter: Tissue Value: Petals vs. Whole plant
  misc_feature: MA Experiment ID: 20001451 Result: Down-regulated in Transcription
  misc_feature: MA Experiment 20001451 PARAMETER Experiment Name: At_Far-red-induction_P Parameter: Age (day) Value: 7
  misc_feature: MA Experiment 20001451 PARAMETER Experiment Name: At_Far-red-induction_P Parameter: Light Value: Far-red vs. White
  misc_feature: MA Experiment 20001451 PARAMETER Experiment Name: At_Far-red-induction_P Parameter: Organism Value: A. thaliana
  misc_feature: MA Experiment 20001451 PARAMETER Experiment Name: At_Far-red-induction_P Parameter: Plant Line Value: Columbia
  misc_feature: MA Experiment 20001451 PARAMETER Experiment Name: At_Far-red-induction_P Parameter: Timepoint (hr) Value: 24
  misc_feature: MA Experiment 20001451 PARAMETER Experiment Name: At_Far-red-induction_P Parameter: Tissue Value: Whole Plant
  misc_feature: MA Experiment ID: 20001458 Result: Up-regulated in Transcription
  misc_feature: MA Experiment 20001458 PARAMETER Experiment Name: At_50mM_NH4NO3_L-to-H_P Parameter: Age (day) Value: Undefined
  misc_feature: MA Experiment 20001458 PARAMETER Experiment Name: At_50mM_NH4NO3_L-to-H_P Parameter: Organism Value: Undefined
  misc_feature: MA Experiment 20001458 PARAMETER Experiment Name: At_50mM_NH4NO3_L-to-H_P Parameter: Plant Line Value: Undefined
  misc_feature: MA Experiment 20001458 PARAMETER Experiment Name: At_50mM_NH4NO3_L-to-H_P Parameter: Timepoint (hr) Value: 2
  misc_feature: MA Experiment 20001458 PARAMETER Experiment Name: At_50mM_NH4NO3_L-to-H_P Parameter: Tissue Value: Siliques
  misc_feature: MA Experiment 20001458 PARAMETER Experiment Name: At_50mM_NH4NO3_L-to-H_P Parameter: Treatment Value: 50mM NH4NO3 vs. 100mM Manitol
  misc_feature: MA Experiment ID: 20001557 Result: Up-regulated in Transcription
  misc_feature: MA Experiment 20001557 PARAMETER Experiment Name: At_Drought_Soil_Dry_P Parameter: Age (day) Value: 27
  misc_feature: MA Experiment 20001557 PARAMETER Experiment Name: At_Drought_Soil_Dry_P Parameter: Organism Value: A. thaliana
  misc_feature: MA Experiment 20001557 PARAMETER Experiment Name: At_Drought_Soil_Dry_P Parameter: Plant Line Value: WS
  misc_feature: MA Experiment 20001557 PARAMETER Experiment Name: At_Drought_Soil_Dry_P Parameter: Post Timepoint (hr) Value: 3
  misc_feature: MA Experiment 20001557 PARAMETER Experiment Name: At_Drought_Soil_Dry_P Parameter: Post-Treatment Value: Re-Water vs. No Drought
  misc_feature: MA Experiment 20001557 PARAMETER Experiment Name: At_Drought_Soil_Dry_P Parameter: Timepoint (day) Value: 13
  misc_feature: MA Experiment 20001557 PARAMETER Experiment Name: At_Drought_Soil_Dry_P Parameter: Treatment Value: Drought vs. No Drought
  misc_feature: MA Experiment ID: 20001558 Result: Up-regulated in Transcription
  misc_feature: MA Experiment 20001558 PARAMETER Experiment Name: At_Drought_Soil_Dry_P Parameter: Age (day) Value: 27
  misc_feature: MA Experiment 20001558 PARAMETER Experiment Name: At_Drought_Soil_Dry_P Parameter: Organism Value: A. thaliana
  misc_feature: MA Experiment 20001558 PARAMETER Experiment Name: At_Drought_Soil_Dry_P Parameter: Plant Line Value: WS
  misc_feature: MA Experiment 20001558 PARAMETER Experiment Name: At_Drought_Soil_Dry_P Parameter: Post Timepoint (hr) Value: 6
  misc_feature: MA Experiment 20001558 PARAMETER Experiment Name: At_Drought_Soil_Dry_P Parameter: Post-Treatment Value: Re-Water vs. No Drought
  misc_feature: MA Experiment 20001558 PARAMETER Experiment Name: At_Drought_Soil_Dry_P Parameter: Timepoint (day) Value: 13
  misc_feature: MA Experiment 20001558 PARAMETER Experiment Name: At_Drought_Soil_Dry_P Parameter: Treatment Value: Drought vs. No Drought
  misc_feature: MA Experiment ID: 20001560 Result: Up-regulated in Transcription
  misc_feature: MA Experiment 20001560 PARAMETER Experiment Name: At_Drought_Soil_Dry_P Parameter: Age (day) Value: 28
  misc_feature: MA Experiment 20001560 PARAMETER Experiment Name: At_Drought_Soil_Dry_P Parameter: Organism Value: A. thaliana
  misc_feature: MA Experiment 20001560 PARAMETER Experiment Name: At_Drought_Soil_Dry_P Parameter: Plant Line Value: WS
  misc_feature: MA Experiment 20001560 PARAMETER Experiment Name: At_Drought_Soil_Dry_P Parameter: Post Timepoint (hr) Value: None
  misc_feature: MA Experiment 20001560 PARAMETER Experiment Name: At_Drought_Soil_Dry_P Parameter: Post-Treatment Value: None
  misc_feature: MA Experiment 20001560 PARAMETER Experiment Name: At_Drought_Soil_Dry_P Parameter: Timepoint (day) Value: 14
  misc_feature: MA Experiment 20001560 PARAMETER Experiment Name: At_Drought_Soil_Dry_P Parameter: Treatment Value: Drought vs. No Drought
  misc_feature: MA Experiment ID: 20001757 Result: Up-regulated in Transcription
  misc_feature: MA Experiment 20001757 PARAMETER Experiment Name: At_50mM_NH4NO3_L-to-H_P Parameter: Timepoint (hr) Value: 6
  misc_feature: MA Experiment 20001757 PARAMETER Experiment Name: At_50mM_NH4NO3_L-to-H_P Parameter: Tissue Value: Leaf
  misc_feature: MA Experiment 20001757 PARAMETER Experiment Name: At_50mM_NH4NO3_L-to-H_P Parameter: Treatment Value: 50mM NH4NO3 vs 100mM Mannitol
  misc_feature: MA Experiment ID: 20001911 Result: Down-regulated in Transcription
  misc_feature: MA Experiment 20001911 PARAMETER Experiment Name: At_Drought_Reproduction_P Parameter: Age (day) Value: 40
  misc_feature: MA Experiment 20001911 PARAMETER Experiment Name: At_Drought_Reproduction_P Parameter: Organism Value: A. thaliana
  misc_feature: MA Experiment 20001911 PARAMETER Experiment Name: At_Drought_Reproduction_P Parameter: Plant Line Value: WS
  misc_feature: MA Experiment 20001911 PARAMETER Experiment Name: At_Drought_Reproduction_P Parameter: Timepoint (day) Value: 10
  misc_feature: MA Experiment 20001911 PARAMETER Experiment Name: At_Drought_Reproduction_P Parameter: Tissue Value: Flowers
  misc_feature: MA Experiment 20001911 PARAMETER Experiment Name: At_Drought_Reproduction_P Parameter: Treatment Value: Drought vs. No Drought
ttttgccctctcccatttttgtcgccgaaaccctaaatctcgacctcaaaccctgaaccatggctgaaggactcgtgttgaaaggcacaatgtgtgcccacactgatatggtcaccgccattgctacaccggtcgataactccgacgtgattgtaacttcgtcgcgtgacaaatcaatcatcctctggaaactcacaaaggaagacaagtcatacggtgttgctcagcggaggatgactggtcactctcacttcgttcaagacgttgttctctcctccgatggacaattcgctctctccggatcttgggacggtgagcttcgtctctgggatctcgctaccggagaatctactcgtcgtttcgttggtcacacgaaagatgttctctctgttgctttctctaccgataaccgtcagatcgtctctgcttctcgtgatcgtacgattaagctttggaacacgcttggtgagtgtaagtataccatctctgaagctgatggtcacaaggaatgggttagttgtgttaggtttagtcctaatactcttgtgccaactattgtatctgcttcttgggataaaactgtgaaggtctggaatcttcagaattgtaagcttaggaacactcttgctggtcactctggttacttgaacactgtggctgtgtcacctgatggttcgttgtgtgccagtggtggcaaagatggtgtgatcttgctttgggatttggctgaagggaagaagttgtattctcttgaagctggctctattattcattcactttgcttcagtcccaataggtactggttgtgtgcagcaacagagaatagcattaggatttgggatctcgagagtaagtctgttgttgaggatttgaaggttgatcttaaggctgaggctgaaaagactgatggttctactggaatcggaaacaagaccaaggtgatctactgcacaagcttgaactggagtgcagatggaaacactttgttcagtggatacactgatggagttatcagggtttggggtattggtcgttactagagagacaagaagtttctttattctctccaaatttttccatcgactctaaagtcttctcttctgaattagtgttttgaggatttattttttgttcttttctattttcagaatccacaaatgtgatattttgatacattgattttgtttcatatttgttttctt

SEQ ID NO: 86112 - protein, 326 aa, Arabidopsis thaliana [sequence omitted]

SEQ ID NO: 86113 - protein, 316 aa, Arabidopsis thaliana; identical to SEQ ID NO: 26607
  peptide (1)..(316): Ceres Seq. ID no. 12686454
  misc_feature (1)..(316): Homolog of NCBI NO: 15221916 NR Description: guanine nucleotide-binding protein, putative; id: At1g48630.1, supported by cDNA: 38966., supported by cDNA: supported by cDNA: gi_20259150 [Arabidopsis thaliana] protein,
  misc_feature (1)..(316): Homolog of NCBI NO: 21593440 NR Description: guanine nucleotide-binding protein, putative
  misc_feature (1)..(316): Homolog of NCBI NO: 15229589 NR Description: protein kinase C-receptor/G-protein, putative; id: At3g18130.1, supported by cDNA: gi_15215619, supported by gi_20856143 [Arabidopsis thaliana] >gi|9294068|dbj|BAB02025.1|
  misc_feature (1)..(316): Homolog of NCBI NO: 15220941 NR Description: G-protein beta family; protein id: At1g18080.1, by cDNA: 7026., supported by cDNA: gi_14334667, supported by
  misc_feature (1)..(316): Homolog of NCBI NO: 2289095 NR Description: WD-40 repeat protein [Arabidopsis thaliana]
  misc_feature (1)..(316): Homolog of NCBI NO: 3023857 NR Description: GUANINE NUCLEOTIDE-BINDING PROTEIN BETA

SEQ ID NO: 86114 - protein, 310 aa, Arabidopsis thaliana; identical to SEQ ID NO: 26608
  peptide (1)..(310): Ceres Seq. ID no. 12686455
  misc_feature (1)..(310): Homolog of NCBI NO: 15221916 NR Description: guanine nucleotide-binding protein, putative; id: At1g48630.1, supported by cDNA: 38966., supported by cDNA: supported by cDNA: gi_20259150 [Arabidopsis thaliana] protein,
  misc_feature (1)..(310): Homolog of NCBI NO: 21593440 NR Description: guanine nucleotide-binding protein, putative
  misc_feature (1)..(310): Homolog of NCBI NO: 15229589 NR Description: protein kinase C-receptor/G-protein, putative; id: At3g18130.1, supported by cDNA: gi_15215619, supported by gi_20856143 [Arabidopsis thaliana] >gi|9294068|dbj|BAB02025.1|
  misc_feature (1)..(310): Homolog of NCBI NO: 15220941 NR Description: G-protein beta family; protein id: At1g18080.1, by cDNA: 7026., supported by cDNA: gi_14334667, supported by
  misc_feature (1)..(310): Homolog of NCBI NO: 2289095 NR Description: WD-40 repeat protein [Arabidopsis thaliana]
  misc_feature (1)..(310): Homolog of NCBI NO: 3023857 NR Description: GUANINE NUCLEOTIDE-BINDING PROTEIN BETA

SEQ ID NO: 86115 - DNA, 1731 bp, Arabidopsis thaliana
  misc_feature (1)..(1731): Ceres Seq. ID no. 12686456
  misc_feature: MA Experiment ID: 20000306 Result: Up-regulated in Transcription
  misc_feature: MA Experiment 20000306 PARAMETER Experiment Name: At_Germinating_Seeds_Sub_P Parameter: Age (hr) Value: 6 vs. 0
  misc_feature: MA Experiment 20000306 PARAMETER Experiment Name: At_Germinating_Seeds_Sub_P Parameter: Organism Value: A. thaliana
  misc_feature: MA Experiment 20000306 PARAMETER Experiment Name: At_Germinating_Seeds_Sub_P Parameter: Plant Line Value: WS
  misc_feature: MA Experiment 20000306 PARAMETER Experiment Name: At_Germinating_Seeds_Sub_P Parameter: Tissue Value: Germinating Seeds
  misc_feature: MA Experiment ID: 20000307 Result: Up-regulated in Transcription
  misc_feature: MA Experiment 20000307 PARAMETER Experiment Name: At_Germinating_Seeds_Sub_P Parameter: Age (hr) Value: 24 vs. 0
  misc_feature: MA Experiment 20000307 PARAMETER Experiment Name: At_Germinating_Seeds_Sub_P Parameter: Organism Value: A. thaliana
  misc_feature: MA Experiment 20000307 PARAMETER Experiment Name: At_Germinating_Seeds_Sub_P Parameter: Plant Line Value: WS
  misc_feature: MA Experiment 20000307 PARAMETER Experiment Name: At_Germinating_Seeds_Sub_P Parameter: Tissue Value: Germinating Seeds
atgagtttaagcgttgagctcaaggatttggaggtcttaacaacgaacgcaaagcaaatacaagatgatgtattgaaggagatactcacacttaacgccaacacagagtatctcaaacgttttctcgatggaagctctgataaagagttgttcaagaagaacgtaccggtggtgagctacaatgatgtcaagccttatatcgaacgtgttgcgaatggagagccctcggatgtgatttcaggtggaaccattacaagattcgtccaaagcacgggaacttcaggagggatacataaaatatttccagtgaacgataagtacatagagaatcttggataccttttggctgtatcctctctcattacttccaaacatttcagtgacaaggtagatgagaaaggaaagaaaatggcgtttctttacaacagattagaatccaaaactccctccggattagccctttcttcatcatttacaagctatttcatgagcgattacttcaaaaaccggtcatcaaaatgtaattctgagtacacaagccccgaccaagtcatattgtgccccgacaacaaccaaagtgtgtattgtcatcttctatgtgggctttcccagagagaaaaggttgtgggagttagtgcaacatttgctcatgccttaatcaaagcaataaatgctcttcaaatttactggaaggaattgtctagtaatatccggtcaggtcatgttagtgagtggatcactgaccttgactgcaaaaatgctgtctcagccattcttggaggacctgaccctgaattggctgatgtgattgaacaagaatgcagccacaagtcatgggaaggtatcatcacacgactttggcccaaagcaaagtttattgaatgcattgttacaggacaaatggcccaatacattccaacattggacttctattccaacaagcttcctatagtttccatggtatatgggtcttctgaaagtatatttggggtgaatgtggatcctttatccaaaccacaagatgtgtcctacacatttctgcccaatatctcctactttgagtttctacctattgatcatgaggaagatatgaacaccattgttgatcttgtcggtgtcaagctagggtgctattatgaaaccgtggttactagttattttggtctacacaggtatcttattggagatattctacaggtgactggattctacaataacacacctcaatttagattcgtacgcagaaagaatattgtgttaagcgtcaatagtgaagcaacaactgaacaggacattttaaaggggttggctagtgcgacccttgttcttgagtcttcaaattcaatgttgacgggtttcacatgttatgcggatatctccagttttccaggtcactacgtcttttactgggaactcaaagcaaaagatgttgacgatgttgttgagcttgatgaaaatgtattggaagaatgttgctatgcgttagaggaatcgtttgatgctctttataaaagactaaggagtaaagaagggtcaattggagctctagagataaaagtggtgcaacaaggaacatttgattctctcatggaatatttcatctccaaaggtggttcggttgctcaatacaagacacctatgtgtatcaactcttcggaaaccttagcagttcttgaagataaggttattgctcgattctacagccaaaaatctcctcctcttaacttatag

SEQ ID NO: 86116 - protein, 576 aa, Arabidopsis thaliana
  peptide (1)..(576): Ceres Seq. ID no. 12686457
  misc_feature (5)..(557): Pfam Name: GH3 auxin-responsive promoter Pfam Description: GH3 auxin-responsive promoter
  misc_feature (1)..(576): Homolog of NCBI NO: 15221933 NR Description: Nt-gh3 deduced protein, putative; protein id:
  misc_feature (205)..(575): Homolog of NCBI NO: 15221934 NR Description: Nt-gh3 deduced protein, putative; protein id:
  misc_feature (1)..(152): Homolog of NCBI NO: 15221934 NR Description: Nt-gh3 deduced protein, putative; protein id:
  misc_feature (10)..(575): Homolog of NCBI NO: 15242095 NR Description: auxin-responsive GH3-like protein; protein id:
  misc_feature (4)..(568): Homolog of NCBI NO: 15220661 NR Description: GH3-like auxin-regulated protein; protein id:
  misc_feature (8)..(568): Homolog of NCBI NO: 15240601 NR Description: auxin-responsive - like protein; protein id:
  misc_feature (7)..(362): Homolog of NCBI NO: 15217844 NR Description: auxin-regulated GH3 protein, putative; protein At1g28130.1, supported by cDNA: gi_15450364 [Arabidopsis
  misc_feature (361)..(576): Homolog of NCBI NO: 15217844 NR Description: auxin-regulated GH3 protein, putative; protein At1g28130.1, supported by cDNA: gi_15450364 [Arabidopsis
  misc_feature (10)..(576): Homolog of NCBI NO: 15240613 NR Description: auxin reponsive - like protein; protein id:
  misc_feature (10)..(576): Homolog of NCBI NO: 30684377 NR Description: auxin reponsive - like protein [Arabidopsis >gi|26449584|dbj|BAC41918.1| putative auxin responsive protein thaliana] >gi|29028956|gb|AAO64857.1| At5g13370 [Arabidopsis
MSLSVELKDLEVLTTNAKQIQDDVLKEILTLNANTEYLKRFLDGSSDKELFKKNVPVVSYNDVKPYIERVANGEPSDVISGGTITRFVQSTGTSGGIHKIFPVNDKYIENLGYLLAVSSLITSKHFSDKVDEKGKKMAFLYNRLESKTPSGLALSSSFTSYFMSDYFKNRSSKCNSEYTSPDQVILCPDNNQSVYCHLLCGLSQREKVVGVSATFAHALIKAINALQIYWKELSSNIRSGHVSEWITDLDCKNAVSAILGGPDPELADVIEQECSHKSWEGIITRLWPKAKFIECIVTGQMAQYIPTLDFYSNKLPIVSMVYGSSESIFGVNVDPLSKPQDVSYTFLPNISYFEFLPIDHEEDMNTIVDLVGVKLGCYYETVVTSYFGLHRYLIGDILQVTGFYNNTPQFRFVRRKNIVLSVNSEATTEQDILKGLASATLVLESSNSMLTGFTCYADISSFPGHYVFYWELKAKDVDDVVELDENVLEECCYALEESFDALYKRLRSKEGSIGALEIKVVQQGTFDSLMEYFISKGGSVAQYKTPMCINSSETLAVLEDKVIARFYSQKSPPLNL

SEQ ID NO: 86117 - protein, 440 aa, Arabidopsis thaliana; identical to SEQ ID NO: 71536
  peptide (1)..(440): Ceres Seq. ID no. 12686458
  misc_feature (1)..(421): Pfam Name: GH3 auxin-responsive promoter Pfam Description: GH3 auxin-responsive promoter
  misc_feature (1)..(440): Homolog of NCBI NO: 15221933 NR Description: Nt-gh3 deduced protein, putative; protein id:
  misc_feature (69)..(439): Homolog of NCBI NO: 15221934 NR Description: Nt-gh3 deduced protein, putative; protein id:
  misc_feature (1)..(16): Homolog of NCBI NO: 15221934 NR Description: Nt-gh3 deduced protein, putative; protein id:
  misc_feature (1)..(439): Homolog of NCBI NO: 15242095 NR Description: auxin-responsive GH3-like protein; protein id:
  misc_feature (1)..(432): Homolog of NCBI NO: 15220661 NR Description: GH3-like auxin-regulated protein; protein id:
  misc_feature (1)..(432): Homolog of NCBI NO: 15240601 NR Description: auxin-responsive - like protein; protein id:
  misc_feature (1)..(226): Homolog of NCBI NO: 15217844 NR Description: auxin-regulated GH3 protein, putative; protein At1g28130.1, supported by cDNA: gi_15450364 [Arabidopsis
  misc_feature (225)..(440): Homolog of NCBI NO: 15217844 NR Description: auxin-regulated GH3 protein, putative; protein At1g28130.1, supported by cDNA: gi_15450364 [Arabidopsis
  misc_feature (1)..(440): Homolog of NCBI NO: 15240613 NR Description: auxin reponsive - like protein; protein id:
  misc_feature (1)..(440): Homolog of NCBI NO: 30684377 NR Description: auxin reponsive - like protein [Arabidopsis >gi|26449584|dbj|BAC41918.1| putative auxin responsive protein thaliana] >gi|29028956|gb|AAO64857.1| At5g13370 [Arabidopsis

SEQ ID NO: 86118 - protein, 414 aa, Arabidopsis thaliana; identical to SEQ ID NO: 71537
  peptide (1)..(414): Ceres Seq. ID no. 12686459
  misc_feature (1)..(395): Pfam Name: GH3 auxin-responsive promoter Pfam Description: GH3 auxin-responsive promoter
  misc_feature (1)..(414): Homolog of NCBI NO: 15221933 NR Description: Nt-gh3 deduced protein, putative; protein id:
  misc_feature (43)..(413): Homolog of NCBI NO: 15221934 NR Description: Nt-gh3 deduced protein, putative; protein id:
  misc_feature (1)..(413): Homolog of NCBI NO: 15242095 NR Description: auxin-responsive GH3-like protein; protein id:
  misc_feature (1)..(406): Homolog of NCBI NO: 15220661 NR Description: GH3-like auxin-regulated protein; protein id:
  misc_feature (1)..(406): Homolog of NCBI NO: 15240601 NR Description: auxin-responsive - like protein; protein id:
  misc_feature (1)..(200): Homolog of NCBI NO: 15217844 NR Description: auxin-regulated GH3 protein, putative; protein At1g28130.1, supported by cDNA: gi_15450364 [Arabidopsis
  misc_feature (199)..(414): Homolog of NCBI NO: 15217844 NR Description: auxin-regulated GH3 protein, putative; protein At1g28130.1, supported by cDNA: gi_15450364 [Arabidopsis
  misc_feature (1)..(414): Homolog of NCBI NO: 15240613 NR Description: auxin reponsive - like protein; protein id:
  misc_feature (1)..(414): Homolog of NCBI NO: 30684377 NR Description: auxin reponsive - like protein [Arabidopsis >gi|26449584|dbj|BAC41918.1| putative auxin responsive protein thaliana] >gi|29028956|gb|AAO64857.1| At5g13370 [Arabidopsis
  misc_feature (1)..(414): Homolog of NCBI NO: 11281348 NR Description: auxin-regulated protein GH3 homolog T22N19.20 -

SEQ ID NO: 86119 - DNA, 1896 bp, Arabidopsis thaliana
  misc_feature (1)..(1896): Ceres Seq. ID no. 12686496
  misc_feature: MA Experiment ID: 108595 Result: Up-regulated in Transcription
  misc_feature: MA Experiment 108595 PARAMETER Experiment Name: At_Ler-pi_Ovule_cDNA_P Parameter: Plant Line Value: null
  misc_feature: MA Experiment ID: 20000495 Result: Up-regulated in Transcription
  misc_feature: MA Experiment 20000495 PARAMETER Experiment Name: At_Guard_Cells_P Parameter: Harvest Date Value: 8/2/2002
  misc_feature: MA Experiment 20000495 PARAMETER Experiment Name: At_Guard_Cells_P Parameter: Organism Value: A. thaliana
  misc_feature: MA Experiment 20000495 PARAMETER Experiment Name: At_Guard_Cells_P Parameter: Tissue Value: Guard Cells vs. Leaves
atgacattggcgattacgtcacggctcaggcgcaatttcgtgttccgtcgtaggaatcttgaatcgttgttgtctccacaatgtcagaaacttatcaacgatctaaggtcttgcagagacaccgtcgaagtttctcgaattcatggttacatggtgaaaacgggactcgacaaggacgatttcgcagtgagcaagcttcttgctttttcctctgtacttgacattcgatacgcttcgtcgatcttcgagcatgtctccaacactaatctctttatgttcaacactatgatcagaggttactcgattagcgatgagccggagcgagcattttctgttttcaaccaattgagagctaaaggtttgaccttggaccgattctcgtttatcacgactcttaaatcatgttctcgtgaattgtgtgtttcaattggtgagggattgcatgggattgctttgagatctgggtttatggtttttactgatttgaggaatgctcttatacatttttactgtgtttgtggaaagattagtgatgctcggaaagtgttcgacgaaatgccgcagagtgttgatgctgttacgtttagtactttgatgaatgggtatcttcaggtttctaagaaagcgttggctttggatttgtttaggattatgagaaaaagtgaggtggtcgttaatgtcagtacgttgcttagctttctttcggctattagtgatctaggagatttgtctggagcagaatctgctcatgtgttatgcatcaagattggccttgatttagacttgcatttaatcacagctttgatagggatgtacggcaaaactgggggtatcagttcagcacgcaggatctttgattgcgccattcgaaaggatgttgttacatggaactgtatgatagaccaatatgccaaaacgggtctccttgaagagtgtgtatggctactgaggcagatgaagtatgaaaaaatgaaaccgaattcatctacatttgttgggctgttgtcttcctgtgcgtacagtgaagcagcattcgtaggacgtactgttgctgatctattggaagaggaaagaatagctttggatgcaatacttggaactgcactcgttgatatgtatgcaaaagtaggattgcttgaaaaagctgttgagattttcaatagaatgaaggataaggatgtaaagtcctggaccgcgatgatctcgggttatggagctcatggactagcaagagaagcagtaacactattcaataagatggaggaagagaactgcaaagtgagacccaatgagattaccttcttggttgtgctgaatgcttgtagccatggagggttggtaatggaaggaatcagatgctttaagaggatggttgaggcttacagcttcacgcccaaagttgaacattatggttgtgtggttgatcttttaggtcgagcggggcagttagaggaagcgtatgagttaataaggaacttaccgatcacaagtgattcaacggcttggcgtgctctgctagctgcttgtagagtatacgggaatgcagatttgggggaaagtgtgatgatgagattggctgaaatgggtgagactcatccggcagatgcaattcttctagctgggacacacgctgttgcagggaacccagaaaaatcattagataatgagttgaataaagggagaaaagaagctggatacagcgccattgaaatagaatagagtagacaatctctggcgttcattcacctctgacctttttgttgaaaactatatcagcaaaatgttgttcaataaggtaaacccctgtatttactctttctttatgctttaaaacagtaacttatgtataaagaaaggagacaattgatcttaatgaaacagttttgatggattgtg

SEQ ID NO: 86120 - protein, 572 aa, Arabidopsis thaliana
  peptide (1)..(572): Ceres Seq. ID no. 12686497
  misc_feature (294)..(328): Pfam Name: PPR repeat Pfam Description: PPR repeat
  misc_feature (1)..(572): Homolog of NCBI NO: 15223380 NR Description: hypothetical protein; protein id: At1g26900.1
  misc_feature (37)..(571): Homolog of NCBI NO: 11994419 NR Description: selenium-binding protein-like [Arabidopsis
  misc_feature (37)..(571): Homolog of NCBI NO: 15230593 NR Description: unknown protein; protein id: At3g12770.1
  misc_feature (23)..(570): Homolog of NCBI NO: 15229939 NR Description: hypothetical protein; protein id: At3g05240.1 thaliana] >gi|6729034|gb|AAF27030.1|AC009177_20 hypothetical
  misc_feature (259)..(572): Homolog of NCBI NO: 9759241 NR Description: gene_id:MNC17.11~pir||T04732~strong similarity to
  misc_feature (259)..(572): Homolog of NCBI NO: 15237835 NR Description: putative protein; protein id: At5g59200.1
  misc_feature (15)..(224): Homolog of NCBI NO: 9759241 NR Description: gene_id:MNC17.11~pir||T04732~strong similarity to
  misc_feature (15)..(224): Homolog of NCBI NO: 15237835 NR Description: putative protein; protein id: At5g59200.1
  misc_feature (31)..(562): Homolog of NCBI NO: 28558786 NR Description: selenium binding protein-like protein [Cucumis
  misc_feature (20)..(572): Homolog of NCBI NO: 18418348 NR Description: putative protein; protein id: At4g33990.1
MTLAITSRLRRNFVFRRRNLESLLSPQCQKLINDLRSCRDTVEVSRIHGYMVKTGLDKDDFAVSKLLAFSSVLDIRYASSIFEHVSNTNLFMFNTMIRGYSISDEPERAFSVFNQLRAKGLTLDRFSFITTLKSCSRELCVSIGEGLHGIALRSGFMVFTDLRNALIHFYCVCGKISDARKVFDEMPQSVDAVTFSTLMNGYLQVSKKALALDLFRIMRKSEVVVNVSTLLSFLSAISDLGDLSGAESAHVLCIKIGLDLDLHLITALIGMYGKTGGISSARRIFDCAIRKDVVTWNCMIDQYAKTGLLEECVWLLRQMKYEKMKPNSSTFVGLLSSCAYSEAAFVGRTVADLLEEERIALDAILGTALVDMYAKVGLLEKAVEIFNRMKDKDVKSWTAMISGYGAHGLAREAVTLFNKMEEENCKVRPNEITFLVVLNACSHGGLVMEGIRCFKRMVEAYSFTPKVEHYGCVVDLLGRAGQLEEAYELIRNLPITSDSTAWRALLAACRVYGNADLGESVMMRLAEMGETHPADAILLAGTHAVAGNPEKSLDNELNKGRKEAGYSAIEIE

SEQ ID NO: 86121 - protein, 522 aa, Arabidopsis thaliana
  peptide (1)..(522): Ceres Seq. ID no. 12686498
  misc_feature (244)..(278): Pfam Name: PPR repeat Pfam Description: PPR repeat
  misc_feature (1)..(522): Homolog of NCBI NO: 15223380 NR Description: hypothetical protein; protein id: At1g26900.1
  misc_feature (1)..(521): Homolog of NCBI NO: 11994419 NR Description: selenium-binding protein-like [Arabidopsis
  misc_feature (1)..(521): Homolog of NCBI NO: 15230593 NR Description: unknown protein; protein id: At3g12770.1
  misc_feature (1)..(520): Homolog of NCBI NO: 15229939 NR Description: hypothetical protein; protein id: At3g05240.1 thaliana] >gi|6729034|gb|AAF27030.1|AC009177_20 hypothetical
  misc_feature (209)..(522): Homolog of NCBI NO: 9759241 NR Description: gene_id:MNC17.11~pir||T04732~strong similarity to
  misc_feature (209)..(522): Homolog of NCBI NO: 15237835 NR Description: putative protein; protein id: At5g59200.1
  misc_feature (1)..(174): Homolog of NCBI NO: 9759241 NR Description: gene_id:MNC17.11~pir||T04732~strong similarity to
  misc_feature (1)..(174): Homolog of NCBI NO: 15237835 NR Description: putative protein; protein id: At5g59200.1
  misc_feature (1)..(512): Homolog of NCBI NO: 28558786 NR Description: selenium binding protein-like protein [Cucumis
  misc_feature (1)..(522): Homolog of NCBI NO: 18418348 NR Description: putative protein; protein id: At4g33990.1
MVKTGLDKDDFAVSKLLAFSSVLDIRYASSIFEHVSNTNLFMFNTMIRGYSISDEPERAFSVFNQLRAKGLTLDRFSFITTLKSCSRELCVSIGEGLHGIALRSGFMVFTDLRNALIHFYCVCGKISDARKVFDEMPQSVDAVTFSTLMNGYLQVSKKALALDLFRIMRKSEVVVNVSTLLSFLSAISDLGDLSGAESAHVLCIKIGLDLDLHLITALIGMYGKTGGISSARRIFDCAIRKDVVTWNCMIDQYAKTGLLEECVWLLRQMKYEKMKPNSSTFVGLLSSCAYSEAAFVGRTVADLLEEERIALDAILGTALVDMYAKVGLLEKAVEIFNRMKDKDVKSWTAMISGYGAHGLAREAVTLFNKMEEENCKVRPNEITFLVVLNACSHGGLVMEGIRCFKRMVEAYSFTPKVEHYGCVVDLLGRAGQLEEAYELIRNLPITSDSTAWRALLAACRVYGNADLGESVMMRLAEMGETHPADAILLAGTHAVAGNPEKSLDNELNKGRKEAGYSAIEIE

SEQ ID NO: 86122 - protein, 481 aa, Arabidopsis thaliana
  peptide (1)..(481): Ceres Seq. ID no. 12686499
  misc_feature (203)..(237): Pfam Name: PPR repeat Pfam Description: PPR repeat
  misc_feature (1)..(481): Homolog of NCBI NO: 15223380 NR Description: hypothetical protein; protein id: At1g26900.1
  misc_feature (1)..(480): Homolog of NCBI NO: 11994419 NR Description: selenium-binding protein-like [Arabidopsis
  misc_feature (1)..(480): Homolog of NCBI NO: 15230593 NR Description: unknown protein; protein id: At3g12770.1
  misc_feature (1)..(479): Homolog of NCBI NO: 15229939 NR Description: hypothetical protein; protein id: At3g05240.1 thaliana] >gi|6729034|gb|AAF27030.1|AC009177_20 hypothetical
  misc_feature (168)..(481): Homolog of NCBI NO: 9759241 NR Description: gene_id:MNC17.11~pir||T04732~strong similarity to
  misc_feature (168)..(481): Homolog of NCBI NO: 15237835 NR Description: putative protein; protein id: At5g59200.1
  misc_feature (1)..(133): Homolog of NCBI NO: 9759241 NR Description: gene_id:MNC17.11~pir||T04732~strong similarity to
  misc_feature (1)..(133): Homolog of NCBI NO: 15237835 NR Description: putative protein; protein id: At5g59200.1
  misc_feature (1)..(471): Homolog of NCBI NO: 28558786 NR Description: selenium binding protein-like protein [Cucumis
  misc_feature (1)..(481): Homolog of NCBI NO: 18418348 NR Description: putative protein; protein id: At4g33990.1
MFNTMIRGYSISDEPERAFSVFNQLRAKGLTLDRFSFITTLKSCSRELCVSIGEGLHGIALRSGFMVFTDLRNALIHFYCVCGKISDARKVFDEMPQSVDAVTFSTLMNGYLQVSKKALALDLFRIMRKSEVVVNVSTLLSFLSAISDLGDLSGAESAHVLCIKIGLDLDLHLITALIGMYGKTGGISSARRIFDCAIRKDVVTWNCMIDQYAKTGLLEECVWLLRQMKYEKMKPNSSTFVGLLSSCAYSEAAFVGRTVADLLEEERIALDAILGTALVDMYAKVGLLEKAVEIFNRMKDKDVKSWTAMISGYGAHGLAREAVTLFNKMEEENCKVRPNEITFLVVLNACSHGGLVMEGIRCFKRMVEAYSFTPKVEHYGCVVDLLGRAGQLEEAYELIRNLPITSDSTAWRALLAACRVYGNADLGESVMMRLAEMGETHPADAILLAGTHAVAGNPEKSLDNELNKGRKEAGYSAIEIE

SEQ ID NO: 86123 - DNA, 1362 bp, Arabidopsis thaliana
  misc_feature (1)..(1362): Ceres Seq. ID no. 12686500
  misc_feature: MA Experiment ID: 20000173 Result: Up-regulated in Transcription
  misc_feature: MA Experiment 20000173 PARAMETER Experiment Name: At_42deg_Heat_P Parameter: Age (day) Value: 14
  misc_feature: MA Experiment 20000173 PARAMETER Experiment Name: At_42deg_Heat_P Parameter: Organism Value: A. thaliana
  misc_feature: MA Experiment 20000173 PARAMETER Experiment Name: At_42deg_Heat_P Parameter: Plant Line Value: WS
  misc_feature: MA Experiment 20000173 PARAMETER Experiment Name: At_42deg_Heat_P Parameter: Temperature (deg C) Value: 42 vs. 22
  misc_feature: MA Experiment 20000173 PARAMETER Experiment Name: At_42deg_Heat_P Parameter: Timepoint (hr) Value: 6
  misc_feature: MA Experiment 20000173 PARAMETER Experiment Name: At_42deg_Heat_P Parameter: Tissue Value: Aerial
atgggaaattgctttgggttttccgcaaaagtaggtaatagagaaagtccttatcgtggttcgtcaagaatctctgccaaaagaagtcaatcgtctcggctttcaagcttaacaatacaatcatcatcttacaacgatgacacgagtgtggcgtctcttcaaacgcctagaagtgaaggagagctcttagcatcgcccacgctaaaggcatttacgtttaacgagctaaagacagccactaggaatttcagacccgatagtgttatcggtgaaggcggtttcggttatgtctacaaaggatggatcgatgaacgcactttatcgccttcaaaaccagggtcaggcatggtcgttgctgtcaaaaagcttaaagaagaagggtttcaaggacacaggcagtggttggcggaggttgattgtcttgggaggcttcaccatatgaatcttgtgaaactaattggatattgctcgaagggtgatcatattcggcttttggtgtatgagtacatgccaaagggaagcttggagaatcatctctttagacgtaagaaaacttgtctctcaagtaaagatcaatgctcaaattatctcgagagcctttgcgaatgtgatagcaagattcaaatgtatagttgttattgtataacagatttagaaaatttagttggtggggcagaaccgattccgtggagaacaaggattaaagtggctatcggtgcggcgagagggcttgctttccttcatgaagctcaagtcatatacagagacttcaaggcctccaatattctacttgattcggaattcaatgcaaagctttctgattttggattggcgaaagtaggaccaaccggagacagaacacacgtatcaacccaagtgatgggaactcaaggctatgcagcacctgaatacgttgccactggtcggataacagccaaaagtgacgtctacagcttcggtgtggtcttgctagagttactgtcgggacgtctgaccgtagacaaaacgaaagtaggagtggaacgaaatctggttgattgggcaataccttacttaggagacaaaaggaaagtgtttaggataatggacacaaagcttgggggacaatatcctcacaaaggagcttgtttgactgctaatactgcgttgcaatgtcttaatcaagaacctaagttgaggccaaagatgtctgatgtgttatctactcttgaagagttggagatgacgttgaagtcgggttctatttcaaactcggttatgaaattgacatcttcttcctcttctttcacggcgaaacagagagtaagaactccggttgctgatccggtgttgtctagtagacgatgtcgacgtgttcggtga

SEQ ID NO: 86124 - protein, 453 aa, Arabidopsis thaliana
  peptide (1)..(453): Ceres Seq. ID no. 12686501
  misc_feature (1)..(453): Homolog of NCBI NO: 25287598 NR Description: protein T7N9.2 [imported] - Arabidopsis thaliana
  misc_feature (224)..(453): Homolog of NCBI NO: 15223401 NR Description: protein kinase, putative; protein id: At1g26970.1
  misc_feature (116)..(182): Homolog of NCBI NO: 15223401 NR Description: protein kinase, putative; protein id: At1g26970.1
  misc_feature (202)..(427): Homolog of NCBI NO: 15222454 NR Description: putative protein kinase; protein id: At1g69790.1
  misc_feature (20)..(182): Homolog of NCBI NO: 15222454 NR Description: putative protein kinase; protein id: At1g69790.1
  misc_feature (197)..(444): Homolog of NCBI NO: 15227042 NR Description: putative protein kinase; protein id: At2g02800.1, by cDNA: gi_16226562, supported by cDNA: gi_2852448 [Arabidopsis
  misc_feature (1)..(182): Homolog of NCBI NO: 15227042 NR Description: putative protein kinase; protein id: At2g02800.1, by cDNA: gi_16226562, supported by cDNA: gi_2852448 [Arabidopsis
  misc_feature (197)..(444): Homolog of NCBI NO: 26449871 NR Description: putative protein kinase [Arabidopsis thaliana]
  misc_feature (1)..(182): Homolog of NCBI NO: 26449871 NR Description: putative protein kinase [Arabidopsis thaliana]
  misc_feature (197)..(453): Homolog of NCBI NO: 15223723 NR Description: protein kinase; protein id: At1g14370.1, by cDNA: gi_12248034, supported by cDNA: gi_16649048, supported
MGNCFGFSAKVGNRESPYRGSSRISAKRSQSSRLSSLTIQSSSYNDDTSVASLQTPRSEGELLASPTLKAFTFNELKTATRNFRPDSVIGEGGFGYVYKGWIDERTLSPSKPGSGMVVAVKKLKEEGFQGHRQWLAEVDCLGRLHHMNLVKLIGYCSKGDHIRLLVYEYMPKGSLENHLFRRKKTCLSSKDQCSNYLESLCECDSKIQMYSCYCITDLENLVGGAEPIPWRTRIKVAIGAARGLAFLHEAQVIYRDFKASNILLDSEFNAKLSDFGLAKVGPTGDRTHVSTQVMGTQGYAAPEYVATGRITAKSDVYSFGVVLLELLSGRLTVDKTKVGVERNLVDWAIPYLGDKRKVFRIMDTKLGGQYPHKGACLTANTALQCLNQEPKLRPKMSDVLSTLEELEMTLKSGSISNSVMKLTSSSSSFTAKQRVRTPVADPVLSSRRCRRVR

SEQ ID NO: 86125 - protein, 338 aa, Arabidopsis thaliana
  peptide (1)..(338): Ceres Seq. ID no. 12686502
  misc_feature (1)..(338): Homolog of NCBI NO: 25287598 NR Description: protein T7N9.2 [imported] - Arabidopsis thaliana
  misc_feature (109)..(338): Homolog of NCBI NO: 15223401 NR Description: protein kinase, putative; protein id: At1g26970.1
  misc_feature (1)..(67): Homolog of NCBI NO: 15223401 NR Description: protein kinase, putative; protein id: At1g26970.1
  misc_feature (87)..(312): Homolog of NCBI NO: 15222454 NR Description: putative protein kinase; protein id: At1g69790.1
  misc_feature (1)..(67): Homolog of NCBI NO: 15222454 NR Description: putative protein kinase; protein id: At1g69790.1
  misc_feature (82)..(329): Homolog of NCBI NO: 15227042 NR Description: putative protein kinase; protein id: At2g02800.1, by cDNA: gi_16226562, supported by cDNA: gi_2852448 [Arabidopsis
  misc_feature (1)..(67): Homolog of NCBI NO: 15227042 NR Description: putative protein kinase; protein id: At2g02800.1, by cDNA: gi_16226562, supported by cDNA: gi_2852448 [Arabidopsis
  misc_feature (82)..(329): Homolog of NCBI NO: 26449871 NR Description: putative protein kinase [Arabidopsis thaliana]
  misc_feature (1)..(67): Homolog of NCBI NO: 26449871 NR Description: putative protein kinase [Arabidopsis thaliana]
  misc_feature (82)..(338): Homolog of NCBI NO: 15223723 NR Description: protein kinase; protein id: At1g14370.1, by cDNA: gi_12248034, supported by cDNA: gi_16649048, supported
MVVAVKKLKEEGFQGHRQWLAEVDCLGRLHHMNLVKLIGYCSKGDHIRLLVYEYMPKGSLENHLFRRKKTCLSSKDQCSNYLESLCECDSKIQMYSCYCITDLENLVGGAEPIPWRTRIKVAIGAARGLAFLHEAQVIYRDFKASNILLDSEFNAKLSDFGLAKVGPTGDRTHVSTQVMGTQGYAAPEYVATGRITAKSDVYSFGVVLLELLSGRLTVDKTKVGVERNLVDWAIPYLGDKRKVFRIMDTKLGGQYPHKGACLTANTALQCLNQEPKLRPKMSDVLSTLEELEMTLKSGSISNSVMKLTSSSSSFTAKQRVRTPVADPVLSSRRCRRVR

SEQ ID NO: 86126 - protein, 307 aa, Arabidopsis thaliana
  peptide (1)..(307): Ceres Seq. ID no. 12686503
  misc_feature (1)..(307): Homolog of NCBI NO: 25287598 NR Description: protein T7N9.2 [imported] - Arabidopsis thaliana
  misc_feature (78)..(307): Homolog of NCBI NO: 15223401 NR Description: protein kinase, putative; protein id: At1g26970.1
  misc_feature (1)..(36): Homolog of NCBI NO: 15223401 NR Description: protein kinase, putative; protein id: At1g26970.1
  misc_feature (56)..(281): Homolog of NCBI NO: 15222454 NR Description: putative protein kinase; protein id: At1g69790.1
  misc_feature (1)..(36): Homolog of NCBI NO: 15222454 NR Description: putative protein kinase; protein id: At1g69790.1
  misc_feature (51)..(298): Homolog of NCBI NO: 15227042 NR Description: putative protein kinase; protein id: At2g02800.1, by cDNA: gi_16226562, supported by cDNA: gi_2852448 [Arabidopsis
  misc_feature (1)..(36): Homolog of NCBI NO: 15227042 NR Description: putative protein kinase; protein id: At2g02800.1, by cDNA: gi_16226562, supported by cDNA: gi_2852448 [Arabidopsis
  misc_feature (51)..(298): Homolog of NCBI NO: 26449871 NR Description: putative protein kinase [Arabidopsis thaliana]
  misc_feature (1)..(36): Homolog of NCBI NO: 26449871 NR Description: putative protein kinase [Arabidopsis thaliana]
  misc_feature (51)..(307): Homolog of NCBI NO: 15223723 NR Description: protein kinase; protein id: At1g14370.1, by cDNA: gi_12248034, supported by cDNA: gi_16649048, supported
MNLVKLIGYCSKGDHIRLLVYEYMPKGSLENHLFRRKKTCLSSKDQCSNYLESLCECDSKIQMYSCYCITDLENLVGGAEPIPWRTRIKVAIGAARGLAFLHEAQVIYRDFKASNILLDSEFNAKLSDFGLAKVGPTGDRTHVSTQVMGTQGYAAPEYVATGRITAKSDVYSFGVVLLELLSGRLTVDKTKVGVERNLVDWAIPYLGDKRKVFRIMDTKLGGQYPHKGACLTANTALQCLNQEPKLRPKMSDVLSTLEELEMTLKSGSISNSVMKLTSSSSSFTAKQRVRTPVADPVLSSRRCRRVR

SEQ ID NO: 86127 - DNA, 1326 bp, Arabidopsis thaliana
  misc_feature (1)..(1326): Ceres Seq. ID no. 12686516
  misc_feature: MA Experiment ID: 20000496 Result: Up-regulated in Transcription
  misc_feature: MA Experiment 20000496 PARAMETER Experiment Name: At_Guard_Cells_P Parameter: Harvest Date Value: 7/19/2002
  misc_feature: MA Experiment 20000496 PARAMETER Experiment Name: At_Guard_Cells_P Parameter: Organism Value: Canola
  misc_feature: MA Experiment 20000496 PARAMETER Experiment Name: At_Guard_Cells_P Parameter: Tissue Value: Guard Cells vs. Leaves
  misc_feature: MA Experiment ID: 20001557 Result: Down-regulated in Transcription
  misc_feature: MA Experiment 20001557 PARAMETER Experiment Name: At_Drought_Soil_Dry_P Parameter: Age (day) Value: 27
  misc_feature: MA Experiment 20001557 PARAMETER Experiment Name: At_Drought_Soil_Dry_P Parameter: Organism Value: A. thaliana
  misc_feature: MA Experiment 20001557 PARAMETER Experiment Name: At_Drought_Soil_Dry_P Parameter: Plant Line Value: WS
  misc_feature: MA Experiment 20001557 PARAMETER Experiment Name: At_Drought_Soil_Dry_P Parameter: Post Timepoint (hr) Value: 3
  misc_feature: MA Experiment 20001557 PARAMETER Experiment Name: At_Drought_Soil_Dry_P Parameter: Post-Treatment Value: Re-Water vs. No Drought
  misc_feature: MA Experiment 20001557 PARAMETER Experiment Name: At_Drought_Soil_Dry_P Parameter: Timepoint (day) Value: 13
  misc_feature: MA Experiment 20001557 PARAMETER Experiment Name: At_Drought_Soil_Dry_P Parameter: Treatment Value: Drought vs. No Drought
atggccgaacacggtgagactcaagctgatgaagaagaagaagaacaagtatggagctggggtgctggtacggacggacagttagggacgacaaagctgcaagacgagcttcttccgcagcttctctctctgacatcacttccttccatatcaatgctcgcttgtggcggcgctcacgtcatcgctttgacttctggtaaacctcccaaaatctctctgatcaaaggaatgttgttggttttagtccaagtaaacattttaattatgctttttgcaggtggtaaagtcttcacatggggaagaggaagctctggtcagttaggacatggagacatcctcaacattactttgccaaagcttgtatctttctttgacgactctgttattactcaagctgctgctggatggagtcattctggttttgtttcagattctggttgtattttcacatgtggcaatggctcgtttgggcagcttggtcatggtgataccttgtcattaagcactccagctaaagtctctcactttaacaatgacagtgtgaagatggtagcttgtggtatgcgccactcacttgttttgtttgcagggaatcaagtgtgtggatttggatctggaaaacgtggacagttaggtttctcatcagacagaataaaatcagtaaatcttccttgtgttgtctctggattaaaagatgttgaggttgttcgtatatcagctaatggagatcatagtgcagctatatccgctgatggacagttcttcagttggggaagaggattctgcggcggccctgatgttcatgcccctcagagcttgccttcacctctatctttcagagaagttgctgtaggatggaatcatgctttactactgaccgtcgatggtgaggtgttcaagcttggtagcactcttaataaacaacctgagaagcaacaactgcaaatagattcctctgaagctctctttgagaaagttccggattttgatggagttaaagttatgcagatagcagcaggagcagagcattctgctgccgtaacaggtaaaaggggaggggcaattctgttatttctttcttctttacactcagctaatataaaacaaacaacctttgaatgtcttgcagagaatggagaagttaagacatggggatggggagaacatggtcagctaggccttggaaataccaatgaccaaaccagtcctgaattggtgagcttaggaagtatagacctgcgaacgaaagagatcaaagtatattgcggaagtggatttacttatgcagtaaaacgaaaacaagagctttcaccaacctcgtcatag

SEQ ID NO: 86128 - protein, 441 aa, Arabidopsis thaliana
  peptide (1)..(441): Ceres Seq. ID no. 12686517
  misc_feature (378)..(430): Pfam Name: Regulator of chromosome condensation (RCC1) Pfam Description: Regulator of chromosome condensation (RCC1)
  misc_feature (1)..(441): Homolog of NCBI NO: 25403283 NR Description: protein T7N9.12 [imported] - Arabidopsis thaliana
  misc_feature (87)..(348): Homolog of NCBI NO: 15223423 NR Description: hypothetical protein; protein id: At1g27060.1
  misc_feature (375)..(441): Homolog of NCBI NO: 15223423 NR Description: hypothetical protein; protein id: At1g27060.1
  misc_feature (1)..(66): Homolog of NCBI NO: 15223423 NR Description: hypothetical protein; protein id: At1g27060.1
  misc_feature (88)..(430): Homolog of NCBI NO: 34910046 NR Description: P0413G02.24 [Oryza sativa (japonica
  misc_feature (9)..(65): Homolog of NCBI NO: 34910046 NR Description: P0413G02.24 [Oryza sativa (japonica
  misc_feature (95)..(326): Homolog of NCBI NO: 15223423 NR Description: hypothetical protein; protein id: At1g27060.1
  misc_feature (55)..(174): Homolog of NCBI NO: 15223423 NR Description: hypothetical protein; protein id: At1g27060.1
  misc_feature (375)..(426): Homolog of NCBI NO: 15223423 NR Description: hypothetical protein; protein id: At1g27060.1
  misc_feature (16)..(59): Homolog of NCBI NO: 15223423 NR Description: hypothetical protein; protein id: At1g27060.1
MAEHGETQADEEEEEQVWSWGAGTDGQLGTTKLQDELLPQLLSLTSLPSISMLACGGAHVIALTSGKPPKISLIKGMLLVLVQVNILIMLFAGGKVFTWGRGSSGQLGHGDILNITLPKLVSFFDDSVITQAAAGWSHSGFVSDSGCIFTCGNGSFGQLGHGDTLSLSTPAKVSHFNNDSVKMVACGMRHSLVLFAGNQVCGFGSGKRGQLGFSSDRIKSVNLPCVVSGLKDVEVVRISANGDHSAAISADGQFFSWGRGFCGGPDVHAPQSLPSPLSFREVAVGWNHALLLTVDGEVFKLGSTLNKQPEKQQLQIDSSEALFEKVPDFDGVKVMQIAAGAEHSAAVTGKRGGAILLFLSSLHSANIKQTTFECLAENGEVKTWGWGEHGQLGLGNTNDQTSPELVSLGSIDLRTKEIKVYCGSGFTYAVKRKQELSPTSS

SEQ ID NO: 86129 - protein, 390 aa, Arabidopsis thaliana
  peptide (1)..(390): Ceres Seq. ID no. 12686518
  misc_feature (327)..(379): Pfam Name: Regulator of chromosome condensation (RCC1) Pfam Description: Regulator of chromosome condensation (RCC1)
  misc_feature (1)..(390): Homolog of NCBI NO: 25403283 NR Description: protein T7N9.12 [imported] - Arabidopsis thaliana
  misc_feature (36)..(297): Homolog of NCBI NO: 15223423 NR Description: hypothetical protein; protein id: At1g27060.1
  misc_feature (324)..(390): Homolog of NCBI NO: 15223423 NR Description: hypothetical protein; protein id: At1g27060.1
  misc_feature (1)..(15): Homolog of NCBI NO: 15223423 NR Description: hypothetical protein; protein id: At1g27060.1
  misc_feature (37)..(379): Homolog of NCBI NO: 34910046 NR Description: P0413G02.24 [Oryza sativa (japonica
  misc_feature (1)..(14): Homolog of NCBI NO: 34910046 NR Description: P0413G02.24 [Oryza sativa (japonica
  misc_feature (44)..(275): Homolog of NCBI NO: 15223423 NR Description: hypothetical protein; protein id: At1g27060.1
  misc_feature (4)..(123): Homolog of NCBI NO: 15223423 NR Description: hypothetical protein; protein id: At1g27060.1
  misc_feature (324)..(375): Homolog of NCBI NO: 15223423 NR Description: hypothetical protein; protein id: At1g27060.1
  misc_feature (43)..(90): Homolog of NCBI NO: 15223423 NR Description: hypothetical protein; protein id: At1g27060.1
MLACGGAHVIALTSGKPPKISLIKGMLLVLVQVNILIMLFAGGKVFTWGRGSSGQLGHGDILNITLPKLVSFFDDSVITQAAAGWSHSGFVSDSGCIFTCGNGSFGQLGHGDTLSLSTPAKVSHFNNDSVKMVACGMRHSLVLFAGNQVCGFGSGKRGQLGFSSDRIKSVNLPCVVSGLKDVEVVRISANGDHSAAISADGQFFSWGRGFCGGPDVHAPQSLPSPLSFREVAVGWNHALLLTVDGEVFKLGSTLNKQPEKQQLQIDSSEALFEKVPDFDGVKVMQIAAGAEHSAAVTGKRGGAILLFLSSLHSANIKQTTFECLAENGEVKTWGWGEHGQLGLGNTNDQTSPELVSLGSIDLRTKEIKVYCGSGFTYAVKRKQELSPTSS

SEQ ID NO: 86130 - protein, 365 aa, Arabidopsis thaliana
  peptide (1)..(365): Ceres Seq. ID no. 12686519
  misc_feature (302)..(354): Pfam Name: Regulator of chromosome condensation (RCC1) Pfam Description: Regulator of chromosome condensation (RCC1)
  misc_feature (1)..(365): Homolog of NCBI NO: 25403283 NR Description: protein T7N9.12 [imported] - Arabidopsis thaliana
  misc_feature (11)..(272): Homolog of NCBI NO: 15223423 NR Description: hypothetical protein; protein id: At1g27060.1
  misc_feature (299)..(365): Homolog of NCBI NO: 15223423 NR Description: hypothetical protein; protein id: At1g27060.1
  misc_feature (12)..(354): Homolog of NCBI NO: 34910046 NR Description: P0413G02.24 [Oryza sativa (japonica
  misc_feature (19)..(250): Homolog of NCBI NO: 15223423 NR Description: hypothetical protein; protein id: At1g27060.1
  misc_feature (1)..(98): Homolog of NCBI NO: 15223423 NR Description: hypothetical protein; protein id: At1g27060.1
  misc_feature (299)..(350): Homolog of NCBI NO: 15223423 NR Description: hypothetical protein; protein id: At1g27060.1
  misc_feature (18)..(65): Homolog of NCBI NO: 15223423 NR Description: hypothetical protein; protein id: At1g27060.1
  misc_feature (18)..(299): Homolog of NCBI NO: 4557026 NR Description: guanine nucleotide exchange factor p532 [Homo
  misc_feature (299)..(331): Homolog of NCBI NO: 4557026 NR Description: guanine nucleotide exchange factor p532 [Homo
MLLVLVQVNILIMLFAGGKVFTWGRGSSGQLGHGDILNITLPKLVSFFDDSVITQAAAGWSHSGFVSDSGCIFTCGNGSFGQLGHGDTLSLSTPAKVSHFNNDSVKMVACGMRHSLVLFAGNQVCGFGSGKRGQLGFSSDRIKSVNLPCVVSGLKDVEVVRISANGDHSAAISADGQFFSWGRGFCGGPDVHAPQSLPSPLSFREVAVGWNHALLLTVDGEVFKLGSTLNKQPEKQQLQIDSSEALFEKVPDFDGVKVMQIAAGAEHSAAVTGKRGGAILLFLSSLHSANIKQTTFECLAENGEVKTWGWGEHGQLGLGNTNDQTSPELVSLGSIDLRTKEIKVYCGSGFTYAVKRKQELSPTSS

SEQ ID NO: 86131 - DNA, 2103 bp, Arabidopsis thaliana
  misc_feature (1)..(2103): Ceres Seq. ID no. 12686528
  misc_feature: MA Experiment ID: 20000234 Result: Up-regulated in Transcription
  misc_feature: MA Experiment 20000234 PARAMETER Experiment Name: At_Siliques_P Parameter: Age (day) Value: 21
  misc_feature: MA Experiment 20000234 PARAMETER Experiment Name: At_Siliques_P Parameter: Organism Value: A. thaliana
  misc_feature: MA Experiment 20000234 PARAMETER Experiment Name: At_Siliques_P Parameter: Plant Line Value: WS
  misc_feature: MA Experiment 20000234 PARAMETER Experiment Name: At_Siliques_P Parameter: Tissue Value: Less Than 5mm Siliques vs. Whole Plant
  misc_feature: MA Experiment ID: 20000235 Result: Up-regulated in Transcription
  misc_feature: MA Experiment 20000235 PARAMETER Experiment Name: At_Siliques_P Parameter: Age (day) Value: 21
  misc_feature: MA Experiment 20000235 PARAMETER Experiment Name: At_Siliques_P Parameter: Organism Value: A. thaliana
  misc_feature: MA Experiment 20000235 PARAMETER Experiment Name: At_Siliques_P Parameter: Plant Line Value: WS
  misc_feature: MA Experiment 20000235 PARAMETER Experiment Name: At_Siliques_P Parameter: Tissue Value: 5-10mm Siliques vs. Whole Plant
atgggagttgttgagaatcggaaaattttgccagagaaaaaacttggaggctggagagccattacgttcatcctaggtatgttctttctttccatttcgtttcttccaataatgtttttttctttgaagagaattattaatcttccatttgcctcaaatattcatatgataacaaacagtcaatcaaagttaaaaatatatacgtttcataactatgattctctaaatttaaatttcattgacaatacctacaatgatatgccatcacttttttctttcctaatcggtagttgtgtccaacaccatgctaatatcatgactcatgagcacactaaacttcttttgcgagtcatgcaattcaataatctaagaaaatatatagtagcaatagaaatggaatcagaaatcaaattatctgatttcaagtttatattttcgaccgtttcaagtaatgagacgttggagaagttaggatcgattggagtatcagcaaattttatgttgtatttgaggaatgtgtttcacatggagccagtagaagcttttaacgtatactacttgtggatgggtctcactaactttgctccactcctcggcgcattaatctccgacgcctacattggccgtttcaagaccatcgcttacgcatccctcttctcaattctaggactaatgacggtgacactcaccgcctgcctgcctcaactccacccaccaccgtgcaacaaccctcatccagacgaatgcgacgatccgaacaagctccagctcgggattctattcctcggtctcggctttctctccatcggtagcggcggaatccggccttgcagcattccattcggagttgatcagtttgaccaacgaacagagcaaggccttaaaggagtggccagtttctttaattggtactacttgaccttaactatggttctcatcttttcgcataccgttgtggtctacttacagactgtcagttgggtcatcgggtttagcatcccgactagtttaatggcttgtgcagtggttctgttctttgtcggtatgcggttttacgtatatgtcaaaccggaaggtagtgtattctctggtattgctcgggtcatcgtggcagctcgtaagaaacgggacctcaaaatttcgcttgtggacgatgggactgaggagtattatgagccgccggtgaaacctggcgtgttatccaagttacctcttactgaccaattcaagtttctggacaaagctgcggtgatactagacggtgatcttacatctgaaggagttccggcaaataagtggcggctatgtagcatccaagaagttgaagaggtcaagtgcctgatcagagttgttccggtttggtctgctggaataatttcaatcgttgcaatgaccacgcaagcaactttcatggtctttcaagctacaaaaatggatcgacacatgggtccacactttgagatcccggccgcctccataaccgtcatttcttacatcactataggcatttgggtgcctatctacgaacacctcttagtcccgttcctttggcgaatgagaaagttcagggtcactctccttcaacggatggggatagggatcgtcttcgccattctctccatgttcactgcagggtttgtagagggagtgaggcggacacgggctactgaaatgactcaaatgtcggtgttttggctggctttgccactgattctgatggggctctgcgagtcatttaatttcattggactgatcgagttcttcaacagtcagtttccagagcacatgagaagcatagcgaattcgctatttccactctcatttgctgcagctaattatctgagcagtctgctggtgaccaccgtgcataaagtctcaggcacaaaagaccaccctgactggctgaacaaggaccttgatagagggaagttggactacttctactatctgattgccgttttgggtgtggttaaccttgtgtatttctggtactgtgcccatagataccagtataaagccggttcgcaaattgaagatttcaatgaggagaagtctcttctagacatcgaaccaaaccagagacacgatcaatctccaagttag

SEQ ID NO: 86132 - protein, 700 aa, Arabidopsis thaliana
  peptide (1)..(700): Ceres Seq. ID no. 12686529
  misc_feature (210)..(608): Pfam Name: POT family Pfam Description: POT family
  misc_feature (176)..(700): Homolog of NCBI NO: 15223425 NR Description: peptide transporter, putative; protein id:
  misc_feature (146)..(690): Homolog of NCBI NO: 18409391 NR Description: putative peptide transporter; protein id: supported by cDNA: 22243., supported by cDNA: gi_19699103 thaliana] >gi|19699104|gb|AAL90918.1| At1g69870/T17F3_10
  misc_feature (223)..(690): Homolog of NCBI NO: 25404847 NR Description: probable peptide transporter T17F3.10 [imported] Arabidopsis thaliana >gi|12325237|gb|AAG52567.1|AC010675_15
  misc_feature (146)..(222): Homolog of NCBI NO: 25404847 NR Description: probable peptide transporter T17F3.10 [imported] Arabidopsis thaliana >gi|12325237|gb|AAG52567.1|AC010675_15
  misc_feature (147)..(675): Homolog of NCBI NO: 34906908 NR Description: putative peptide transporter [Oryza sativa
  misc_feature (148)..(672): Homolog of NCBI NO: 15222484 NR Description: putative peptide transporter; protein id: [Arabidopsis thaliana] >gi|25404845|pir||H96720 probable peptide
  misc_feature (122)..(689): Homolog of NCBI NO: 34394552 NR Description: putative nitrate transporter NRT1-5 [Oryza sativa
MGVVENRKILPEKKLGGWRAITFILGMFFLSISFLPIMFFSLKRIINLPFASNIHMITNSQSKLKIYTFHNYDSLNLNFIDNTYNDMPSLFSFLIGSCVQHHANIMTHEHTKLLLRVMQFNNLRKYIVAIEMESEIKLSDFKFIFSTVSSNETLEKLGSIGVSANFMLYLRNVFHMEPVEAFNVYYLWMGLTNFAPLLGALISDAYIGRFKTIAYASLFSILGLMTVTLTACLPQLHPPPCNNPHPDECDDPNKLQLGILFLGLGFLSIGSGGIRPCSIPFGVDQFDQRTEQGLKGVASFFNWYYLTLTMVLIFSHTVVVYLQTVSWVIGFSIPTSLMACAVVLFFVGMRFYVYVKPEGSVFSGIARVIVAARKKRDLKISLVDDGTEEYYEPPVKPGVLSKLPLTDQFKFLDKAAVILDGDLTSEGVPANKWRLCSIQEVEEVKCLIRVVPVWSAGIISIVAMTTQATFMVFQATKMDRHMGPHFEIPAASITVISYITIGIWVPIYEHLLVPFLWRMRKFRVTLLQRMGIGIVFAILSMFTAGFVEGVRRTRATEMTQMSVFWLALPLILMGLCESFNFIGLIEFFNSQFPEHMRSIANSLFPLSFAAANYLSSLLVTTVHKVSGTKDHPDWLNKDLDRGKLDYFYYLIAVLGVVNLVYFWYCAHRYQYKAGSQIEDFNEEKSLLDIEPNQRHDQSPS

SEQ ID NO: 86133 - protein, 674 aa, Arabidopsis thaliana
  peptide (1)..(674): Ceres Seq. ID no. 12686530
  misc_feature (184)..(582): Pfam Name: POT family Pfam Description: POT family
  misc_feature (150)..(674): Homolog of NCBI NO: 15223425 NR Description: peptide transporter, putative; protein id:
  misc_feature (120)..(664): Homolog of NCBI NO: 18409391 NR Description: putative peptide transporter; protein id: supported by cDNA: 22243., supported by cDNA: gi_19699103 thaliana] >gi|19699104|gb|AAL90918.1| At1g69870/T17F3_10
  misc_feature (197)..(664): Homolog of NCBI NO: 25404847 NR Description: probable peptide transporter T17F3.10 [imported] Arabidopsis thaliana >gi|12325237|gb|AAG52567.1|AC010675_15
  misc_feature (120)..(196): Homolog of NCBI NO: 25404847 NR Description: probable peptide transporter T17F3.10 [imported] Arabidopsis thaliana >gi|12325237|gb|AAG52567.1|AC010675_15
  misc_feature (121)..(649): Homolog of NCBI NO: 34906908 NR Description: putative peptide transporter [Oryza sativa
  misc_feature (122)..(646): Homolog of NCBI NO: 15222484 NR Description: putative peptide transporter; protein id: [Arabidopsis thaliana] >gi|25404845|pir||H96720 probable peptide
  misc_feature (96)..(663): Homolog of NCBI NO: 34394552 NR Description: putative nitrate transporter NRT1-5 [Oryza sativa
MFFLSISFLPIMFFSLKRIINLPFASNIHMITNSQSKLKIYTFHNYDSLNLNFIDNTYNDMPSLFSFLIGSCVQHHANIMTHEHTKLLLRVMQFNNLRKYIVAIEMESEIKLSDFKFIFSTVSSNETLEKLGSIGVSANFMLYLRNVFHMEPVEAFNVYYLWMGLTNFAPLLGALISDAYIGRFKTIAYASLFSILGLMTVTLTACLPQLHPPPCNNPHPDECDDPNKLQLGILFLGLGFLSIGSGGIRPCSIPFGVDQFDQRTEQGLKGVASFFNWYYLTLTMVLIFSHTVVVYLQTVSWVIGFSIPTSLMACAVVLFFVGMRFYVYVKPEGSVFSGIARVIVAARKKRDLKISLVDDGTEEYYEPPVKPGVLSKLPLTDQFKFLDKAAVILDGDLTSEGVPANKWRLCSIQEVEEVKCLIRVVPVWSAGIISIVAMTTQATFMVFQATKMDRHMGPHFEIPAASITVISYITIGIWVPIYEHLLVPFLWRMRKFRVTLLQRMGIGIVFAILSMFTAGFVEGVRRTRATEMTQMSVFWLALPLILMGLCESFNFIGLIEFFNSQFPEHMRSIANSLFPLSFAAANYLSSLLVTTVHKVSGTKDHPDWLNKDLDRGKLDYFYYLIAVLGVVNLVYFWYCAHRYQYKAGSQIEDFNEEKSLLDIEPNQRHDQSPS

SEQ ID NO: 86134 - protein, 663 aa, Arabidopsis thaliana
  peptide (1)..(663): Ceres Seq. ID no. 12686531
  misc_feature (173)..(571): Pfam Name: POT family Pfam Description: POT family
  misc_feature (139)..(663): Homolog of NCBI NO: 15223425 NR Description: peptide transporter, putative; protein id:
  misc_feature (109)..(653): Homolog of NCBI NO: 18409391 NR Description: putative peptide transporter; protein id: supported by cDNA: 22243., supported by cDNA: gi_19699103 thaliana] >gi|19699104|gb|AAL90918.1| At1g69870/T17F3_10
  misc_feature (186)..(653): Homolog of NCBI NO: 25404847 NR Description: probable peptide transporter T17F3.10 [imported] Arabidopsis thaliana >gi|12325237|gb|AAG52567.1|AC010675_15
  misc_feature (109)..(185): Homolog of NCBI NO: 25404847 NR Description: probable peptide transporter T17F3.10 [imported] Arabidopsis thaliana >gi|12325237|gb|AAG52567.1|AC010675_15
  misc_feature (110)..(638): Homolog of NCBI NO: 34906908 NR Description: putative peptide transporter [Oryza sativa
  misc_feature (111)..(635): Homolog of NCBI NO: 15222484 NR Description: putative peptide transporter; protein id: [Arabidopsis thaliana] >gi|25404845|pir||H96720 probable peptide
  misc_feature (85)..(652): Homolog of NCBI NO: 34394552 NR Description: putative nitrate transporter NRT1-5 [Oryza sativa
MFFSLKRIINLPFASNIHMITNSQSKLKIYTFHNYDSLNLNFIDNTYNDMPSLFSFLIGSCVQHHANIMTHEHTKLLLRVMQFNNLRKYIVAIEMESEIKLSDFKFIFSTVSSNETLEKLGSIGVSANFMLYLRNVFHMEPVEAFNVYYLWMGLTNFAPLLGALISDAYIGRFKTIAYASLFSILGLMTVTLTACLPQLHPPPCNNPHPDECDDPNKLQLGILFLGLGFLSIGSGGIRPCSIPFGVDQFDQRTEQGLKGVASFFNWYYLTLTMVLIFSHTVVVYLQTVSWVIGFSIPTSLMACAVVLFFVGMRFYVYVKPEGSVFSGIARVIVAARKKRDLKISLVDDGTEEYYEPPVKPGVLSKLPLTDQFKFLDKAAVILDGDLTSEGVPANKWRLCSIQEVEEVKCLIRVVPVWSAGIISIVAMTTQATFMVFQATKMDRHMGPHFEIPAASITVISYITIGIWVPIYEHLLVPFLWRMRKFRVTLLQRMGIGIVFAILSMFTAGFVEGVRRTRATEMTQMSVFWLALPLILMGLCESFNFIGLIEFFNSQFPEHMRSIANSLFPLSFAAANYLSSLLVTTVHKVSGTKDHPDWLNKDLDRGKLDYFYYLIAVLGVVNLVYFWYCAHRYQYKAGSQIEDFNEEKSLLDIEPNQRHDQSPS

SEQ ID NO: 86135 - DNA, 1413 bp, Arabidopsis thaliana
  misc_feature (1)..(1413): Ceres Seq. ID no. 12686544
  misc_feature: MA Experiment ID: 20000173 Result: Up-regulated in Transcription
  misc_feature: MA Experiment 20000173 PARAMETER Experiment Name: At_42deg_Heat_P Parameter: Age (day) Value: 14
  misc_feature: MA Experiment 20000173 PARAMETER Experiment Name: At_42deg_Heat_P Parameter: Organism Value: A. thaliana
  misc_feature: MA Experiment 20000173 PARAMETER Experiment Name: At_42deg_Heat_P Parameter: Plant Line Value: WS
  misc_feature: MA Experiment 20000173 PARAMETER Experiment Name: At_42deg_Heat_P Parameter: Temperature (deg C) Value: 42 vs. 22
  misc_feature: MA Experiment 20000173 PARAMETER Experiment Name: At_42deg_Heat_P Parameter: Timepoint (hr) Value: 6
  misc_feature: MA Experiment 20000173 PARAMETER Experiment Name: At_42deg_Heat_P Parameter: Tissue Value: Aerial
  misc_feature: MA Experiment ID: 20000179 Result: Up-regulated in Transcription
  misc_feature: MA Experiment 20000179 PARAMETER Experiment Name: At_Germinating_Seeds_P Parameter: Age (hr) Value: 6 vs. 0
  misc_feature: MA Experiment 20000179 PARAMETER Experiment Name: At_Germinating_Seeds_P Parameter: Tissue Value: Germinating Seeds
  misc_feature: MA Experiment ID: 20000180 Result: Up-regulated in Transcription
  misc_feature: MA Experiment 20000180 PARAMETER Experiment Name: At_Germinating_Seeds_P Parameter: Age (hr) Value: 24 vs. 0
  misc_feature: MA Experiment 20000180 PARAMETER Experiment Name: At_Germinating_Seeds_P Parameter: Tissue Value: Germinating Seeds
  misc_feature: MA Experiment ID: 20000227 Result: Up-regulated in Transcription
  misc_feature: MA Experiment 20000227 PARAMETER Experiment Name: At_Root-Tips-vs-Tops_P Parameter: Tissue Value: Root Tips vs. Root Tops
  misc_feature: MA Experiment ID: 20000439 Result: Up-regulated in Transcription
  misc_feature: MA Experiment 20000439 PARAMETER Experiment Name: At_Roots__P Parameter: Age (day) Value: 14 vs. 21
  misc_feature: MA Experiment 20000439 PARAMETER Experiment Name: At_Roots__P Parameter: Organism Value: A. thaliana
  misc_feature: MA Experiment 20000439 PARAMETER Experiment Name: At_Roots__P Parameter: Tissue Value: Roots vs. Whole Plant
  misc_feature: MA Experiment ID: 20000527 Result: Down-regulated in Transcription
  misc_feature: MA Experiment 20000527 PARAMETER Experiment Name: At_10percent_PEG_P Parameter: Age (day) Value: 20
  misc_feature: MA Experiment 20000527 PARAMETER Experiment Name: At_10percent_PEG_P Parameter: Organism Value: A. thaliana
  misc_feature: MA Experiment 20000527 PARAMETER Experiment Name: At_10percent_PEG_P Parameter: Plant Line Value: WS
  misc_feature: MA Experiment 20000527 PARAMETER Experiment Name: At_10percent_PEG_P Parameter: Timepoint (day) Value: 20
  misc_feature: MA Experiment 20000527 PARAMETER Experiment Name: At_10percent_PEG_P Parameter: Tissue Value: Whole Plant
  misc_feature: MA Experiment 20000527 PARAMETER Experiment Name: At_10percent_PEG_P Parameter: Treatment Value: 10percent PEG vs. No Treatment
atggctcagaacgatacagtgaagctgataggttcttggtctagcccttattcccttagggcacgtgtggctctacacttgaaatctgtcaagtacgagtacttagacgaacctgatgttcttaaagaaaagagtgaactccttctcaaatctaaccccatccacaagaaagtccctgtcctcctccatggtgacctctccatctctgagtccctcaacgttgttcaatacgtcgacgaggcttggccctccgttccttcaatccttccttctgatgcctatgatcgcgcatctgctcggttttgggctcagtacatcgatgacaagtgttttgcggcggtggatgcggtggtcggagcaaaagacgacgaagggaaaatggcggcggtgggaaagctgatggagtgtttggcgatacttgaagaaacgtttcagaagagcagcaaaggattagggttctttggaggagagaccatcggctaccttgacattgcttgttcggctcttttaggtccgatctctgtgatcgaggcgttttccggcgtcaagtttctccggcaagagacaacacctgggttgatcaaatgggccgagaggtttagggcccatgaagctgttaagccctacatgccaaccgtcgaagaggtcgttgcattcgcaaagcaaaagttcaatgttcagccacgagtggctctacacttgaaatctatcaagtacgagtacttagaagaacctgatgatgatcttggggaaaagagccaactccttctcaaatctaaccctatccacaagaaaacccctgtcctcattcatggtgaccttgcaatctgtgagtccctcaacatcgttcaatacctcgacgaggcttggccttctgatccatccatccttccttctaatgcctatgatcgtgcgtctgctcggttctgggctcagtacatcgacgacaagtctctgttattaataaatctgtttagattagtcaaatcaagagttatgtgtctgaaacagtgcttcgaggcggcgaatgcgctgaccggagcaaacaacgacgaagagagaatagcggcgacgggaaagctgacggagtgtttggcgatactagaagagacgtttcagaagagcagcaaagggttagggtttttcggaggagaaaccatcggctaccttgacattgcatgtgcggctcttttgggtccgatctctgtgatcgagatgttttccgccgacaagtttgtccgggaagagacaacacctgggttgatccaatgggccgtgaggtttagggcccatgaagctgttaggccttacatgccaaccgtcgaagaggtcactgaattagtaaagcaaaggattgaggagggttttaagcgaaacttcaaaagcaatgtttcgacttcggaatatgaatag

SEQ ID NO: 86136 - protein, 470 aa, Arabidopsis thaliana
  peptide (1)..(470): Ceres Seq. ID no. 12686545
  misc_feature (1)..(470): Homolog of NCBI NO: 25403291 NR Description: protein T7N9.20 [imported] - Arabidopsis thaliana
  misc_feature (1)..(227): Homolog of NCBI NO: 15223432 NR Description: glutathione transferase, putative; protein id: supported by cDNA: 2985., supported by cDNA: gi_11096019, by cDNA: gi_14994260, supported by cDNA: gi_15215629, supported
  misc_feature (1)..(227): Homolog of NCBI NO: 21592561 NR Description: glutathione transferase, putative [Arabidopsis
  misc_feature (1)..(223): Homolog of NCBI NO: 15223440 NR Description: glutathione transferase, putative; protein id:
  misc_feature (337)..(451): Homolog of NCBI NO: 15223432 NR Description: glutathione transferase, putative; protein id: supported by cDNA: 2985., supported by cDNA: gi_11096019, by cDNA: gi_14994260, supported by cDNA: gi_15215629, supported
  misc_feature (224)..(323): Homolog of NCBI NO: 15223432 NR Description: glutathione transferase, putative; protein id: supported by cDNA: 2985., supported by cDNA: gi_11096019, by cDNA: gi_14994260, supported by cDNA: gi_15215629, supported
  misc_feature (337)..(451): Homolog of NCBI NO: 21592561 NR Description: glutathione transferase, putative [Arabidopsis
  misc_feature (224)..(323): Homolog of NCBI NO: 21592561 NR Description: glutathione transferase, putative [Arabidopsis
  misc_feature (1)..(226): Homolog of NCBI NO: 15222497 NR Description: glutathione transferase, putative; protein id: [Arabidopsis thaliana] >gi|25313218|pir||F96721 probable
  misc_feature (1)..(226): Homolog of NCBI NO: 38454100 NR Description: At1g69920 [Arabidopsis thaliana]
MAQNDTVKLIGSWSSPYSLRARVALHLKSVKYEYLDEPDVLKEKSELLLKSNPIHKKVPVLLHGDLSISESLNVVQYVDEAWPSVPSILPSDAYDRASARFWAQYIDDKCFAAVDAVVGAKDDEGKMAAVGKLMECLAILEETFQKSSKGLGFFGGETIGYLDIACSALLGPISVIEAFSGVKFLRQETTPGLIKWAERFRAHEAVKPYMPTVEEVVAFAKQKFNVQPRVALHLKSIKYEYLEEPDDDLGEKSQLLLKSNPIHKKTPVLIHGDLAICESLNIVQYLDEAWPSDPSILPSNAYDRASARFWAQYIDDKSLLLINLFRLVKSRVMCLKQCFEAANALTGANNDEERIAATGKLTECLAILEETFQKSSKGLGFFGGETIGYLDIACAALLGPISVIEMFSADKFVREETTPGLIQWAVRFRAHEAVRPYMPTVEEVTELVKQRIEEGFKRNFKSNVSTSEYE

SEQ ID NO: 86137 - protein, 344 aa, Arabidopsis thaliana
  peptide (1)..(344): Ceres Seq. ID no. 12686546
  misc_feature (1)..(344): Homolog of NCBI NO: 25403291 NR Description: protein T7N9.20 [imported] - Arabidopsis thaliana
  misc_feature (1)..(101): Homolog of NCBI NO: 15223432 NR Description: glutathione transferase, putative; protein id: supported by cDNA: 2985., supported by cDNA: gi_11096019, by cDNA: gi_14994260, supported by cDNA: gi_15215629, supported
  misc_feature (1)..(101): Homolog of NCBI NO: 21592561 NR Description: glutathione transferase, putative [Arabidopsis
  misc_feature (1)..(97): Homolog of NCBI NO: 15223440 NR Description: glutathione transferase, putative; protein id:
  misc_feature (211)..(325): Homolog of NCBI NO: 15223432 NR Description: glutathione transferase, putative; protein id: supported by cDNA: 2985., supported by cDNA: gi_11096019, by cDNA: gi_14994260, supported by cDNA: gi_15215629, supported
  misc_feature (98)..(197): Homolog of NCBI NO: 15223432 NR Description: glutathione transferase, putative; protein id: supported by cDNA: 2985., supported by cDNA: gi_11096019, by cDNA: gi_14994260, supported by cDNA: gi_15215629, supported
  misc_feature (211)..(325): Homolog of NCBI NO: 21592561 NR Description: glutathione transferase, putative [Arabidopsis
  misc_feature (98)..(197): Homolog of NCBI NO: 21592561 NR Description: glutathione transferase, putative [Arabidopsis
  misc_feature (1)..(100): Homolog of NCBI NO: 15222497 NR Description: glutathione transferase, putative; protein id: [Arabidopsis thaliana] >gi|25313218|pir||F96721 probable
  misc_feature (1)..(100): Homolog of NCBI NO: 38454100 NR Description: At1g69920 [Arabidopsis thaliana]
MAAVGKLMECLAILEETFQKSSKGLGFFGGETIGYLDIACSALLGPISVIEAFSGVKFLRQETTPGLIKWAERFRAHEAVKPYMPTVEEVVAFAKQKFNVQPRVALHLKSIKYEYLEEPDDDLGEKSQLLLKSNPIHKKTPVLIHGDLAICESLNIVQYLDEAWPSDPSILPSNAYDRASARFWAQYIDDKSLLLINLFRLVKSRVMCLKQCFEAANALTGANNDEERIAATGKLTECLAILEETFQKSSKGLGFFGGETIGYLDIACAALLGPISVIEMFSADKFVREETTPGLIQWAVRFRAHEAVRPYMPTVEEVTELVKQRIEEGFKRNFKSNVSTSEYE

SEQ ID NO: 86138 - protein, 337 aa, Arabidopsis thaliana
  peptide (1)..(337): Ceres Seq. ID no. 12686547
  misc_feature (1)..(337): Homolog of NCBI NO: 25403291 NR Description: protein T7N9.20 [imported] - Arabidopsis thaliana
  misc_feature (1)..(94): Homolog of NCBI NO: 15223432 NR Description: glutathione transferase, putative; protein id: supported by cDNA: 2985., supported by cDNA: gi_11096019, by cDNA: gi_14994260, supported by cDNA: gi_15215629, supported
  misc_feature (1)..(94): Homolog of NCBI NO: 21592561 NR Description: glutathione transferase, putative [Arabidopsis
  misc_feature (1)..(90): Homolog of NCBI NO: 15223440 NR Description: glutathione transferase, putative; protein id:
  misc_feature (204)..(318): Homolog of NCBI NO: 15223432 NR Description: glutathione transferase, putative; protein id: supported by cDNA: 2985., supported by cDNA: gi_11096019, by cDNA: gi_14994260, supported by cDNA: gi_15215629, supported
  misc_feature (91)..(190): Homolog of NCBI NO: 15223432 NR Description: glutathione transferase, putative; protein id: supported by cDNA: 2985., supported by cDNA: gi_11096019, by cDNA: gi_14994260, supported by cDNA: gi_15215629, supported
  misc_feature (204)..(318): Homolog of NCBI NO: 21592561 NR Description: glutathione transferase, putative [Arabidopsis
  misc_feature (91)..(190): Homolog of NCBI NO: 21592561 NR Description: glutathione transferase, putative [Arabidopsis
  misc_feature (1)..(93): Homolog of NCBI NO: 15222497 NR Description: glutathione transferase, putative; protein id: [Arabidopsis thaliana] >gi|25313218|pir||F96721 probable
  misc_feature (1)..(93): Homolog of NCBI NO: 38454100 NR Description: At1g69920 [Arabidopsis thaliana]
MECLAILEETFQKSSKGLGFFGGETIGYLDIACSALLGPISVIEAFSGVKFLRQETTPGLIKWAERFRAHEAVKPYMPTVEEVVAFAKQKFNVQPRVALHLKSIKYEYLEEPDDDLGEKSQLLLKSNPIHKKTPVLIHGDLAICESLNIVQYLDEAWPSDPSILPSNAYDRASARFWAQYIDDKSLLLINLFRLVKSRVMCLKQCFEAANALTGANNDEERIAATGKLTECLAILEETFQKSSKGLGFFGGETIGYLDIACAALLGPISVIEMFSADKFVREETTPGLIQWAVRFRAHEAVRPYMPTVEEVTELVKQRIEEGFKRNFKSNVSTSEYE

SEQ ID NO: 86139 - DNA, 666 bp, Arabidopsis thaliana
  misc_feature (1)..(666): Ceres Seq. ID no. 12686718
  misc_feature: MA Experiment ID: 20000184 Result: Down-regulated in Transcription
  misc_feature: MA Experiment 20000184 PARAMETER Experiment Name: At_Shoots__P Parameter: Age (day) Value: 7
  misc_feature: MA Experiment 20000184 PARAMETER Experiment Name: At_Shoots__P Parameter: Tissue Value: Shoots vs. Whole Plant
  misc_feature: MA Experiment ID: 20001451 Result: Down-regulated in Transcription
  misc_feature: MA Experiment 20001451 PARAMETER Experiment Name: At_Far-red-induction_P Parameter: Age (day) Value: 7
  misc_feature: MA Experiment 20001451 PARAMETER Experiment Name: At_Far-red-induction_P Parameter: Light Value: Far-red vs. White
  misc_feature: MA Experiment 20001451 PARAMETER Experiment Name: At_Far-red-induction_P Parameter: Organism Value: A. thaliana
  misc_feature: MA Experiment 20001451 PARAMETER Experiment Name: At_Far-red-induction_P Parameter: Plant Line Value: Columbia
  misc_feature: MA Experiment 20001451 PARAMETER Experiment Name: At_Far-red-induction_P Parameter: Timepoint (hr) Value: 24
  misc_feature: MA Experiment 20001451 PARAMETER Experiment Name: At_Far-red-induction_P Parameter: Tissue Value: Whole Plant
  misc_feature: MA Experiment ID: 20001555 Result: Up-regulated in Transcription
  misc_feature: MA Experiment 20001555 PARAMETER Experiment Name: At_Drought_Soil_Dry_P Parameter: Age (day) Value: 24
  misc_feature: MA Experiment 20001555 PARAMETER Experiment Name: At_Drought_Soil_Dry_P Parameter: Organism Value: A. thaliana
  misc_feature: MA Experiment 20001555 PARAMETER Experiment Name: At_Drought_Soil_Dry_P Parameter: Plant Line Value: WS
  misc_feature: MA Experiment 20001555 PARAMETER Experiment Name: At_Drought_Soil_Dry_P Parameter: Post Timepoint (hr) Value: None
  misc_feature: MA Experiment 20001555 PARAMETER Experiment Name: At_Drought_Soil_Dry_P Parameter: Post-Treatment Value: None
  misc_feature: MA Experiment 20001555 PARAMETER Experiment Name: At_Drought_Soil_Dry_P Parameter: Timepoint (day) Value: 10
  misc_feature: MA Experiment 20001555 PARAMETER Experiment Name: At_Drought_Soil_Dry_P Parameter: Treatment Value: Drought vs. No Drought
  misc_feature: MA Experiment ID: 20001556 Result: Up-regulated in Transcription
  misc_feature: MA Experiment 20001556 PARAMETER Experiment Name: At_Drought_Soil_Dry_P Parameter: Age (day) Value: 26
  misc_feature: MA Experiment 20001556 PARAMETER Experiment Name: At_Drought_Soil_Dry_P Parameter: Organism Value: A. thaliana
  misc_feature: MA Experiment 20001556 PARAMETER Experiment Name: At_Drought_Soil_Dry_P Parameter: Plant Line Value: WS
  misc_feature: MA Experiment 20001556 PARAMETER Experiment Name: At_Drought_Soil_Dry_P Parameter: Post Timepoint (hr) Value: None
  misc_feature: MA Experiment 20001556 PARAMETER Experiment Name: At_Drought_Soil_Dry_P Parameter: Post-Treatment Value: None
  misc_feature: MA Experiment 20001556 PARAMETER Experiment Name: At_Drought_Soil_Dry_P Parameter: Timepoint (day) Value: 12
  misc_feature: MA Experiment 20001556 PARAMETER Experiment Name: At_Drought_Soil_Dry_P Parameter: Treatment Value: Drought vs. No Drought
atgcaggactctactggagctaatggactattgtttcgcttccgaaacccgcaagcaagtatatgtacggaagctcgtccaaagaacatcaactcatcttactttaccagatcttttgcatcaagaacttcaaaagaacctgggaatcagcagaataaggctaagaaagaggtgacgactgtggaggatccttttgattctcctacataccacatcccggagaagccggtgacctttacagaaggtgcgtcctacagtcttgttattctggctgggcttggtgtcgctggagctgctggctacggtgtgtttaaagagctcatttttcaaccaaaagagtacaaggtctttgacaaagccttgaagagaattcaagatgatggtcaggtgagggttaggattggatcccccatcaaaggctatggacaagaaactagaaaccgagctgctcgtcaacgtatacccaacagagtatttacagatgaagacggagtggagcatgttgaggtaaacttctacatccgtgggcctcaaggagcagggaaagtgtacacggagatgtttaaagacaaggcagagaaggaatggaaatacacgtacctgatcgtagagattttaacaccttccccagccaaattgatgctggagtcttatttgcctgcctaa

SEQ ID NO: 86140 - protein, 221 aa, Arabidopsis thaliana
  peptide (1)..(221): Ceres Seq. ID no. 12686719
  misc_feature (17)..(204): Homolog of NCBI NO: 17540726 NR Description: Putative protein of fungal and metazoan origin elegans] >gi|13559620|gb|AAK29831.1| Hypothetical protein
  misc_feature (17)..(198): Homolog of NCBI NO: 25395974 NR Description: protein F56B3.4 [imported] - Caenorhabditis
  misc_feature (39)..(209): Homolog of NCBI NO: 12850553 NR Description: unnamed protein product [Mus musculus]
  misc_feature (39)..(209): Homolog of NCBI NO: 21313128 NR Description: RIKEN cDNA 2700002I20 [Mus musculus] unnamed protein product [Mus musculus]
  misc_feature (35)..(205): Homolog of NCBI NO: 7661810 NR Description: HSPC154 protein [Homo sapiens]
  misc_feature (35)..(205): Homolog of NCBI NO: 12654149 NR Description: HSPC154 protein [Homo sapiens]
  misc_feature (75)..(209): Homolog of NCBI NO: 12839773 NR Description: unnamed protein product [Mus musculus]
  misc_feature (35)..(205): Homolog of NCBI NO: 34932590 NR Description: similar to RIKEN cDNA 2700002I20 [Rattus
MQDSTGANGLLFRFRNPQASICTEARPKNINSSYFTRSFASRTSKEPGNQQNKAKKEVTTVEDPFDSPTYHIPEKPVTFTEGASYSLVILAGLGVAGAAGYGVFKELIFQPKEYKVFDKALKRIQDDGQVRVRIGSPIKGYGQETRNRAARQRIPNRVFTDEDGVEHVEVNFYIRGPQGAGKVYTEMFKDKAEKEWKYTYLIVEILTPSPAKLMLESYLPA

SEQ ID NO: 86141 - DNA, 981 bp, Arabidopsis thaliana
  misc_feature (1)..(981): Ceres Seq. ID no. 12686851
  misc_feature: MA Experiment ID: 20000307 Result: Down-regulated in Transcription
  misc_feature: MA Experiment 20000307 PARAMETER Experiment Name: At_Germinating_Seeds_Sub_P Parameter: Age (hr) Value: 24 vs. 0
  misc_feature: MA Experiment 20000307 PARAMETER Experiment Name: At_Germinating_Seeds_Sub_P Parameter: Organism Value: A. thaliana
  misc_feature: MA Experiment 20000307 PARAMETER Experiment Name: At_Germinating_Seeds_Sub_P Parameter: Plant Line Value: WS
  misc_feature: MA Experiment 20000307 PARAMETER Experiment Name: At_Germinating_Seeds_Sub_P Parameter: Tissue Value: Germinating Seeds
  misc_feature: MA Experiment ID: 20000355 Result: Up-regulated in Transcription
  misc_feature: MA Experiment 20000355 PARAMETER Experiment Name: At_Siliques_Sub_P Parameter: Age (day) Value: 21
  misc_feature: MA Experiment 20000355 PARAMETER Experiment Name: At_Siliques_Sub_P Parameter: Organism Value: A. thaliana
  misc_feature: MA Experiment 20000355 PARAMETER Experiment Name: At_Siliques_Sub_P Parameter: Plant Line Value: WS
  misc_feature: MA Experiment 20000355 PARAMETER Experiment Name: At_Siliques_Sub_P Parameter: Tissue Value: Less Than 5mm Siliques vs. Whole Plant
  misc_feature: MA Experiment ID: 20000440 Result: Up-regulated in Transcription
  misc_feature: MA Experiment 20000440 PARAMETER Experiment Name: At_Closed-Flower__Sub_P Parameter: Tissue Value: Closed Flower vs. Whole Plant
atggctcttgtacccaagattcgcaatcgcaccatctcggacaaaccagtctcttcgtcttgtactagaacatcgagtttcagacaaagacttctcgccagttgcaaacgatttctcaggttcaaattgttggttcgtgcttcttcagtgtcattaaaaaagaaagcagcaaggtgttcacaatctcaacaagttgttaaacataatgatgataggattgaggaacattcttctagtaatcggggttttaaagatggcaacaatttcttagtatcatcaacagaaacgaagaagcttgttgcgttttgtggtgaacctttccaaccactcaacgaggaggaagtagctctagtcaatagtgccttgtctaagagaaacagaaagaagattttggtttcgcataaaaactccaatattgacatctctggagaaactttacaatgcctaaggccgaatcaatggcttaacgatgatgtcactaatctctatctggagttgctgaaagagagacaaactagagatccgcaaaagtacttcaagtgtcatttcttcaataccttcttttacgttaagctcgtaagcggctccggttacaattacaaagctgtcagtagatggactaccaagagaaagcttggatatgatcttattgactgtgacataatatttgttccaatccacatagatatacattggaccctgggagtgattaacaatagggaacgcaagttcgtgtatcttgattcattatttactggagttggtcatacaattttgaatgctatggcaaagtacttggtggatgaagtaaaacaaaagagtcaaaagaatattgacgttagttcatggggaatggaatacgttgaagaacgtcctcagcaacagaacggtagaggattgagtctacaatttagccagaaagacatgccgtacttcaggttaagaacagctaaggagatactgagactgcgagctgactaa

SEQ ID NO: 86142 - protein, 326 aa, Arabidopsis thaliana
  peptide (1)..(326): Ceres Seq. ID no. 12686852
  misc_feature (113)..(326): Homolog of NCBI NO: 15236895 NR Description: hypothetical protein; protein id: At4g00690.1
  misc_feature (97)..(326): Homolog of NCBI NO: 18414542 NR Description: Expressed protein; protein id: At4g15880.1, by cDNA: gi_14423393, supported by cDNA: gi_20148438 [Arabidopsis >gi|14423394|gb|AAK62379.1|AF386934_1 Unknown protein
  misc_feature (97)..(326): Homolog of NCBI NO: 34787206 NR Description: SUMO protease [Arabidopsis thaliana]
  misc_feature (97)..(297): Homolog of NCBI NO: 25371728 NR Description: hypothetical protein AT4g15880 [imported] - thaliana >gi|5281021|emb|CAB45994.1| hypothetical protein thaliana] >gi|7268336|emb|CAB78630.1| hypothetical protein
  misc_feature (97)..(293): Homolog of NCBI NO: 2326343 NR Description: G14587-5 [Arabidopsis thaliana]
  misc_feature (97)..(293): Homolog of NCBI NO: 7485126 NR Description: hypothetical protein - Arabidopsis thaliana
  misc_feature (105)..(326): Homolog of NCBI NO: 6728998 NR Description: hypothetical protein [Arabidopsis thaliana]
  misc_feature (105)..(326): Homolog of NCBI NO: 30680058 NR Description: Ulp1 protease family [Arabidopsis thaliana]
  misc_feature (105)..(326): Homolog of NCBI NO: 26450144 NR Description: unknown protein [Arabidopsis thaliana]
  misc_feature (105)..(326): Homolog of NCBI NO: 34915036 NR Description: P0458A05.23 [Oryza sativa (japonica
MALVPKIRNRTISDKPVSSSCTRTSSFRQRLLASCKRFLRFKLLVRASSVSLKKKAARCSQSQQVVKHNDDRIEEHSSSNRGFKDGNNFLVSSTETKKLVAFCGEPFQPLNEEEVALVNSALSKRNRKKILVSHKNSNIDISGETLQCLRPNQWLNDDVTNLYLELLKERQTRDPQKYFKCHFFNTFFYVKLVSGSGYNYKAVSRWTTKRKLGYDLIDCDIIFVPIHIDIHWTLGVINNRERKFVYLDSLFTGVGHTILNAMAKYLVDEVKQKSQKNIDVSSWGMEYVEERPQQQNGRGLSLQFSQKDMPYFRLRTAKEILRLRAD

SEQ ID NO: 86143 - DNA, 762 bp, Arabidopsis thaliana
  misc_feature (1)..(762): Ceres Seq. ID no. 12686885
  misc_feature: MA Experiment ID: 20000264 Result: Up-regulated in Transcription
  misc_feature: MA Experiment 20000264 PARAMETER Experiment Name: At_Open_Flower_P Parameter: Age (day) Value: 21
  misc_feature: MA Experiment 20000264 PARAMETER Experiment Name: At_Open_Flower_P Parameter: Plant Line Value: WS
  misc_feature: MA Experiment 20000264 PARAMETER Experiment Name: At_Open_Flower_P Parameter: Tissue Value: Open Flower vs. Whole Plant
  misc_feature: MA Experiment ID: 20000265 Result: Up-regulated in Transcription
  misc_feature: MA Experiment 20000265 PARAMETER Experiment Name: At_Open_Flower_P Parameter: Age (day) Value: 21
  misc_feature: MA Experiment 20000265 PARAMETER Experiment Name: At_Open_Flower_P Parameter: Plant Line Value: WS
  misc_feature: MA Experiment 20000265 PARAMETER Experiment Name: At_Open_Flower_P Parameter: Tissue Value: Closed Flower vs. Whole Plant
  misc_feature: MA Experiment ID: 20000286 Result: Up-regulated in Transcription
  misc_feature: MA Experiment 20000286 PARAMETER Experiment Name: At_Open_Flower_P Parameter: Age (day) Value: 21
  misc_feature: MA Experiment 20000286 PARAMETER Experiment Name: At_Open_Flower_P Parameter: Plant Line Value: WS
  misc_feature: MA Experiment 20000286 PARAMETER Experiment Name: At_Open_Flower_P Parameter: Tissue Value: Half Open vs. Whole Plant
  misc_feature: MA Experiment ID: 20000794 Result: Up-regulated in Transcription
  misc_feature: MA Experiment 20000794 PARAMETER Experiment Name: At_Petals_P Parameter: Age (day) Value: 23-25 days
  misc_feature: MA Experiment 20000794 PARAMETER Experiment Name: At_Petals_P Parameter: Plant Line Value: WS
  misc_feature: MA Experiment 20000794 PARAMETER Experiment Name: At_Petals_P Parameter: Tissue Value: Petals vs. Whole plant
atgattccaacatcgttttcaagtaagtttcaaggagtactaagtatgaatgcgttgagatgttatgtatcagagtttatctcaaccttcttcttcgtcctcgcagccgttggttctgtcatgtcttcaaggaaattgatggctggtgatgtgtctggtccgtttggtgttttaataccggcgattgctaatgcgttggcgttatcatcgtcagtttacatctcttggaacgtctctggtggtcatgtgaatccagcggttacgtttgcgatggctgttgctggtcggattagcgttccaaccgctatgttttattggacttctcagatgattgcctctgttatggcttgccttgttcttaaagtaaccgtcatggaacagcacgtaccgatttataagattgctggagaaatgactggatttggagcatctgttcttgaaggtgttttagctttcgtcttggtttatactgtgttcacggctagcgatcccagacgtgggctacctttagcagtgggacctatatttatagggtttgttgcgggagccaatgttctagccgctggtccattctctggaggttcaatgaatcctgcgtgtgcctttgggtcggcgatggtttacggaagctttaagaaccaagctgtgtattgggttgggcctctgcttggaggagccacagctgctttagtgtatgataacgtggtggtccctgtagaagatgatcgtggttcatctactggtgatgccattggtgtgtaa

SEQ ID NO: 86144 - protein, 253 aa, Arabidopsis thaliana; identical to SEQ ID NO: 69464
  peptide (1)..(253): Ceres Seq. ID no. 12686886
  misc_feature (12)..(232): Pfam Name: Major intrinsic protein Pfam Description: Major intrinsic protein
  misc_feature (1)..(253): Homolog of NCBI NO: 15232798 NR Description: aquaporin-like protein; protein id: At3g47440.1
  misc_feature (18)..(238): Homolog of NCBI NO: 9623336 NR Description: tonoplast intrinsic protein 2 [Hordeum vulgare]
  misc_feature (15)..(238): Homolog of NCBI NO: 13447837 NR Description: tonoplast membrane integral protein ZmTIP5-1 [Zea
  misc_feature (1)..(237): Homolog of NCBI NO: 2058706 NR Description: Rb7 [Lycopersicon esculentum]
  misc_feature (1)..(237): Homolog of NCBI NO: 267135 NR Description: TONOPLAST INTRINSIC PROTEIN, ROOT-SPECIFIC
  misc_feature (18)..(238): Homolog of NCBI NO: 38605853 NR Description: OSJNBb0034G17.11 [Oryza sativa (japonica
  misc_feature (1)..(237): Homolog of NCBI NO: 126959 NR Description: Tonoplast intrinsic protein, root-specific RB7-5A
  misc_feature (1)..(237): Homolog of NCBI NO: 11276918 NR Description: membrane channel protein [imported] - potato >gi|1518057|gb|AAB67881.1| membrane channel protein [Solanum
  misc_feature (1)..(241): Homolog of NCBI NO: 14140156 NR Description: putative aquaporin [Oryza sativa]
  misc_feature (1)..(237): Homolog of NCBI NO: 9623335 NR Description: tonoplast intrinsic protein 1 [Hordeum vulgare]

SEQ ID NO: 86145 - protein, 238 aa, Arabidopsis thaliana; identical to SEQ ID NO: 69465
  peptide (1)..(238): Ceres Seq. ID no. 12686887
  misc_feature (1)..(217): Pfam Name: Major intrinsic protein Pfam Description: Major intrinsic protein
  misc_feature (1)..(238): Homolog of NCBI NO: 15232798 NR Description: aquaporin-like protein; protein id: At3g47440.1
  misc_feature (3)..(223): Homolog of NCBI NO: 9623336 NR Description: tonoplast intrinsic protein 2 [Hordeum vulgare]
  misc_feature (1)..(223): Homolog of NCBI NO: 13447837 NR Description: tonoplast membrane integral protein ZmTIP5-1 [Zea
  misc_feature (1)..(222): Homolog of NCBI NO: 2058706 NR Description: Rb7 [Lycopersicon esculentum]
  misc_feature (1)..(222): Homolog of NCBI NO: 267135 NR Description: TONOPLAST INTRINSIC PROTEIN, ROOT-SPECIFIC
  misc_feature (3)..(223): Homolog of NCBI NO: 38605853 NR Description: OSJNBb0034G17.11 [Oryza sativa (japonica
  misc_feature (1)..(222): Homolog of NCBI NO: 126959 NR Description: Tonoplast intrinsic protein, root-specific RB7-5A
  misc_feature (1)..(222): Homolog of NCBI NO: 11276918 NR Description: membrane channel protein [imported] - potato >gi|1518057|gb|AAB67881.1| membrane channel protein [Solanum
  misc_feature (1)..(226): Homolog of NCBI NO: 14140156 NR Description: putative aquaporin [Oryza sativa]
  misc_feature (1)..(222): Homolog of NCBI NO: 9623335 NR Description: tonoplast intrinsic protein 1 [Hordeum vulgare]

SEQ ID NO: 86146 - protein, 213 aa, Arabidopsis thaliana
  peptide (1)..(213): Ceres Seq. ID no. 12686888
  misc_feature (1)..(192): Pfam Name: Major intrinsic protein Pfam Description: Major intrinsic protein
  misc_feature (1)..(213): Homolog of NCBI NO: 15232798 NR Description: aquaporin-like protein; protein id: At3g47440.1
  misc_feature (1)..(198): Homolog of NCBI NO: 9623336 NR Description: tonoplast intrinsic protein 2 [Hordeum vulgare]
  misc_feature (1)..(198): Homolog of NCBI NO: 13447837 NR Description: tonoplast membrane integral protein ZmTIP5-1 [Zea
  misc_feature (1)..(197): Homolog of NCBI NO: 2058706 NR Description: Rb7 [Lycopersicon esculentum]
  misc_feature (1)..(197): Homolog of NCBI NO: 267135 NR Description: TONOPLAST INTRINSIC PROTEIN, ROOT-SPECIFIC
  misc_feature (1)..(198): Homolog of NCBI NO: 38605853 NR Description: OSJNBb0034G17.11 [Oryza sativa (japonica
  misc_feature (1)..(197): Homolog of NCBI NO: 126959 NR Description: Tonoplast intrinsic protein, root-specific RB7-5A
  misc_feature (1)..(197): Homolog of NCBI NO: 11276918 NR Description: membrane channel protein [imported] - potato >gi|1518057|gb|AAB67881.1| membrane channel protein [Solanum
  misc_feature (1)..(201): Homolog of NCBI NO: 14140156 NR Description: putative aquaporin [Oryza sativa]
  misc_feature (1)..(197): Homolog of NCBI NO: 9623335 NR Description: tonoplast intrinsic protein 1 [Hordeum vulgare]
MSSRKLMAGDVSGPFGVLIPAIANALALSSSVYISWNVSGGHVNPAVTFAMAVAGRISVPTAMFYWTSQMIASVMACLVLKVTVMEQHVPIYKIAGEMTGFGASVLEGVLAFVLVYTVFTASDPRRGLPLAVGPIFIGFVAGANVLAAGPFSGGSMNPACAFGSAMVYGSFKNQAVYWVGPLLGGATAALVYDNVVVPVEDDRGSSTGDAIGV

SEQ ID NO: 86147 - DNA, 1683 bp, Arabidopsis thaliana
  misc_feature (1)..(1683): Ceres Seq. ID no. 12686893
  misc_feature: MA Experiment ID: 20000307 Result: Down-regulated in Transcription
  misc_feature: MA Experiment 20000307 PARAMETER Experiment Name: At_Germinating_Seeds_Sub_P Parameter: Age (hr) Value: 24 vs. 0
  misc_feature: MA Experiment 20000307 PARAMETER Experiment Name: At_Germinating_Seeds_Sub_P Parameter: Organism Value: A. thaliana
  misc_feature: MA Experiment 20000307 PARAMETER Experiment Name: At_Germinating_Seeds_Sub_P Parameter: Plant Line Value: WS
  misc_feature: MA Experiment 20000307 PARAMETER Experiment Name: At_Germinating_Seeds_Sub_P Parameter: Tissue Value: Germinating Seeds
  misc_feature: MA Experiment ID: 20000315 Result: Down-regulated in Transcription
  misc_feature: MA Experiment 20000315 PARAMETER Experiment Name: At_14day_Shoots-Roots_Sub_P Parameter: Age (day) Value: 14
  misc_feature: MA Experiment 20000315 PARAMETER Experiment Name: At_14day_Shoots-Roots_Sub_P Parameter: Organism Value: A. thaliana
  misc_feature: MA Experiment 20000315 PARAMETER Experiment Name: At_14day_Shoots-Roots_Sub_P Parameter: Plant Line Value: WS
  misc_feature: MA Experiment 20000315 PARAMETER Experiment Name: At_14day_Shoots-Roots_Sub_P Parameter: Tissue Value: Shoots vs. Whole Plant
  misc_feature: MA Experiment ID: 20000328 Result: Down-regulated in Transcription
  misc_feature: MA Experiment 20000328 PARAMETER Experiment Name: At_42deg_Heat_Sub_P Parameter: Age (day) Value: 14
  misc_feature: MA Experiment 20000328 PARAMETER Experiment Name: At_42deg_Heat_Sub_P Parameter: Organism Value: A. thaliana
  misc_feature: MA Experiment 20000328 PARAMETER Experiment Name: At_42deg_Heat_Sub_P Parameter: Plant Line Value: WS
  misc_feature: MA Experiment 20000328 PARAMETER Experiment Name: At_42deg_Heat_Sub_P Parameter: Temperature (deg C) Value: 42 vs. 22
  misc_feature: MA Experiment 20000328 PARAMETER Experiment Name: At_42deg_Heat_Sub_P Parameter: Timepoint (hr) Value: 6
  misc_feature: MA Experiment 20000328 PARAMETER Experiment Name: At_42deg_Heat_Sub_P Parameter: Tissue Value: Aerial
atgttgaagtccataagcagcagcagcggcgacgatcatcttctttctctgatcgtatcttccaccggaaaactccatctccggcagattcacgccctcttactccgcacttccttaatcagaaactctgacgttttccaccatttcctctctcgtctcgctctctctctgattcctcgagacatcaattactcatgccgagttttctcccagagattgaacccaactctctctcactgcaacaccatgatcagagctttctctctcagccaaactccatgcgaagggtttcgcttgtttcgatctcttcgacgaaacagctctcttcctgctaatccgctctcgtcttcttttgctctcaagtgttgtatcaaatcaggtgacttactcggtggttttactgatgcatgtaaagtgttcgacgaaattcccaagagagatactgtttcttggaatgtgctgttttcgtgttatctgcggaataaacgtacgagagatgttttagttttgtttgataagatgaagaacgatgtcgatggttgtgtaaaaccagatggtgtaacatgtttgttagctttacaagcttgtgctaacttgggggcgttggattttggtaaacaagttcatgactttatcgatgaaaatggactcagtggtgctttgaatttgagtaacactctggtttcaatgtactcacgttgcgggtctatggataaggcttaccaagtattttatggaatgcgtgaaagaaacgtagtctcgtggacggctctgatctcgggtttagctatgaatgggtttggaaaagaagccattgaagctttcaacgaaatgttgaagtttggaatctctccagaggaacagacactcactggtttattgtctgcctgtagccattccgggctggtcgctgaaggaatgatgtttttcgatagaatgaggagtggtgaatttaagataaagccaaatttacatcactatggctgcgttgttgacctcttgggacgtgctcgtctacttgataaagcttacagtctcattaagtcaatggagatgaaaccggactcaaccatttggcgtacgcttctcggggcttgtagagtccatggagatgtggaacttggggaacgtgtgatctctcatctcatcgaactcaaagccgaagaagctggagattacgttctgttactcaacacatactccacggttgggaaatgggagaaagtgactgaattgcgttctttaatgaaggagaaaagaatccatactaaacctggatgcagcgcgatcgagctacaaggaaccgttcatgagtttatagtagacgatgtttcgcatccgcggaaggaagaaatctataaaatgctggcggaaatcaatcagcagctgaagattgcggggtatgtggcggaaattacatcggaactgcacaatcttgagtcagaagaagaaaagggatacgcgttaagataccatagcgagaagctagctatagcctttgggattctggtgactccaccaggaacaaccattagagtgaccaagaatctcagaacttgtgttgattgtcataattttgcaaagtttgtatctgatgtttatgatcgtatcgtgatcgttagagaccgttccagatttcatcattttaaaggcggctcttgctcttgtaatgacttttggtga

SEQ ID NO: 86148 - protein, 560 aa, Arabidopsis thaliana
  peptide (1)..(560): Ceres Seq. ID no. 12686894
  misc_feature (149)..(183): Pfam Name: PPR repeat Pfam Description: PPR repeat
  misc_feature (67)..(560): Homolog of NCBI NO: 15232821 NR Description: putative protein; protein id: At3g47530.1
  misc_feature (102)..(560): Homolog of NCBI NO: 34393394 NR Description: putative pentatricopeptide (PPR)
  misc_feature (131)..(560): Homolog of NCBI NO: 15223099 NR Description: unknown protein; protein id: At1g08070.1 thaliana] >gi|8778839|gb|AAF79838.1|AC026875_18 T6D22.15
  misc_feature (131)..(560): Homolog of NCBI NO: 29124127 NR Description: hypothetical protein [Oryza sativa (japonica
  misc_feature (131)..(560): Homolog of NCBI NO: 15240085 NR Description: selenium-binding protein-like; protein id:
  misc_feature (15)..(121): Homolog of NCBI NO: 15240085 NR Description: selenium-binding protein-like; protein id:
  misc_feature (37)..(560): Homolog of NCBI NO: 9279668 NR Description: selenium-binding protein-like [Arabidopsis
  misc_feature (37)..(560): Homolog of NCBI NO: 15231617 NR Description: unknown protein; protein id: At3g26780.1
  misc_feature (130)..(560): Homolog of NCBI NO: 15239745 NR Description: selenium-binding protein-like; protein id:
  misc_feature (109)..(560): Homolog of NCBI NO: 15235537 NR Description: putative protein; protein id: At4g37380.1
MLKSISSSSGDDHLLSLIVSSTGKLHLRQIHALLLRTSLIRNSDVFHHFLSRLALSLIPRDINYSCRVFSQRLNPTLSHCNTMIRAFSLSQTPCEGFRLFRSLRRNSSLPANPLSSSFALKCCIKSGDLLGGFTDACKVFDEIPKRDTVSWNVLFSCYLRNKRTRDVLVLFDKMKNDVDGCVKPDGVTCLLALQACANLGALDFGKQVHDFIDENGLSGALNLSNTLVSMYSRCGSMDKAYQVFYGMRERNVVSWTALISGLAMNGFGKEAIEAFNEMLKFGISPEEQTLTGLLSACSHSGLVAEGMMFFDRMRSGEFKIKPNLHHYGCVVDLLGRARLLDKAYSLIKSMEMKPDSTIWRTLLGACRVHGDVELGERVISHLIELKAEEAGDYVLLLNTYSTVGKWEKVTELRSLMKEKRIHTKPGCSAIELQGTVHEFIVDDVSHPRKEEIYKMLAEINQQLKIAGYVAEITSELHNLESEEEKGYALRYHSEKLAIAFGILVTPPGTTIRVTKNLRTCVDCHNFAKFVSDVYDRIVIVRDRSRFHHFKGGSCSCNDFW

SEQ ID NO: 86149 - protein, 478 aa, Arabidopsis thaliana
  peptide (1)..(478): Ceres Seq. ID no. 12686895
  misc_feature (67)..(101): Pfam Name: PPR repeat Pfam Description: PPR repeat
  misc_feature (1)..(478): Homolog of NCBI NO: 15232821 NR Description: putative protein; protein id: At3g47530.1
  misc_feature (20)..(478): Homolog of NCBI NO: 34393394 NR Description: putative pentatricopeptide (PPR)
  misc_feature (49)..(478): Homolog of NCBI NO: 15223099 NR Description: unknown protein; protein id: At1g08070.1 thaliana] >gi|8778839|gb|AAF79838.1|AC026875_18 T6D22.15
  misc_feature (49)..(478): Homolog of NCBI NO: 29124127 NR Description: hypothetical protein [Oryza sativa (japonica
  misc_feature (49)..(478): Homolog of NCBI NO: 15240085 NR Description: selenium-binding protein-like; protein id:
  misc_feature (1)..(39): Homolog of NCBI NO: 15240085 NR Description: selenium-binding protein-like; protein id:
  misc_feature (1)..(478): Homolog of NCBI NO: 9279668 NR Description: selenium-binding protein-like [Arabidopsis
  misc_feature (1)..(478): Homolog of NCBI NO: 15231617 NR Description: unknown protein; protein id: At3g26780.1
  misc_feature (48)..(478): Homolog of NCBI NO: 15239745 NR Description: selenium-binding protein-like; protein id:
  misc_feature (27)..(478): Homolog of NCBI NO: 15235537 NR Description: putative protein; protein id: At4g37380.1
MIRAFSLSQTPCEGFRLFRSLRRNSSLPANPLSSSFALKCCIKSGDLLGGFTDACKVFDEIPKRDTVSWNVLFSCYLRNKRTRDVLVLFDKMKNDVDGCVKPDGVTCLLALQACANLGALDFGKQVHDFIDENGLSGALNLSNTLVSMYSRCGSMDKAYQVFYGMRERNVVSWTALISGLAMNGFGKEAIEAFNEMLKFGISPEEQTLTGLLSACSHSGLVAEGMMFFDRMRSGEFKIKPNLHHYGCVVDLLGRARLLDKAYSLIKSMEMKPDSTIWRTLLGACRVHGDVELGERVISHLIELKAEEAGDYVLLLNTYSTVGKWEKVTELRSLMKEKRIHTKPGCSAIELQGTVHEFIVDDVSHPRKEEIYKMLAEINQQLKIAGYVAEITSELHNLESEEEKGYALRYHSEKLAIAFGILVTPPGTTIRVTKNLRTCVDCHNFAKFVSDVYDRIVIVRDRSRFHHFKGGSCSCNDFW

SEQ ID NO: 86150 - protein, 387 aa, Arabidopsis thaliana
  peptide (1)..(387): Ceres Seq. ID no. 12686896
  misc_feature (1)..(387): Homolog of NCBI NO: 15232821 NR Description: putative protein; protein id: At3g47530.1
  misc_feature (1)..(387): Homolog of NCBI NO: 34393394 NR Description: putative pentatricopeptide (PPR)
  misc_feature (1)..(387): Homolog of NCBI NO: 15223099 NR Description: unknown protein; protein id: At1g08070.1 thaliana] >gi|8778839|gb|AAF79838.1|AC026875_18 T6D22.15
  misc_feature (1)..(387): Homolog of NCBI NO: 29124127 NR Description: hypothetical protein [Oryza sativa (japonica
  misc_feature (1)..(387): Homolog of NCBI NO: 15240085 NR Description: selenium-binding protein-like; protein id:
  misc_feature (1)..(387): Homolog of NCBI NO: 9279668 NR Description: selenium-binding protein-like [Arabidopsis
  misc_feature (1)..(387): Homolog of NCBI NO: 15231617 NR Description: unknown protein; protein id: At3g26780.1
  misc_feature (1)..(387): Homolog of NCBI NO: 15239745 NR Description: selenium-binding protein-like; protein id:
  misc_feature (1)..(387): Homolog of NCBI NO: 15235537 NR Description: putative protein; protein id: At4g37380.1
  misc_feature (1)..(387): Homolog of NCBI NO: 8778758 NR Description: T30E16.32 [Arabidopsis thaliana]
MKNDVDGCVKPDGVTCLLALQACANLGALDFGKQVHDFIDENGLSGALNLSNTLVSMYSRCGSMDKAYQVFYGMRERNVVSWTALISGLAMNGFGKEAIEAFNEMLKFGISPEEQTLTGLLSACSHSGLVAEGMMFFDRMRSGEFKIKPNLHHYGCVVDLLGRARLLDKAYSLIKSMEMKPDSTIWRTLLGACRVHGDVELGERVISHLIELKAEEAGDYVLLLNTYSTVGKWEKVTELRSLMKEKRIHTKPGCSAIELQGTVHEFIVDDVSHPRKEEIYKMLAEINQQLKIAGYVAEITSELHNLESEEEKGYALRYHSEKLAIAFGILVTPPGTTIRVTKNLRTCVDCHNFAKFVSDVYDRIVIVRDRSRFHHFKGGSCSCNDFW

SEQ ID NO: 86151 - DNA, 924 bp, Arabidopsis thaliana
  misc_feature (1)..(924): Ceres Seq. ID no. 12686899
  misc_feature: MA Experiment ID: 108434 Result: Down-regulated in Transcription
  misc_feature: MA Experiment 108434 PARAMETER Experiment Name: At_Root_Tips_cDNA_P Parameter: Tissue Value: Root Tips
  misc_feature: MA Experiment ID: 108435 Result: Down-regulated in Transcription
  misc_feature: MA Experiment 108435 PARAMETER Experiment Name: At_stm_Mutants_cDNA_P Parameter: Plant Line Value: wt Landsburg vs stm
  misc_feature: MA Experiment 108435 PARAMETER Experiment Name: At_stm_Mutants_cDNA_P Parameter: Tissue Value: Shoot Apical Meristem Region
  misc_feature: MA Experiment ID: 108462 Result: Up-regulated in Transcription
  misc_feature: MA Experiment 108462 PARAMETER Experiment Name: At_Germinating_Seeds_cDNA_P Parameter: Age (day) Value: 2 vs. 0
  misc_feature: MA Experiment 108462 PARAMETER Experiment Name: At_Germinating_Seeds_cDNA_P Parameter: Tissue Value: Germinating Seeds
  misc_feature: MA Experiment ID: 108463 Result: Up-regulated in Transcription
  misc_feature: MA Experiment 108463 PARAMETER Experiment Name: At_Germinating_Seeds_cDNA_P Parameter: Age (day) Value: 3 vs. 0
  misc_feature: MA Experiment 108463 PARAMETER Experiment Name: At_Germinating_Seeds_cDNA_P Parameter: Tissue Value: Germinating Seeds
  misc_feature: MA Experiment ID: 108464 Result: Up-regulated in Transcription
  misc_feature: MA Experiment 108464 PARAMETER Experiment Name: At_Germinating_Seeds_cDNA_P Parameter: Age (day) Value: 4 vs. 0
  misc_feature: MA Experiment 108464 PARAMETER Experiment Name: At_Germinating_Seeds_cDNA_P Parameter: Tissue Value: Germinating Seeds
  misc_feature: MA Experiment ID: 108595 Result: Down-regulated in Transcription
  misc_feature: MA Experiment 108595 PARAMETER Experiment Name: At_Ler-pi_Ovule_cDNA_P Parameter: Plant Line Value: null
  misc_feature: MA Experiment ID: 20000071 Result: Down-regulated in Transcription
  misc_feature: MA Experiment 20000071 PARAMETER Experiment Name: At_100uM_ABA_Mutants_cDNA_P Parameter: Plant Line Value: CS8104
  misc_feature: MA Experiment 20000071 PARAMETER Experiment Name: At_100uM_ABA_Mutants_cDNA_P Parameter: Timepoint (hr) Value: 6
  misc_feature: MA Experiment 20000071 PARAMETER Experiment Name: At_100uM_ABA_Mutants_cDNA_P Parameter: Tissue Value: Aerial
  misc_feature: MA Experiment 20000071 PARAMETER Experiment Name: At_100uM_ABA_Mutants_cDNA_P Parameter: Treatment Value: 100uM ABA vs. No Treatment
  misc_feature: MA Experiment ID: 20000117 Result: Down-regulated in Transcription
  misc_feature: MA Experiment 20000117 PARAMETER Experiment Name: At_100uM_ABA_Mutants_cDNA_P Parameter: Plant Line Value: Columbia
  misc_feature: MA Experiment 20000117 PARAMETER Experiment Name: At_100uM_ABA_Mutants_cDNA_P Parameter: Timepoint (hr) Value: 6
  misc_feature: MA Experiment 20000117 PARAMETER Experiment Name: At_100uM_ABA_Mutants_cDNA_P Parameter: Tissue Value: Aerial
  misc_feature: MA Experiment 20000117 PARAMETER Experiment Name: At_100uM_ABA_Mutants_cDNA_P Parameter: Treatment Value: 100uM ABA vs. No Treatment
  misc_feature: MA Experiment ID: 20000179 Result: Up-regulated in Transcription
  misc_feature: MA Experiment 20000179 PARAMETER Experiment Name: At_Germinating_Seeds_P Parameter: Age (hr) Value: 6 vs. 0
  misc_feature: MA Experiment 20000179 PARAMETER Experiment Name: At_Germinating_Seeds_P Parameter: Tissue Value: Germinating Seeds
  misc_feature: MA Experiment ID: 20000180 Result: Up-regulated in Transcription
  misc_feature: MA Experiment 20000180 PARAMETER Experiment Name: At_Germinating_Seeds_P Parameter: Age (hr) Value: 24 vs. 0
  misc_feature: MA Experiment 20000180 PARAMETER Experiment Name: At_Germinating_Seeds_P Parameter: Tissue Value: Germinating Seeds
  misc_feature: MA Experiment ID: 20000185 Result: Down-regulated in Transcription
  misc_feature: MA Experiment 20000185 PARAMETER Experiment Name: At_Roots__P Parameter: Age (day) Value: 7 vs. 21
  misc_feature: MA Experiment 20000185 PARAMETER Experiment Name: At_Roots__P Parameter: Organism Value: A. thaliana
  misc_feature: MA Experiment 20000185 PARAMETER Experiment Name: At_Roots__P Parameter: Tissue Value: Roots vs. Whole Plant
  misc_feature: MA Experiment ID: 20000224 Result: Up-regulated in Transcription
  misc_feature: MA Experiment ID: 20000234 Result: Down-regulated in Transcription
  misc_feature: MA Experiment 20000234 PARAMETER Experiment Name: At_Siliques_P Parameter: Age (day) Value: 21
  misc_feature: MA Experiment 20000234 PARAMETER Experiment Name: At_Siliques_P Parameter: Organism Value: A. thaliana
  misc_feature: MA Experiment 20000234 PARAMETER Experiment Name: At_Siliques_P Parameter: Plant Line Value: WS
  misc_feature: MA Experiment 20000234 PARAMETER Experiment Name: At_Siliques_P Parameter: Tissue Value: Less Than 5mm Siliques vs. Whole Plant
  misc_feature: MA Experiment ID: 20000235 Result: Down-regulated in Transcription
  misc_feature: MA Experiment 20000235 PARAMETER Experiment Name: At_Siliques_P Parameter: Age (day) Value: 21
  misc_feature: MA Experiment 20000235 PARAMETER Experiment Name: At_Siliques_P Parameter: Organism Value: A. thaliana
  misc_feature: MA Experiment 20000235 PARAMETER Experiment Name: At_Siliques_P Parameter: Plant Line Value: WS
  misc_feature: MA Experiment 20000235 PARAMETER Experiment Name: At_Siliques_P Parameter: Tissue Value: 5-10mm Siliques vs. Whole Plant
  misc_feature: MA Experiment ID: 20000264 Result: Down-regulated in Transcription
  misc_feature: MA Experiment 20000264 PARAMETER Experiment Name: At_Open_Flower_P Parameter: Age (day) Value: 21
  misc_feature: MA Experiment 20000264 PARAMETER Experiment Name: At_Open_Flower_P Parameter: Plant Line Value: WS
  misc_feature: MA Experiment 20000264 PARAMETER Experiment Name: At_Open_Flower_P Parameter: Tissue Value: Open Flower vs. Whole Plant
  misc_feature: MA Experiment ID: 20000265 Result: Down-regulated in Transcription
  misc_feature: MA Experiment 20000265 PARAMETER Experiment Name: At_Open_Flower_P Parameter: Age (day) Value: 21
  misc_feature: MA Experiment 20000265 PARAMETER Experiment Name: At_Open_Flower_P Parameter: Plant Line Value: WS
  misc_feature: MA Experiment 20000265 PARAMETER Experiment Name: At_Open_Flower_P Parameter: Tissue Value: Closed Flower vs. Whole Plant
  misc_feature: MA Experiment ID: 20000286 Result: Down-regulated in Transcription
  misc_feature: MA Experiment 20000286 PARAMETER Experiment Name: At_Open_Flower_P Parameter: Age (day) Value: 21
  misc_feature: MA Experiment 20000286 PARAMETER Experiment Name: At_Open_Flower_P Parameter: Plant Line Value: WS
  misc_feature: MA Experiment 20000286 PARAMETER Experiment Name: At_Open_Flower_P Parameter: Tissue Value: Half Open vs. Whole Plant
  misc_feature: MA Experiment ID: 20000436 Result: Down-regulated in Transcription
  misc_feature: MA Experiment 20000436 PARAMETER Experiment Name: At_Drought_P Parameter: Age (day) Value: 7
  misc_feature: MA Experiment 20000436 PARAMETER Experiment Name: At_Drought_P Parameter: Organism Value: A. thaliana
  misc_feature: MA Experiment 20000436 PARAMETER Experiment Name: At_Drought_P Parameter: Plant Line Value: WS
  misc_feature: MA Experiment 20000436 PARAMETER Experiment Name: At_Drought_P Parameter: Timepoint (hr) Value: 12
  misc_feature: MA Experiment 20000436 PARAMETER Experiment Name: At_Drought_P Parameter: Tissue Value: Whole Plant
  misc_feature: MA Experiment 20000436 PARAMETER Experiment Name: At_Drought_P Parameter: Treatment Value: Drought vs. No Drought
  misc_feature: MA Experiment ID: 20000437 Result: Down-regulated in Transcription
  misc_feature: MA Experiment 20000437 PARAMETER Experiment Name: At_Drought_P Parameter: Age (day) Value: 8
  misc_feature: MA Experiment 20000437 PARAMETER Experiment Name: At_Drought_P Parameter: Organism Value: A. thaliana
  misc_feature: MA Experiment 20000437 PARAMETER Experiment Name: At_Drought_P Parameter: Plant Line Value: WS
  misc_feature: MA Experiment 20000437 PARAMETER Experiment Name: At_Drought_P Parameter: Timepoint (hr) Value: 24
  misc_feature: MA Experiment 20000437 PARAMETER Experiment Name: At_Drought_P Parameter: Tissue Value: Whole Plant
  misc_feature: MA Experiment 20000437 PARAMETER Experiment Name: At_Drought_P Parameter: Treatment Value: Drought vs. No Drought
  misc_feature: MA Experiment ID: 20000439 Result: Down-regulated in Transcription
  misc_feature: MA Experiment 20000439 PARAMETER Experiment Name: At_Roots__P Parameter: Age (day) Value: 14 vs. 21
  misc_feature: MA Experiment 20000439 PARAMETER Experiment Name: At_Roots__P Parameter: Organism Value: A. thaliana
  misc_feature: MA Experiment 20000439 PARAMETER Experiment Name: At_Roots__P Parameter: Tissue Value: Roots vs. Whole Plant
  misc_feature: MA Experiment ID: 20000794 Result: Down-regulated in Transcription
  misc_feature: MA Experiment 20000794 PARAMETER Experiment Name: At_Petals_P Parameter: Age (day) Value: 23-25 days
  misc_feature: MA Experiment 20000794 PARAMETER Experiment Name: At_Petals_P Parameter: Plant Line Value: WS
  misc_feature: MA Experiment 20000794 PARAMETER Experiment Name: At_Petals_P Parameter: Tissue Value: Petals vs. Whole plant
  misc_feature: MA Experiment ID: 20001248 Result: Down-regulated in Transcription
  misc_feature: MA Experiment 20001248 PARAMETER Experiment Name: At_Far-red-induction_P Parameter: Age (day) Value: 7
  misc_feature: MA Experiment 20001248 PARAMETER Experiment Name: At_Far-red-induction_P Parameter: Light Value: Far-red vs. White
  misc_feature: MA Experiment 20001248 PARAMETER Experiment Name: At_Far-red-induction_P Parameter: Organism Value: A. thaliana
  misc_feature: MA Experiment 20001248 PARAMETER Experiment Name: At_Far-red-induction_P Parameter: Plant Line Value: Columbia
  misc_feature: MA Experiment 20001248 PARAMETER Experiment Name: At_Far-red-induction_P Parameter: Timepoint (hr) Value: 4
  misc_feature: MA Experiment 20001248 PARAMETER Experiment Name: At_Far-red-induction_P Parameter: Tissue Value: Whole Plant
  misc_feature: MA Experiment ID: 20001904 Result: Down-regulated in Transcription
  misc_feature: MA Experiment 20001904 PARAMETER Experiment Name: At_Drought_Reproduction_P Parameter: Age (day) Value: 37
  misc_feature: MA Experiment 20001904 PARAMETER Experiment Name: At_Drought_Reproduction_P Parameter: Organism Value: A. thaliana
  misc_feature: MA Experiment 20001904 PARAMETER Experiment Name: At_Drought_Reproduction_P Parameter: Plant Line Value: WS
  misc_feature: MA Experiment 20001904 PARAMETER Experiment Name: At_Drought_Reproduction_P Parameter: Timepoint (day) Value: 7
  misc_feature: MA Experiment 20001904 PARAMETER Experiment Name: At_Drought_Reproduction_P Parameter: Tissue Value: Rosettes
  misc_feature: MA Experiment 20001904 PARAMETER Experiment Name: At_Drought_Reproduction_P Parameter: Treatment Value: Drought vs. No Drought
  misc_feature: MA Experiment ID: 20001905 Result: Down-regulated in Transcription
  misc_feature: MA Experiment 20001905 PARAMETER Experiment Name: At_Drought_Reproduction_P Parameter: Age (day) Value: 40
  misc_feature: MA Experiment 20001905 PARAMETER Experiment Name: At_Drought_Reproduction_P Parameter: Organism Value: A. thaliana
  misc_feature: MA Experiment 20001905 PARAMETER Experiment Name: At_Drought_Reproduction_P Parameter: Plant Line Value: WS
  misc_feature: MA Experiment 20001905 PARAMETER Experiment Name: At_Drought_Reproduction_P Parameter: Timepoint (day) Value: 10
  misc_feature: MA Experiment 20001905 PARAMETER Experiment Name: At_Drought_Reproduction_P Parameter: Tissue Value: Rosettes
  misc_feature: MA Experiment 20001905 PARAMETER Experiment Name: At_Drought_Reproduction_P Parameter: Treatment Value: Drought vs. No Drought
  misc_feature: MA Experiment ID: 20001906 Result: Down-regulated in Transcription
  misc_feature: MA Experiment 20001906 PARAMETER Experiment Name: At_Drought_Reproduction_P Parameter: Age (day) Value: 35
  misc_feature: MA Experiment 20001906 PARAMETER Experiment Name: At_Drought_Reproduction_P Parameter: Organism Value: A. thaliana
  misc_feature: MA Experiment 20001906 PARAMETER Experiment Name: At_Drought_Reproduction_P Parameter: Plant Line Value: WS
  misc_feature: MA Experiment 20001906 PARAMETER Experiment Name: At_Drought_Reproduction_P Parameter: Timepoint (day) Value: 5
  misc_feature: MA Experiment 20001906 PARAMETER Experiment Name: At_Drought_Reproduction_P Parameter: Tissue Value: Siliques
  misc_feature: MA Experiment 20001906 PARAMETER Experiment Name: At_Drought_Reproduction_P Parameter: Treatment Value: Drought vs. No Drought
aaggagacccaaatttcctgcaacaaacaaagtaaaaaagttgagaatggattcatcgcagggaagtacacaacagaagattgtgattctgaacagccacaatgagaacctggtgggtctgcttcatgaaactggttctacagaaattgtagtcttgtgtcatggctttcgatcaaacaagaacttcgaaattatgaaaaatgtggctgttgctatagagagagaagggattagtgctttccgttttgatttctccgggaatggagagagtgaaggcagtttctattatggtaactacaattacgaagctgatgatctacattctgttatccaatacttctctaacttgaaccgtgttgttactataattctcggtcacagtaaaggaggtgatgtggtcctcctctatgcctccaagtatcacgatatccccaatgtgatcaatctctcgggacgttatgatctgaagaaaggcataggagaacgtcttggtgaagattttttggaaagaattaagcaacaaggatacatcgatgttaaagatggagattctggttaccgtgttaccgaggagagtttgatggaccggttaaacacagatatgcatgaagcttgcctcaagattgacaaagaatgcagggtcttgacggtccatggatcgggtgacgagacagtaccagtggaagatgcaaaggagtttgcaaagataataccgaaccacgagctacagattgtggaaggagctgatcattgttataccaattatcaaagtcaattggttttaacggttatggagttcataaagagtcattgtgaagaaaaaaacgacaagacttgtaattgaccctccaatattgcattggacatttatttatgtttggttgaccaaataaatttataaaaggtaaataaaaatataatact

SEQ ID NO: 86152 - protein, 280 aa, Arabidopsis thaliana
  peptide (1)..(280): Ceres Seq. ID no. 12686900
  misc_feature (16)..(280): Homolog of NCBI NO: 15232826 NR Description: putative protein; protein id: At3g47560.1, by cDNA: 262295. [Arabidopsis thaliana] >gi|11281956|pir||T45716
  misc_feature (16)..(280): Homolog of NCBI NO: 22135864 NR Description: putative protein [Arabidopsis thaliana]
  misc_feature (16)..(280): Homolog of NCBI NO: 21554728 NR Description: putative esterase [Arabidopsis thaliana]
  misc_feature (16)..(275): Homolog of NCBI NO: 15220578 NR Description: hypothetical protein; protein id: At1g29840.1
  misc_feature (9)..(275): Homolog of NCBI NO: 15228202 NR Description: putative protein; protein id: At3g47590.1
  misc_feature (26)..(276): Homolog of NCBI NO: 15224799 NR Description: putative esterase; protein id: At2g19550.1
  misc_feature (24)..(270): Homolog of NCBI NO: 34913068 NR Description: P0013G02.26 [Oryza sativa (japonica
  misc_feature (18)..(269): Homolog of NCBI NO: 34913064 NR Description: P0013G02.24 [Oryza sativa (japonica
  misc_feature (25)..(278): Homolog of NCBI NO: 11358640 NR Description: probable esterase-like protein - Arabidopsis
  misc_feature (25)..(278): Homolog of NCBI NO: 18416707 NR Description: putative esterase - like protein; protein id:
RRPKFPATNKVKKLRMDSSQGSTQQKIVILNSHNENLVGLLHETGSTEIVVLCHGFRSNKNFEIMKNVAVAIEREGISAFRFDFSGNGESEGSFYYGNYNYEADDLHSVIQYFSNLNRVVTIILGHSKGGDVVLLYASKYHDIPNVINLSGRYDLKKGIGERLGEDFLERIKQQGYIDVKDGDSGYRVTEESLMDRLNTDMHEACLKIDKECRVLTVHGSGDETVPVEDAKEFAKIIPNHELQIVEGADHCYTNYQSQLVLTVMEFIKSHCEEKNDKTCN

SEQ ID NO: 86153 - protein, 265 aa, Arabidopsis thaliana
  peptide (1)..(265): Ceres Seq. ID no. 12686901
  misc_feature (1)..(265): Homolog of NCBI NO: 15232826 NR Description: putative protein; protein id: At3g47560.1, by cDNA: 262295. [Arabidopsis thaliana] >gi|11281956|pir||T45716
  misc_feature (1)..(265): Homolog of NCBI NO: 22135864 NR Description: putative protein [Arabidopsis thaliana]
  misc_feature (1)..(265): Homolog of NCBI NO: 21554728 NR Description: putative esterase [Arabidopsis thaliana]
  misc_feature (1)..(260): Homolog of NCBI NO: 15220578 NR Description: hypothetical protein; protein id: At1g29840.1
  misc_feature (1)..(260): Homolog of NCBI NO: 15228202 NR Description: putative protein; protein id: At3g47590.1
  misc_feature (11)..(261): Homolog of NCBI NO: 15224799 NR Description: putative esterase; protein id: At2g19550.1
  misc_feature (9)..(255): Homolog of NCBI NO: 34913068 NR Description: P0013G02.26 [Oryza sativa (japonica
  misc_feature (3)..(254): Homolog of NCBI NO: 34913064 NR Description: P0013G02.24 [Oryza sativa (japonica
  misc_feature (10)..(263): Homolog of NCBI NO: 11358640 NR Description: probable esterase-like protein - Arabidopsis
  misc_feature (10)..(263): Homolog of NCBI NO: 18416707 NR Description: putative esterase - like protein; protein id:
MDSSQGSTQQKIVILNSHNENLVGLLHETGSTEIVVLCHGFRSNKNFEIMKNVAVAIEREGISAFRFDFSGNGESEGSFYYGNYNYEADDLHSVIQYFSNLNRVVTIILGHSKGGDVVLLYASKYHDIPNVINLSGRYDLKKGIGERLGEDFLERIKQQGYIDVKDGDSGYRVTEESLMDRLNTDMHEACLKIDKECRVLTVHGSGDETVPVEDAKEFAKIIPNHELQIVEGADHCYTNYQSQLVLTVMEFIKSHCEEKNDKTCN

SEQ ID NO: 86154 - protein, 216 aa, Arabidopsis thaliana; identical to SEQ ID NO: 37014
  peptide (1)..(216): Ceres Seq. ID no. 12686902
  misc_feature (1)..(216): Homolog of NCBI NO: 15232826 NR Description: putative protein; protein id: At3g47560.1, by cDNA: 262295. [Arabidopsis thaliana] >gi|11281956|pir||T45716
  misc_feature (1)..(216): Homolog of NCBI NO: 22135864 NR Description: putative protein [Arabidopsis thaliana]
  misc_feature (1)..(216): Homolog of NCBI NO: 21554728 NR Description: putative esterase [Arabidopsis thaliana]
  misc_feature (1)..(211): Homolog of NCBI NO: 15220578 NR Description: hypothetical protein; protein id: At1g29840.1
  misc_feature (1)..(211): Homolog of NCBI NO: 15228202 NR Description: putative protein; protein id: At3g47590.1
  misc_feature (1)..(212): Homolog of NCBI NO: 15224799 NR Description: putative esterase; protein id: At2g19550.1
  misc_feature (1)..(206): Homolog of NCBI NO: 34913068 NR Description: P0013G02.26 [Oryza sativa (japonica
  misc_feature (1)..(205): Homolog of NCBI NO: 34913064 NR Description: P0013G02.24 [Oryza sativa (japonica
  misc_feature (1)..(214): Homolog of NCBI NO: 11358640 NR Description: probable esterase-like protein - Arabidopsis
  misc_feature (1)..(214): Homolog of NCBI NO: 18416707 NR Description: putative esterase - like protein; protein id:

SEQ ID NO: 86155 - DNA, 831 bp, Arabidopsis thaliana
  misc_feature (1)..(831): Ceres Seq. ID no. 12686910
  misc_feature: MA Experiment ID: 20000306 Result: Up-regulated in Transcription
  misc_feature: MA Experiment 20000306 PARAMETER Experiment Name: At_Germinating_Seeds_Sub_P Parameter: Age (hr) Value: 6 vs. 0
  misc_feature: MA Experiment 20000306 PARAMETER Experiment Name: At_Germinating_Seeds_Sub_P Parameter: Organism Value: A. thaliana
  misc_feature: MA Experiment 20000306 PARAMETER Experiment Name: At_Germinating_Seeds_Sub_P Parameter: Plant Line Value: WS
  misc_feature: MA Experiment 20000306 PARAMETER Experiment Name: At_Germinating_Seeds_Sub_P Parameter: Tissue Value: Germinating Seeds
  misc_feature: MA Experiment ID: 20000307 Result: Up-regulated in Transcription
  misc_feature: MA Experiment 20000307 PARAMETER Experiment Name: At_Germinating_Seeds_Sub_P Parameter: Age (hr) Value: 24 vs. 0
  misc_feature: MA Experiment 20000307 PARAMETER Experiment Name: At_Germinating_Seeds_Sub_P Parameter: Organism Value: A. thaliana
  misc_feature: MA Experiment 20000307 PARAMETER Experiment Name: At_Germinating_Seeds_Sub_P Parameter: Plant Line Value: WS
  misc_feature: MA Experiment 20000307 PARAMETER Experiment Name: At_Germinating_Seeds_Sub_P Parameter: Tissue Value: Germinating Seeds
  misc_feature: MA Experiment ID: 20000315 Result: Down-regulated in Transcription
  misc_feature: MA Experiment 20000315 PARAMETER Experiment Name: At_14day_Shoots-Roots_Sub_P Parameter: Age (day) Value: 14
  misc_feature: MA Experiment 20000315 PARAMETER Experiment Name: At_14day_Shoots-Roots_Sub_P Parameter: Organism Value: A. thaliana
  misc_feature: MA Experiment 20000315 PARAMETER Experiment Name: At_14day_Shoots-Roots_Sub_P Parameter: Plant Line Value: WS
  misc_feature: MA Experiment 20000315 PARAMETER Experiment Name: At_14day_Shoots-Roots_Sub_P Parameter: Tissue Value: Shoots vs. Whole Plant
  misc_feature: MA Experiment ID: 20000355 Result: Up-regulated in Transcription
  misc_feature: MA Experiment 20000355 PARAMETER Experiment Name: At_Siliques_Sub_P Parameter: Age (day) Value: 21
  misc_feature: MA Experiment 20000355 PARAMETER Experiment Name: At_Siliques_Sub_P Parameter: Organism Value: A. thaliana
  misc_feature: MA Experiment 20000355 PARAMETER Experiment Name: At_Siliques_Sub_P Parameter: Plant Line Value: WS
  misc_feature: MA Experiment 20000355 PARAMETER Experiment Name: At_Siliques_Sub_P Parameter: Tissue Value: Less Than 5mm Siliques vs. Whole Plant
  misc_feature: MA Experiment ID: 20000440 Result: Up-regulated in Transcription
  misc_feature: MA Experiment 20000440 PARAMETER Experiment Name: At_Closed-Flower__Sub_P Parameter: Tissue Value: Closed Flower vs. Whole Plant
atggcgacgaacatcggaatgatggatagtgcatacttcgtcggaagaaacgagattctgacttggattaatgatcgtcttcacctcaatctctctcgcgtcgaagaggctgcatctggtgctgtgcaatgtcagatgcttgatatgacatttccaggagttgtgccaatgcacaaggttaactttgatgcaaagaacgagtacgatatgatacaaaactacaaggtcttgcaagatgtgttcaacaagctgaaaattacaaagccattggaaattaacaggcttgtcaaaggccggccactggataacttggagtttctgcaatggctgaaacgtttctgtgattccattaatggtggcattatgaatgagaactataatccagtggagcgaagatcaagaaatggtaaagagaggagtgtgaagggatctaataagattccaaagtcactgcaaacaaacaataaccatcctccacccaattccagttcagttggtcttagcaaagcatcagggcccaagtcagcaaaagcagctgaagtgcaggctttgtcgaaggagctcgtggatctcaagatctctactgatctcttggaaaaagaaagagacttttacttctccaagctccgggatgtagagatactctgccaaactcctgagctagatgatcttccgatagtggtagcagtgaagaagatactgtatgcaaccgatgcaaatgaatctgcattagaagacgctcaagagtacctaaaccagtccctaggagttgaagatgatgaagctgaaggaaacggagaacaactggaagaagaaaagactcaagcctaa

SEQ ID NO: 86156 - protein, 276 aa, Arabidopsis thaliana
  peptide (1)..(276): Ceres Seq. ID no. 12686911
  misc_feature (197)..(244): Pfam Name: EB1-like C-terminal motif Pfam Description: EB1-like C-terminal motif
  misc_feature (1)..(276): Homolog of NCBI NO: 32815913 NR Description: At3g47690 [Arabidopsis thaliana]
  misc_feature (1)..(275): Homolog of NCBI NO: 15241860 NR Description: microtubule-associated protein EB1-like protein; id: At5g62500.1, supported by cDNA: 112876. [Arabidopsis
  misc_feature (2)..(262): Homolog of NCBI NO: 38344911 NR Description: OSJNBb0079B02.14 [Oryza sativa (japonica
  misc_feature (1)..(178): Homolog of NCBI NO: 26450360 NR Description: putative microtubule-associated protein EB1
  misc_feature (2)..(253): Homolog of NCBI NO: 37535740 NR Description: putative microtubule-associated protein [Oryza
  misc_feature (1)..(175): Homolog of NCBI NO: 15240262 NR Description: putative protein; protein id: At5g67270.1, by cDNA: 38358. [Arabidopsis thaliana]
  misc_feature (3)..(264): Homolog of NCBI NO: 29124955 NR Description: microtubule-associated protein EB1 [Chlamydomonas
  misc_feature (1)..(166): Homolog of NCBI NO: 10800412 NR Description: microtubule-associated protein, RP/EB family,
  misc_feature (1)..(166): Homolog of NCBI NO: 12751130 NR Description: EBF3-L [Homo sapiens]
  misc_feature (148)..(246): Homolog of NCBI NO: 10800412 NR Description: microtubule-associated protein, RP/EB family,
MATNIGMMDSAYFVGRNEILTWINDRLHLNLSRVEEAASGAVQCQMLDMTFPGVVPMHKVNFDAKNEYDMIQNYKVLQDVFNKLKITKPLEINRLVKGRPLDNLEFLQWLKRFCDSINGGIMNENYNPVERRSRNGKERSVKGSNKIPKSLQTNNNHPPPNSSSVGLSKASGPKSAKAAEVQALSKELVDLKISTDLLEKERDFYFSKLRDVEILCQTPELDDLPIVVAVKKILYATDANESALEDAQEYLNQSLGVEDDEAEGNGEQLEEEKTQA

SEQ ID NO: 86157 - protein, 270 aa, Arabidopsis thaliana
  peptide (1)..(270): Ceres Seq. ID no. 12686912
  misc_feature (191)..(238): Pfam Name: EB1-like C-terminal motif Pfam Description: EB1-like C-terminal motif
  misc_feature (1)..(270): Homolog of NCBI NO: 32815913 NR Description: At3g47690 [Arabidopsis thaliana]
  misc_feature (1)..(269): Homolog of NCBI NO: 15241860 NR Description: microtubule-associated protein EB1-like protein; id: At5g62500.1, supported by cDNA: 112876. [Arabidopsis
  misc_feature (1)..(256): Homolog of NCBI NO: 38344911 NR Description: OSJNBb0079B02.14 [Oryza sativa (japonica
  misc_feature (1)..(172): Homolog of NCBI NO: 26450360 NR Description: putative microtubule-associated protein EB1
  misc_feature (1)..(247): Homolog of NCBI NO: 37535740 NR Description: putative microtubule-associated protein [Oryza
  misc_feature (1)..(169): Homolog of NCBI NO: 15240262 NR Description: putative protein; protein id: At5g67270.1, by cDNA: 38358. [Arabidopsis thaliana]
  misc_feature (1)..(258): Homolog of NCBI NO: 29124955 NR Description: microtubule-associated protein EB1 [Chlamydomonas
  misc_feature (1)..(160): Homolog of NCBI NO: 10800412 NR Description: microtubule-associated protein, RP/EB family,
  misc_feature (1)..(160): Homolog of NCBI NO: 12751130 NR Description: EBF3-L [Homo sapiens]
  misc_feature (142)..(240): Homolog of NCBI NO: 10800412 NR Description: microtubule-associated protein, RP/EB family,
MMDSAYFVGRNEILTWINDRLHLNLSRVEEAASGAVQCQMLDMTFPGVVPMHKVNFDAKNEYDMIQNYKVLQDVFNKLKITKPLEINRLVKGRPLDNLEFLQWLKRFCDSINGGIMNENYNPVERRSRNGKERSVKGSNKIPKSLQTNNNHPPPNSSSVGLSKASGPKSAKAAEVQALSKELVDLKISTDLLEKERDFYFSKLRDVEILCQTPELDDLPIVVAVKKILYATDANESALEDAQEYLNQSLGVEDDEAEGNGEQLEEEKTQA

SEQ ID NO: 86158 - protein, 269 aa, Arabidopsis thaliana
  peptide (1)..(269): Ceres Seq. ID no. 12686913
  misc_feature (190)..(237): Pfam Name: EB1-like C-terminal motif Pfam Description: EB1-like C-terminal motif
  misc_feature (1)..(269): Homolog of NCBI NO: 32815913 NR Description: At3g47690 [Arabidopsis thaliana]
  misc_feature (1)..(268): Homolog of NCBI NO: 15241860 NR Description: microtubule-associated protein EB1-like protein; id: At5g62500.1, supported by cDNA: 112876. [Arabidopsis
  misc_feature (1)..(255): Homolog of NCBI NO: 38344911 NR Description: OSJNBb0079B02.14 [Oryza sativa (japonica
  misc_feature (1)..(171): Homolog of NCBI NO: 26450360 NR Description: putative microtubule-associated protein EB1
  misc_feature (1)..(246): Homolog of NCBI NO: 37535740 NR Description: putative microtubule-associated protein [Oryza
  misc_feature (1)..(168): Homolog of NCBI NO: 15240262 NR Description: putative protein; protein id: At5g67270.1, by cDNA: 38358. [Arabidopsis thaliana]
  misc_feature (1)..(257): Homolog of NCBI NO: 29124955 NR Description: microtubule-associated protein EB1 [Chlamydomonas
  misc_feature (1)..(159): Homolog of NCBI NO: 10800412 NR Description: microtubule-associated protein, RP/EB family,
  misc_feature (1)..(159): Homolog of NCBI NO: 12751130 NR Description: EBF3-L [Homo sapiens]
  misc_feature (141)..(239): Homolog of NCBI NO: 10800412 NR Description: microtubule-associated protein, RP/EB family,
MDSAYFVGRNEILTWINDRLHLNLSRVEEAASGAVQCQMLDMTFPGVVPMHKVNFDAKNEYDMIQNYKVLQDVFNKLKITKPLEINRLVKGRPLDNLEFLQWLKRFCDSINGGIMNENYNPVERRSRNGKERSVKGSNKIPKSLQTNNNHPPPNSSSVGLSKASGPKSAKAAEVQALSKELVDLKISTDLLEKERDFYFSKLRDVEILCQTPELDDLPIVVAVKKILYATDANESALEDAQEYLNQSLGVEDDEAEGNGEQLEEEKTQA

SEQ ID NO: 86159 - DNA, 1077 bp, Arabidopsis thaliana
  misc_feature (1)..(1077): Ceres Seq. ID no. 12686922
  misc_feature: MA Experiment ID: 20000173 Result: Down-regulated in Transcription
  misc_feature: MA Experiment 20000173 PARAMETER Experiment Name: At_42deg_Heat_P Parameter: Age (day) Value: 14
  misc_feature: MA Experiment 20000173 PARAMETER Experiment Name: At_42deg_Heat_P Parameter: Organism Value: A. thaliana
  misc_feature: MA Experiment 20000173 PARAMETER Experiment Name: At_42deg_Heat_P Parameter: Plant Line Value: WS
  misc_feature: MA Experiment 20000173 PARAMETER Experiment Name: At_42deg_Heat_P Parameter: Temperature (deg C) Value: 42 vs. 22
  misc_feature: MA Experiment 20000173 PARAMETER Experiment Name: At_42deg_Heat_P Parameter: Timepoint (hr) Value: 6
  misc_feature: MA Experiment 20000173 PARAMETER Experiment Name: At_42deg_Heat_P Parameter: Tissue Value: Aerial
  misc_feature: MA Experiment ID: 20000184 Result: Down-regulated in Transcription
  misc_feature: MA Experiment 20000184 PARAMETER Experiment Name: At_Shoots__P Parameter: Age (day) Value: 7
  misc_feature: MA Experiment 20000184 PARAMETER Experiment Name: At_Shoots__P Parameter: Tissue Value: Shoots vs. Whole Plant
  misc_feature: MA Experiment ID: 20000185 Result: Down-regulated in Transcription
  misc_feature: MA Experiment 20000185 PARAMETER Experiment Name: At_Roots__P Parameter: Age (day) Value: 7 vs. 21
  misc_feature: MA Experiment 20000185 PARAMETER Experiment Name: At_Roots__P Parameter: Organism Value: A. thaliana
  misc_feature: MA Experiment 20000185 PARAMETER Experiment Name: At_Roots__P Parameter: Tissue Value: Roots vs. Whole Plant
  misc_feature: MA Experiment ID: 20000234 Result: Down-regulated in Transcription
  misc_feature: MA Experiment 20000234 PARAMETER Experiment Name: At_Siliques_P Parameter: Age (day) Value: 21
  misc_feature: MA Experiment 20000234 PARAMETER Experiment Name: At_Siliques_P Parameter: Organism Value: A. thaliana
  misc_feature: MA Experiment 20000234 PARAMETER Experiment Name: At_Siliques_P Parameter: Plant Line Value: WS
  misc_feature: MA Experiment 20000234 PARAMETER Experiment Name: At_Siliques_P Parameter: Tissue Value: Less Than 5mm Siliques vs. Whole Plant
  misc_feature: MA Experiment ID: 20000235 Result: Down-regulated in Transcription
  misc_feature: MA Experiment 20000235 PARAMETER Experiment Name: At_Siliques_P Parameter: Age (day) Value: 21
  misc_feature: MA Experiment 20000235 PARAMETER Experiment Name: At_Siliques_P Parameter: Organism Value: A. thaliana
  misc_feature: MA Experiment 20000235 PARAMETER Experiment Name: At_Siliques_P Parameter: Plant Line Value: WS
  misc_feature: MA Experiment 20000235 PARAMETER Experiment Name: At_Siliques_P Parameter: Tissue Value: 5-10mm Siliques vs. Whole Plant
  misc_feature: MA Experiment ID: 20000264 Result: Down-regulated in Transcription
  misc_feature: MA Experiment 20000264 PARAMETER Experiment Name: At_Open_Flower_P Parameter: Age (day) Value: 21
  misc_feature: MA Experiment 20000264 PARAMETER Experiment Name: At_Open_Flower_P Parameter: Plant Line Value: WS
  misc_feature: MA Experiment 20000264 PARAMETER Experiment Name: At_Open_Flower_P Parameter: Tissue Value: Open Flower vs. Whole Plant
  misc_feature: MA Experiment ID: 20000265 Result: Down-regulated in Transcription
  misc_feature: MA Experiment 20000265 PARAMETER Experiment Name: At_Open_Flower_P Parameter: Age (day) Value: 21
  misc_feature: MA Experiment 20000265 PARAMETER Experiment Name: At_Open_Flower_P Parameter: Plant Line Value: WS
  misc_feature: MA Experiment 20000265 PARAMETER Experiment Name: At_Open_Flower_P Parameter: Tissue Value: Closed Flower vs. Whole Plant
  misc_feature: MA Experiment ID: 20000286 Result: Down-regulated in Transcription
  misc_feature: MA Experiment 20000286 PARAMETER Experiment Name: At_Open_Flower_P Parameter: Age (day) Value: 21
  misc_feature: MA Experiment 20000286 PARAMETER Experiment Name: At_Open_Flower_P Parameter: Plant Line Value: WS
  misc_feature: MA Experiment 20000286 PARAMETER Experiment Name: At_Open_Flower_P Parameter: Tissue Value: Half Open vs. Whole Plant
  misc_feature: MA Experiment ID: 20000438 Result: Down-regulated in Transcription
  misc_feature: MA Experiment 20000438 PARAMETER Experiment Name: At_Shoots__P Parameter: Age (day) Value: 14
  misc_feature: MA Experiment 20000438 PARAMETER Experiment Name: At_Shoots__P Parameter: Tissue Value: Shoots vs. Whole Plant
  misc_feature: MA Experiment ID: 20000439 Result: Down-regulated in Transcription
  misc_feature: MA Experiment 20000439 PARAMETER Experiment Name: At_Roots__P Parameter: Age (day) Value: 14 vs. 21
  misc_feature: MA Experiment 20000439 PARAMETER Experiment Name: At_Roots__P Parameter: Organism Value: A. thaliana
  misc_feature: MA Experiment 20000439 PARAMETER Experiment Name: At_Roots__P Parameter: Tissue Value: Roots vs. Whole Plant
  misc_feature: MA Experiment ID: 20000573 Result: Up-regulated in Transcription
  misc_feature: MA Experiment 20000573 PARAMETER Experiment Name: At_100uM_ABA_Mutants__P Parameter: Organism Value: A. thaliana
  misc_feature: MA Experiment 20000573 PARAMETER Experiment Name: At_100uM_ABA_Mutants__P Parameter: Plant Line Value: CS22 vs. Ler wt
  misc_feature: MA Experiment 20000573 PARAMETER Experiment Name: At_100uM_ABA_Mutants__P Parameter: Timepoint (hr) Value: N/A
  misc_feature: MA Experiment 20000573 PARAMETER Experiment Name: At_100uM_ABA_Mutants__P Parameter: Tissue Value: Whole Plant
  misc_feature: MA Experiment 20000573 PARAMETER Experiment Name: At_100uM_ABA_Mutants__P Parameter: Treatment Value: None
  misc_feature: MA Experiment ID: 20000794 Result: Down-regulated in Transcription
  misc_feature: MA Experiment 20000794 PARAMETER Experiment Name: At_Petals_P Parameter: Age (day) Value: 23-25 days
  misc_feature: MA Experiment 20000794 PARAMETER Experiment Name: At_Petals_P Parameter: Plant Line Value: WS
  misc_feature: MA Experiment 20000794 PARAMETER Experiment Name: At_Petals_P Parameter: Tissue Value: Petals vs. Whole plant
  misc_feature: MA Experiment ID: 20001248 Result: Up-regulated in Transcription
  misc_feature: MA Experiment 20001248 PARAMETER Experiment Name: At_Far-red-induction_P Parameter: Age (day) Value: 7
  misc_feature: MA Experiment 20001248 PARAMETER Experiment Name: At_Far-red-induction_P Parameter: Light Value: Far-red vs. White
  misc_feature: MA Experiment 20001248 PARAMETER Experiment Name: At_Far-red-induction_P Parameter: Organism Value: A. thaliana
  misc_feature: MA Experiment 20001248 PARAMETER Experiment Name: At_Far-red-induction_P Parameter: Plant Line Value: Columbia
  misc_feature: MA Experiment 20001248 PARAMETER Experiment Name: At_Far-red-induction_P Parameter: Timepoint (hr) Value: 4
  misc_feature: MA Experiment 20001248 PARAMETER Experiment Name: At_Far-red-induction_P Parameter: Tissue Value: Whole Plant
  misc_feature: MA Experiment ID: 20001757 Result: Up-regulated in Transcription
  misc_feature: MA Experiment 20001757 PARAMETER Experiment Name: At_50mM_NH4NO3_L-to-H_P Parameter: Timepoint (hr) Value: 6
  misc_feature: MA Experiment 20001757 PARAMETER Experiment Name: At_50mM_NH4NO3_L-to-H_P Parameter: Tissue Value: Leaf
  misc_feature: MA Experiment 20001757 PARAMETER Experiment Name: At_50mM_NH4NO3_L-to-H_P Parameter: Treatment Value: 50mM NH4NO3 vs 100mM Mannitol
  misc_feature: MA Experiment ID: 20001905 Result: Down-regulated in Transcription
  misc_feature: MA Experiment 20001905 PARAMETER Experiment Name: At_Drought_Reproduction_P Parameter: Age (day) Value: 40
  misc_feature: MA Experiment 20001905 PARAMETER Experiment Name: At_Drought_Reproduction_P Parameter: Organism Value: A. thaliana
  misc_feature: MA Experiment 20001905 PARAMETER Experiment Name: At_Drought_Reproduction_P Parameter: Plant Line Value: WS
  misc_feature: MA Experiment 20001905 PARAMETER Experiment Name: At_Drought_Reproduction_P Parameter: Timepoint (day) Value: 10
  misc_feature: MA Experiment 20001905 PARAMETER Experiment Name: At_Drought_Reproduction_P Parameter: Tissue Value: Rosettes
  misc_feature: MA Experiment 20001905 PARAMETER Experiment Name: At_Drought_Reproduction_P Parameter: Treatment Value: Drought vs. No Drought
atggtgaagaagcaatcgccattacacgttgtcggtgtgtctgttttgatggtgttgttatgcagtgttaattacagtctctgtgaaaagatcaaaacgtataagctcacaagaggaagcttaagtgttactttcactaactatggtgctgtcatgacctctcttctcctccctgacagacatggaaaacaagacgatgttgttcttggatttgatactgttgatggttacaagaatgatacaacatattttggagcaattgtgggaagagtggctaatagaataggaggtgctaaattcaagttaaatggtcatctctacaaaaccgatcccaacgaaggccgtaacactctccatggtggttcaaagggatttagtgatgtgatttggtcagtccaaaagtatgttcccactagtcacattactttcacatacgatagcttcgacggtgaagaaggttttccgggcaatgtgacggtgaaagtgacgtacatgttgatcggagaaaacaaactcggtgtaaaaatggaagcaaagccactcaacaaacctacaccaatcaacttagctctccacacttactggaacctccacagccacaactccgggaacatcctctcccacaaaattcaactcctcgccggaaaaatcactcccgtcgacgacaaactcattcccaccggagaaatcacctccattaccggaactccttacgatttcctcgagccacgtgagatcggtagccggatccacgaattacccggcggttacgacatcaattacgtgatcgacggaccgatcgggaaacatctgaggaaaactgcggttgtgacggagcaagtcaccgggaggaagatggagctgtggacgaatcagcctggtgttcagttttacacgagtaatatgatgaaacgtgtcgtcggtaaaggtaaagccgtttatgagaaatacggtggcttgtgtttggagactcaaggcttcccagattccgtcaatcacaagaactttccgtcgcagattgttaatcccggcgagagttatttgcatgttatgctcttcagattcactgctcactaa

SEQ ID NO: 86160 - protein, 358 aa, Arabidopsis thaliana
  peptide (1)..(358): Ceres Seq. ID no. 12686923
  misc_feature (32)..(354): Pfam Name: Aldose 1-epimerase Pfam Description: Aldose 1-epimerase
  misc_feature (1)..(358): Homolog of NCBI NO: 15228261 NR Description: aldose 1-epimerase - like protein; protein id: supported by cDNA: 119313., supported by cDNA: gi_17381241
  misc_feature (1)..(358): Homolog of NCBI NO: 21537069 NR Description: aldose 1-epimerase-like protein [Arabidopsis
  misc_feature (29)..(356): Homolog of NCBI NO: 15242223 NR Description: putative aldose 1-epimerase - like protein;
  misc_feature (6)..(356): Homolog of NCBI NO: 15824567 NR Description: non-cell-autonomous protein pathway2;
  misc_feature (16)..(356): Homolog of NCBI NO: 15824565 NR Description: non-cell-autonomous protein pathway1;
  misc_feature (30)..(356): Homolog of NCBI NO: 7430313 NR Description: probable aldose 1-epimerase (EC 5.1.3.3) - common
  misc_feature (29)..(356): Homolog of NCBI NO: 40882679 NR Description: putative aldose 1-epimerase [Oryza sativa
  misc_feature (65)..(356): Homolog of NCBI NO: 26452398 NR Description: putative aldose 1-epimerase [Arabidopsis thaliana]
  misc_feature (34)..(357): Homolog of NCBI NO: 30684727 NR Description: aldose 1-epimerase family [Arabidopsis thaliana]
  misc_feature (35)..(357): Homolog of NCBI NO: 37531218 NR Description: putative aldose 1-epimerase - like protein [Oryza
MVKKQSPLHVVGVSVLMVLLCSVNYSLCEKIKTYKLTRGSLSVTFTNYGAVMTSLLLPDRHGKQDDVVLGFDTVDGYKNDTTYFGAIVGRVANRIGGAKFKLNGHLYKTDPNEGRNTLHGGSKGFSDVIWSVQKYVPTSHITFTYDSFDGEEGFPGNVTVKVTYMLIGENKLGVKMEAKPLNKPTPINLALHTYWNLHSHNSGNILSHKIQLLAGKITPVDDKLIPTGEITSITGTPYDFLEPREIGSRIHELPGGYDINYVIDGPIGKHLRKTAVVTEQVTGRKMELWTNQPGVQFYTSNMMKRVVGKGKAVYEKYGGLCLETQGFPDSVNHKNFPSQIVNPGESYLHVMLFRFTAH

SEQ ID NO: 86161 - protein, 342 aa, Arabidopsis thaliana
  peptide (1)..(342): Ceres Seq. ID no. 12686924
  misc_feature (16)..(338): Pfam Name: Aldose 1-epimerase Pfam Description: Aldose 1-epimerase
  misc_feature (1)..(342): Homolog of NCBI NO: 15228261 NR Description: aldose 1-epimerase - like protein; protein id: supported by cDNA: 119313., supported by cDNA: gi_17381241
  misc_feature (1)..(342): Homolog of NCBI NO: 21537069 NR Description: aldose 1-epimerase-like protein [Arabidopsis
  misc_feature (13)..(340): Homolog of NCBI NO: 15242223 NR Description: putative aldose 1-epimerase - like protein;
  misc_feature (1)..(340): Homolog of NCBI NO: 15824567 NR Description: non-cell-autonomous protein pathway2;
  misc_feature (1)..(340): Homolog of NCBI NO: 15824565 NR Description: non-cell-autonomous protein pathway1;
  misc_feature (14)..(340): Homolog of NCBI NO: 7430313 NR Description: probable aldose 1-epimerase (EC 5.1.3.3) - common
  misc_feature (13)..(340): Homolog of NCBI NO: 40882679 NR Description: putative aldose 1-epimerase [Oryza sativa
  misc_feature (49)..(340): Homolog of NCBI NO: 26452398 NR Description: putative aldose 1-epimerase [Arabidopsis thaliana]
  misc_feature (18)..(341): Homolog of NCBI NO: 30684727 NR Description: aldose 1-epimerase family [Arabidopsis thaliana]
  misc_feature (19)..(341): Homolog of NCBI NO: 37531218 NR Description: putative aldose 1-epimerase - like protein [Oryza
MVLLCSVNYSLCEKIKTYKLTRGSLSVTFTNYGAVMTSLLLPDRHGKQDDVVLGFDTVDGYKNDTTYFGAIVGRVANRIGGAKFKLNGHLYKTDPNEGRNTLHGGSKGFSDVIWSVQKYVPTSHITFTYDSFDGEEGFPGNVTVKVTYMLIGENKLGVKMEAKPLNKPTPINLALHTYWNLHSHNSGNILSHKIQLLAGKITPVDDKLIPTGEITSITGTPYDFLEPREIGSRIHELPGGYDINYVIDGPIGKHLRKTAVVTEQVTGRKMELWTNQPGVQFYTSNMMKRVVGKGKAVYEKYGGLCLETQGFPDSVNHKNFPSQIVNPGESYLHVMLFRFTAH

SEQ ID NO: 86162 - protein, 307 aa, Arabidopsis thaliana
  peptide (1)..(307): Ceres Seq. ID no. 12686925
  misc_feature (1)..(303): Pfam Name: Aldose 1-epimerase Pfam Description: Aldose 1-epimerase
  misc_feature (1)..(307): Homolog of NCBI NO: 15228261 NR Description: aldose 1-epimerase - like protein; protein id: supported by cDNA: 119313., supported by cDNA: gi_17381241
  misc_feature (1)..(307): Homolog of NCBI NO: 21537069 NR Description: aldose 1-epimerase-like protein [Arabidopsis
  misc_feature (1)..(305): Homolog of NCBI NO: 15242223 NR Description: putative aldose 1-epimerase - like protein;
  misc_feature (1)..(305): Homolog of NCBI NO: 15824567 NR Description: non-cell-autonomous protein pathway2;
  misc_feature (1)..(305): Homolog of NCBI NO: 15824565 NR Description: non-cell-autonomous protein pathway1;
  misc_feature (1)..(305): Homolog of NCBI NO: 7430313 NR Description: probable aldose 1-epimerase (EC 5.1.3.3) - common
  misc_feature (1)..(305): Homolog of NCBI NO: 40882679 NR Description: putative aldose 1-epimerase [Oryza sativa
  misc_feature (14)..(305): Homolog of NCBI NO: 26452398 NR Description: putative aldose 1-epimerase [Arabidopsis thaliana]
  misc_feature (1)..(306): Homolog of NCBI NO: 30684727 NR Description: aldose 1-epimerase family [Arabidopsis thaliana]
  misc_feature (1)..(306): Homolog of NCBI NO: 37531218 NR Description: putative aldose 1-epimerase - like protein [Oryza
MTSLLLPDRHGKQDDVVLGFDTVDGYKNDTTYFGAIVGRVANRIGGAKFKLNGHLYKTDPNEGRNTLHGGSKGFSDVIWSVQKYVPTSHITFTYDSFDGEEGFPGNVTVKVTYMLIGENKLGVKMEAKPLNKPTPINLALHTYWNLHSHNSGNILSHKIQLLAGKITPVDDKLIPTGEITSITGTPYDFLEPREIGSRIHELPGGYDINYVIDGPIGKHLRKTAVVTEQVTGRKMELWTNQPGVQFYTSNMMKRVVGKGKAVYEKYGGLCLETQGFPDSVNHKNFPSQIVNPGESYLHVMLFRFTAH

SEQ ID NO: 86163 - DNA, 1014 bp, Arabidopsis thaliana
  misc_feature (1)..(1014): Ceres Seq. ID no. 12687288
  misc_feature: MA Experiment ID: 20000234 Result: Up-regulated in Transcription
  misc_feature: MA Experiment 20000234 PARAMETER Experiment Name: At_Siliques_P Parameter: Age (day) Value: 21
  misc_feature: MA Experiment 20000234 PARAMETER Experiment Name: At_Siliques_P Parameter: Organism Value: A. thaliana
  misc_feature: MA Experiment 20000234 PARAMETER Experiment Name: At_Siliques_P Parameter: Plant Line Value: WS
  misc_feature: MA Experiment 20000234 PARAMETER Experiment Name: At_Siliques_P Parameter: Tissue Value: Less Than 5mm Siliques vs. Whole Plant
  misc_feature: MA Experiment ID: 20000235 Result: Up-regulated in Transcription
  misc_feature: MA Experiment 20000235 PARAMETER Experiment Name: At_Siliques_P Parameter: Age (day) Value: 21
  misc_feature: MA Experiment 20000235 PARAMETER Experiment Name: At_Siliques_P Parameter: Organism Value: A. thaliana
  misc_feature: MA Experiment 20000235 PARAMETER Experiment Name: At_Siliques_P Parameter: Plant Line Value: WS
  misc_feature: MA Experiment 20000235 PARAMETER Experiment Name: At_Siliques_P Parameter: Tissue Value: 5-10mm Siliques vs. Whole Plant
  misc_feature: MA Experiment ID: 20000265 Result: Up-regulated in Transcription
  misc_feature: MA Experiment 20000265 PARAMETER Experiment Name: At_Open_Flower_P Parameter: Age (day) Value: 21
  misc_feature: MA Experiment 20000265 PARAMETER Experiment Name: At_Open_Flower_P Parameter: Plant Line Value: WS
  misc_feature: MA Experiment 20000265 PARAMETER Experiment Name: At_Open_Flower_P Parameter: Tissue Value: Closed Flower vs. Whole Plant
  misc_feature: MA Experiment ID: 20000286 Result: Up-regulated in Transcription
  misc_feature: MA Experiment 20000286 PARAMETER Experiment Name: At_Open_Flower_P Parameter: Age (day) Value: 21
  misc_feature: MA Experiment 20000286 PARAMETER Experiment Name: At_Open_Flower_P Parameter: Plant Line Value: WS
  misc_feature: MA Experiment 20000286 PARAMETER Experiment Name: At_Open_Flower_P Parameter: Tissue Value: Half Open vs. Whole Plant
  misc_feature: MA Experiment ID: 20000495 Result: Up-regulated in Transcription
  misc_feature: MA Experiment 20000495 PARAMETER Experiment Name: At_Guard_Cells_P Parameter: Harvest Date Value: 8/2/2002
  misc_feature: MA Experiment 20000495 PARAMETER Experiment Name: At_Guard_Cells_P Parameter: Organism Value: A. thaliana
  misc_feature: MA Experiment 20000495 PARAMETER Experiment Name: At_Guard_Cells_P Parameter: Tissue Value: Guard Cells vs. Leaves
  misc_feature: MA Experiment ID: 20001560 Result: Up-regulated in Transcription
  misc_feature: MA Experiment 20001560 PARAMETER Experiment Name: At_Drought_Soil_Dry_P Parameter: Age (day) Value: 28
  misc_feature: MA Experiment 20001560 PARAMETER Experiment Name: At_Drought_Soil_Dry_P Parameter: Organism Value: A. thaliana
  misc_feature: MA Experiment 20001560 PARAMETER Experiment Name: At_Drought_Soil_Dry_P Parameter: Plant Line Value: WS
  misc_feature: MA Experiment 20001560 PARAMETER Experiment Name: At_Drought_Soil_Dry_P Parameter: Post Timepoint (hr) Value: None
  misc_feature: MA Experiment 20001560 PARAMETER Experiment Name: At_Drought_Soil_Dry_P Parameter: Post-Treatment Value: None
  misc_feature: MA Experiment 20001560 PARAMETER Experiment Name: At_Drought_Soil_Dry_P Parameter: Timepoint (day) Value: 14
  misc_feature: MA Experiment 20001560 PARAMETER Experiment Name: At_Drought_Soil_Dry_P Parameter: Treatment Value: Drought vs. No Drought
  misc_feature: MA Experiment ID: 20001904 Result: Up-regulated in Transcription
  misc_feature: MA Experiment 20001904 PARAMETER Experiment Name: At_Drought_Reproduction_P Parameter: Age (day) Value: 37
  misc_feature: MA Experiment 20001904 PARAMETER Experiment Name: At_Drought_Reproduction_P Parameter: Organism Value: A. thaliana
  misc_feature: MA Experiment 20001904 PARAMETER Experiment Name: At_Drought_Reproduction_P Parameter: Plant Line Value: WS
  misc_feature: MA Experiment 20001904 PARAMETER Experiment Name: At_Drought_Reproduction_P Parameter: Timepoint (day) Value: 7
  misc_feature: MA Experiment 20001904 PARAMETER Experiment Name: At_Drought_Reproduction_P Parameter: Tissue Value: Rosettes
  misc_feature: MA Experiment 20001904 PARAMETER Experiment Name: At_Drought_Reproduction_P Parameter: Treatment Value: Drought vs. No Drought
  misc_feature: MA Experiment ID: 20001905 Result: Up-regulated in Transcription
  misc_feature: MA Experiment 20001905 PARAMETER Experiment Name: At_Drought_Reproduction_P Parameter: Age (day) Value: 40
  misc_feature: MA Experiment 20001905 PARAMETER Experiment Name: At_Drought_Reproduction_P Parameter: Organism Value: A. thaliana
  misc_feature: MA Experiment 20001905 PARAMETER Experiment Name: At_Drought_Reproduction_P Parameter: Plant Line Value: WS
  misc_feature: MA Experiment 20001905 PARAMETER Experiment Name: At_Drought_Reproduction_P Parameter: Timepoint (day) Value: 10
  misc_feature: MA Experiment 20001905 PARAMETER Experiment Name: At_Drought_Reproduction_P Parameter: Tissue Value: Rosettes
  misc_feature: MA Experiment 20001905 PARAMETER Experiment Name: At_Drought_Reproduction_P Parameter: Treatment Value: Drought vs. No Drought
atgggagacgaccagctagatttcgagctcccagaagaggttttgtcggtgattccgatggacccttttgagcagctggatctcgcgaggaagattacatcaatggcgatagcttcaagggtgtcgaatctggactctgaggtggttgaattgagacagaagcttctgggtaaggaaagtgttgtccgtgagcttgaggagaaagcgtctcgcctggagagagactgccgcgaggctgattcgagattgaaggtcgttctcgaagataatattcaggactttcttggtgttacaggatacttaaggatgaacctgacaaaggagaaggattcactggcaatgactgtaacgaaactcacccgtgatttggctaagctggagacattcaagcggcagttaatcaaatccctgagcgatgagagtggtccgcaaacagaacctgttgatattaggacatgcgaccagccaggatcatatccaggcaaagatggaaggatcaatgcacactcaattaaacaagcttacagtggatctacagacacgaacaatccagttgttgaagcttcaaaatacactggaaacaaattttcaatgacatcatacatatctccacgtcttaccccaaccgcaacaccaaagatcatctccacaagtgtgtctcctcgaggctattctgcagcaggttctcctaaaagaacatcaggtgcagtttctcccacaaaggcaacactctggtacccgtcaagtcagcaatcatcggctgcgaattctcctcctcgcaaccgcacactcccagctcgtacaccgcggatggatggtaaagaattcttccggcaagccaggagccgattatcctatgaacaattcagttccttcttagctaacatcaaagagctcaacgcccagaagcaaacccgagaggaaactctgaggaaagcagatgagatatttggggaagagaacaaagatctttatttatctttccaaggtctccttaacagaaacatgcgttaa

SEQ ID NO: 86164 - protein, 337 aa, Arabidopsis thaliana
  peptide (1)..(337): Ceres Seq. ID no. 12687289
  misc_feature (1)..(337): Homolog of NCBI NO: 30684901 NR Description: expressed protein [Arabidopsis thaliana] ESTs gb|N38586 and gb|N38613 come from this gene. [Arabidopsis >gi|26452357|dbj|BAC43264.1| unknown protein [Arabidopsis
  misc_feature (7)..(332): Homolog of NCBI NO: 15222835 NR Description: hypothetical protein; protein id: At1g56080.1
  misc_feature (8)..(335): Homolog of NCBI NO: 18414476 NR Description: Expressed protein; protein id: At4g15545.1, by cDNA: 307., supported by cDNA: gi_14517355, supported by cDNA: supported by cDNA: gi_16323275 [Arabidopsis thaliana] thaliana]
  misc_feature (47)..(335): Homolog of NCBI NO: 38344261 NR Description: OSJNBa0008M17.14 [Oryza sativa (japonica
  misc_feature (8)..(307): Homolog of NCBI NO: 7485048 NR Description: hypothetical protein - Arabidopsis thaliana hypothetical protein [Arabidopsis thaliana]
  misc_feature (10)..(126): Homolog of NCBI NO: 34909876 NR Description: B1143G03.2 [Oryza sativa (japonica
  misc_feature (195)..(290): Homolog of NCBI NO: 34909876 NR Description: B1143G03.2 [Oryza sativa (japonica
  misc_feature (7)..(248): Homolog of NCBI NO: 25404089 NR Description: hypothetical protein T6H22.12 [imported] - thaliana >gi|6056378|gb|AAF02842.1|AC009894_13 Hypothetical
  misc_feature (256)..(335): Homolog of NCBI NO: 23613663 NR Description: hypothetical protein, conserved [Plasmodium
  misc_feature (15)..(92): Homolog of NCBI NO: 23613663 NR Description: hypothetical protein, conserved [Plasmodium
MGDDQLDFELPEEVLSVIPMDPFEQLDLARKITSMAIASRVSNLDSEVVELRQKLLGKESVVRELEEKASRLERDCREADSRLKVVLEDNIQDFLGVTGYLRMNLTKEKDSLAMTVTKLTRDLAKLETFKRQLIKSLSDESGPQTEPVDIRTCDQPGSYPGKDGRINAHSIKQAYSGSTDTNNPVVEASKYTGNKFSMTSYISPRLTPTATPKIISTSVSPRGYSAAGSPKRTSGAVSPTKATLWYPSSQQSSAANSPPRNRTLPARTPRMDGKEFFRQARSRLSYEQFSSFLANIKELNAQKQTREETLRKADEIFGEENKDLYLSFQGLLNRNMR

SEQ ID NO: 86165 - protein, 318 aa, Arabidopsis thaliana
  peptide (1)..(318): Ceres Seq. ID no. 12687290
  misc_feature (1)..(318): Homolog of NCBI NO: 30684901 NR Description: expressed protein [Arabidopsis thaliana] ESTs gb|N38586 and gb|N38613 come from this gene. [Arabidopsis >gi|26452357|dbj|BAC43264.1| unknown protein [Arabidopsis
  misc_feature (1)..(313): Homolog of NCBI NO: 15222835 NR Description: hypothetical protein; protein id: At1g56080.1
  misc_feature (1)..(316): Homolog of NCBI NO: 18414476 NR Description: Expressed protein; protein id: At4g15545.1, by cDNA: 307., supported by cDNA: gi_14517355, supported by cDNA: supported by cDNA: gi_16323275 [Arabidopsis thaliana] thaliana]
  misc_feature (28)..(316): Homolog of NCBI NO: 38344261 NR Description: OSJNBa0008M17.14 [Oryza sativa (japonica
  misc_feature (1)..(288): Homolog of NCBI NO: 7485048 NR Description: hypothetical protein - Arabidopsis thaliana hypothetical protein [Arabidopsis thaliana]
  misc_feature (1)..(107): Homolog of NCBI NO: 34909876 NR Description: B1143G03.2 [Oryza sativa (japonica
  misc_feature (176)..(271): Homolog of NCBI NO: 34909876 NR Description: B1143G03.2 [Oryza sativa (japonica
  misc_feature (1)..(229): Homolog of NCBI NO: 25404089 NR Description: hypothetical protein T6H22.12 [imported] - thaliana >gi|6056378|gb|AAF02842.1|AC009894_13 Hypothetical
  misc_feature (237)..(316): Homolog of NCBI NO: 23613663 NR Description: hypothetical protein, conserved [Plasmodium
  misc_feature (1)..(73): Homolog of NCBI NO: 23613663 NR Description: hypothetical protein, conserved [Plasmodium
MDPFEQLDLARKITSMAIASRVSNLDSEVVELRQKLLGKESVVRELEEKASRLERDCREADSRLKVVLEDNIQDFLGVTGYLRMNLTKEKDSLAMTVTKLTRDLAKLETFKRQLIKSLSDESGPQTEPVDIRTCDQPGSYPGKDGRINAHSIKQAYSGSTDTNNPVVEASKYTGNKFSMTSYISPRLTPTATPKIISTSVSPRGYSAAGSPKRTSGAVSPTKATLWYPSSQQSSAANSPPRNRTLPARTPRMDGKEFFRQARSRLSYEQFSSFLANIKELNAQKQTREETLRKADEIFGEENKDLYLSFQGLLNRNMR

SEQ ID NO: 86166 - protein, 303 aa, Arabidopsis thaliana
  peptide (1)..(303): Ceres Seq. ID no. 12687291
  misc_feature (1)..(303): Homolog of NCBI NO: 30684901 NR Description: expressed protein [Arabidopsis thaliana] ESTs gb|N38586 and gb|N38613 come from this gene. [Arabidopsis >gi|26452357|dbj|BAC43264.1| unknown protein [Arabidopsis
  misc_feature (1)..(298): Homolog of NCBI NO: 15222835 NR Description: hypothetical protein; protein id: At1g56080.1
  misc_feature (1)..(301): Homolog of NCBI NO: 18414476 NR Description: Expressed protein; protein id: At4g15545.1, by cDNA: 307., supported by cDNA: gi_14517355, supported by cDNA: supported by cDNA: gi_16323275 [Arabidopsis thaliana] thaliana]
  misc_feature (13)..(301): Homolog of NCBI NO: 38344261 NR Description: OSJNBa0008M17.14 [Oryza sativa (japonica
  misc_feature (1)..(273): Homolog of NCBI NO: 7485048 NR Description: hypothetical protein - Arabidopsis thaliana hypothetical protein [Arabidopsis thaliana]
  misc_feature (1)..(92): Homolog of NCBI NO: 34909876 NR Description: B1143G03.2 [Oryza sativa (japonica
  misc_feature (161)..(256): Homolog of NCBI NO: 34909876 NR Description: B1143G03.2 [Oryza sativa (japonica
  misc_feature (1)..(214): Homolog of NCBI NO: 25404089 NR Description: hypothetical protein T6H22.12 [imported] - thaliana >gi|6056378|gb|AAF02842.1|AC009894_13 Hypothetical
  misc_feature (222)..(301): Homolog of NCBI NO: 23613663 NR Description: hypothetical protein, conserved [Plasmodium
  misc_feature (1)..(58): Homolog of NCBI NO: 23613663 NR Description: hypothetical protein, conserved [Plasmodium
MAIASRVSNLDSEVVELRQKLLGKESVVRELEEKASRLERDCREADSRLKVVLEDNIQDFLGVTGYLRMNLTKEKDSLAMTVTKLTRDLAKLETFKRQLIKSLSDESGPQTEPVDIRTCDQPGSYPGKDGRINAHSIKQAYSGSTDTNNPVVEASKYTGNKFSMTSYISPRLTPTATPKIISTSVSPRGYSAAGSPKRTSGAVSPTKATLWYPSSQQSSAANSPPRNRTLPARTPRMDGKEFFRQARSRLSYEQFSSFLANIKELNAQKQTREETLRKADEIFGEENKDLYLSFQGLLNRNMR

SEQ ID NO: 86167 - DNA, 657 bp, Arabidopsis thaliana
  misc_feature (1)..(657): Ceres Seq. ID no. 12687345
  misc_feature: MA Experiment ID: 108462 Result: Down-regulated in Transcription
  misc_feature: MA Experiment 108462 PARAMETER Experiment Name: At_Germinating_Seeds_cDNA_P Parameter: Age (day) Value: 2 vs. 0
  misc_feature: MA Experiment 108462 PARAMETER Experiment Name: At_Germinating_Seeds_cDNA_P Parameter: Tissue Value: Germinating Seeds
  misc_feature: MA Experiment ID: 108463 Result: Down-regulated in Transcription
  misc_feature: MA Experiment 108463 PARAMETER Experiment Name: At_Germinating_Seeds_cDNA_P Parameter: Age (day) Value: 3 vs. 0
  misc_feature: MA Experiment 108463 PARAMETER Experiment Name: At_Germinating_Seeds_cDNA_P Parameter: Tissue Value: Germinating Seeds
  misc_feature: MA Experiment ID: 108488 Result: Down-regulated in Transcription
  misc_feature: MA Experiment ID: 108577 Result: Down-regulated in Transcription
  misc_feature: MA Experiment 108577 PARAMETER Experiment Name: At_42deg_Heat_cDNA_P Parameter: Temperature (deg C) Value: 42 vs. 22
  misc_feature: MA Experiment 108577 PARAMETER Experiment Name: At_42deg_Heat_cDNA_P Parameter: Timepoint (hr) Value: 6
  misc_feature: MA Experiment 108577 PARAMETER Experiment Name: At_42deg_Heat_cDNA_P Parameter: Tissue Value: Aerial
  misc_feature: MA Experiment ID: 20000184 Result: Down-regulated in Transcription
  misc_feature: MA Experiment 20000184 PARAMETER Experiment Name: At_Shoots__P Parameter: Age (day) Value: 7
  misc_feature: MA Experiment 20000184 PARAMETER Experiment Name: At_Shoots__P Parameter: Tissue Value: Shoots vs. Whole Plant
  misc_feature: MA Experiment ID: 20000224 Result: Up-regulated in Transcription
gtaaaaaaaaatatcctctctcttgttctttctcgcgttctgctctctcgatttcagccaagagatgtcggcatacgacaatgttattggtgggaagctaaagctaaaagggaaggctttggatgtgaaagcaggtggagtaaagaagaagaagaaacataagagacaggaagaacaagctcttaaaattactgatcatgaactcatagaaggagaaagcactgaagcattgggtaaattgattgaaggagaagaaggagatgaagaaatgaacaggagtgaaaaggcaagcgaggatgcgaagttgcagcagcagctcgatgatgatgatcacttaacgccagcagaaaggcgatacatagagcagaaacaaagattggatgtgcagaagctagctaaggaagcgaacaagtctcaccgtaacaggattgaggatttcaatcagtatctggctaacatgagtgagcactacgatatccctaaagtcggacctggttaatataattctttcttgtctttgttttactctgcttatctattttgcatcgttaaacgactactttggatgtctgttatgtttagtccctttaacttttgaatgatgtgatcgcaaatctgtaatgtcaaaaacacattttcttggaatatttcttctgc

SEQ ID NO: 86168 - protein, 144 aa, Arabidopsis thaliana; identical to SEQ ID NO: 27004
  peptide (1)..(144): Ceres Seq. ID no. 12687346
  misc_feature (1)..(144): Homolog of NCBI NO: 18394403 NR Description: expressed protein; protein id: At1g16810.1, by cDNA: 4887., supported by cDNA: gi_15146197 [Arabidopsis
  misc_feature (88)..(144): Homolog of NCBI NO: 20269115 NR Description: CGI-144-like protein [Lycopersicon esculentum]
  misc_feature (5)..(144): Homolog of NCBI NO: 23509013 NR Description: hypothetical protein, conserved [Plasmodium
  misc_feature (1)..(144): Homolog of NCBI NO: 40746298 NR Description: hypothetical protein AN0678.2 [Aspergillus
  misc_feature (67)..(141): Homolog of NCBI NO: 13385950 NR Description: RIKEN cDNA 2510049I19 [Mus musculus] unnamed protein product [Mus musculus] unnamed protein product [Mus musculus]
  misc_feature (67)..(141): Homolog of NCBI NO: 21165518 NR Description: hypothetical protein [Mus musculus]
  misc_feature (67)..(141): Homolog of NCBI NO: 7512937 NR Description: hypothetical protein DKFZp586O0120.1 - human
  misc_feature (67)..(141): Homolog of NCBI NO: 7661696 NR Description: DKFZP586O0120 protein [Homo sapiens]
  misc_feature (89)..(141): Homolog of NCBI NO: 13325257 NR Description: Similar to CG15432 gene product [Homo sapiens]
  misc_feature (19)..(144): Homolog of NCBI NO: 19114925 NR Description: hypothetical protein [Schizosaccharomyces pombe] ORF N118 [Schizosaccharomyces pombe] >gi|6983545|emb|CAB75349.1| protein; no apparent S. cerevisiae ortholog [Schizosaccharomyces

SEQ ID NO: 86169 - protein, 76 aa, Arabidopsis thaliana; identical to SEQ ID NO: 27005
  peptide (1)..(76): Ceres Seq. ID no. 12687347
  misc_feature (1)..(76): Homolog of NCBI NO: 18394403 NR Description: expressed protein; protein id: At1g16810.1, by cDNA: 4887., supported by cDNA: gi_15146197 [Arabidopsis
  misc_feature (20)..(76): Homolog of NCBI NO: 20269115 NR Description: CGI-144-like protein [Lycopersicon esculentum]
  misc_feature (1)..(76): Homolog of NCBI NO: 23509013 NR Description: hypothetical protein, conserved [Plasmodium
  misc_feature (1)..(76): Homolog of NCBI NO: 40746298 NR Description: hypothetical protein AN0678.2 [Aspergillus
  misc_feature (1)..(73): Homolog of NCBI NO: 13385950 NR Description: RIKEN cDNA 2510049I19 [Mus musculus] unnamed protein product [Mus musculus] unnamed protein product [Mus musculus]
  misc_feature (1)..(73): Homolog of NCBI NO: 21165518 NR Description: hypothetical protein [Mus musculus]
  misc_feature (1)..(73): Homolog of NCBI NO: 7512937 NR Description: hypothetical protein DKFZp586O0120.1 - human
  misc_feature (1)..(73): Homolog of NCBI NO: 7661696 NR Description: DKFZP586O0120 protein [Homo sapiens]
  misc_feature (21)..(73): Homolog of NCBI NO: 13325257 NR Description: Similar to CG15432 gene product [Homo sapiens]
  misc_feature (1)..(76): Homolog of NCBI NO: 19114925 NR Description: hypothetical protein [Schizosaccharomyces pombe] ORF N118 [Schizosaccharomyces pombe] >gi|6983545|emb|CAB75349.1| protein; no apparent S. cerevisiae ortholog [Schizosaccharomyces

SEQ ID NO: 86170 - DNA, 659 bp, Arabidopsis thaliana
  misc_feature (1)..(659): Ceres Seq. ID no. 12687370
  misc_feature: MA Experiment ID: 20000169 Result: Down-regulated in Transcription
  misc_feature: MA Experiment 20000169 PARAMETER Experiment Name: At_100uM_ABA_P Parameter: Age (day) Value: 14
  misc_feature: MA Experiment 20000169 PARAMETER Experiment Name: At_100uM_ABA_P Parameter: Organism Value: A. thaliana
  misc_feature: MA Experiment 20000169 PARAMETER Experiment Name: At_100uM_ABA_P Parameter: Plant Line Value: WS
  misc_feature: MA Experiment 20000169 PARAMETER Experiment Name: At_100uM_ABA_P Parameter: Timepoint (hr) Value: 6
  misc_feature: MA Experiment 20000169 PARAMETER Experiment Name: At_100uM_ABA_P Parameter: Tissue Value: Aerial
  misc_feature: MA Experiment 20000169 PARAMETER Experiment Name: At_100uM_ABA_P Parameter: Treatment Value: 100uM ABA vs. No Treatment
  misc_feature: MA Experiment ID: 20000180 Result: Down-regulated in Transcription
  misc_feature: MA Experiment 20000180 PARAMETER Experiment Name: At_Germinating_Seeds_P Parameter: Age (hr) Value: 24 vs. 0
  misc_feature: MA Experiment 20000180 PARAMETER Experiment Name: At_Germinating_Seeds_P Parameter: Tissue Value: Germinating Seeds
  misc_feature: MA Experiment ID: 20000184 Result: Up-regulated in Transcription
  misc_feature: MA Experiment 20000184 PARAMETER Experiment Name: At_Shoots__P Parameter: Age (day) Value: 7
  misc_feature: MA Experiment 20000184 PARAMETER Experiment Name: At_Shoots__P Parameter: Tissue Value: Shoots vs. Whole Plant
  misc_feature: MA Experiment ID: 20000267 Result: Down-regulated in Transcription
  misc_feature: MA Experiment 20000267 PARAMETER Experiment Name: At_Drought_P Parameter: Age (day) Value: 7
  misc_feature: MA Experiment 20000267 PARAMETER Experiment Name: At_Drought_P Parameter: Organism Value: A. thaliana
  misc_feature: MA Experiment 20000267 PARAMETER Experiment Name: At_Drought_P Parameter: Plant Line Value: WS
  misc_feature: MA Experiment 20000267 PARAMETER Experiment Name: At_Drought_P Parameter: Timepoint (hr) Value: 6
  misc_feature: MA Experiment 20000267 PARAMETER Experiment Name: At_Drought_P Parameter: Tissue Value: Whole Plant
  misc_feature: MA Experiment 20000267 PARAMETER Experiment Name: At_Drought_P Parameter: Treatment Value: Drought vs. No Drought
  misc_feature: MA Experiment ID: 20000286 Result: Up-regulated in Transcription
  misc_feature: MA Experiment 20000286 PARAMETER Experiment Name: At_Open_Flower_P Parameter: Age (day) Value: 21
  misc_feature: MA Experiment 20000286 PARAMETER Experiment Name: At_Open_Flower_P Parameter: Plant Line Value: WS
  misc_feature: MA Experiment 20000286 PARAMETER Experiment Name: At_Open_Flower_P Parameter: Tissue Value: Half Open vs. Whole Plant
  misc_feature: MA Experiment ID: 20000436 Result: Down-regulated in Transcription
  misc_feature: MA Experiment 20000436 PARAMETER Experiment Name: At_Drought_P Parameter: Age (day) Value: 7
  misc_feature: MA Experiment 20000436 PARAMETER Experiment Name: At_Drought_P Parameter: Organism Value: A. thaliana
  misc_feature: MA Experiment 20000436 PARAMETER Experiment Name: At_Drought_P Parameter: Plant Line Value: WS
  misc_feature: MA Experiment 20000436 PARAMETER Experiment Name: At_Drought_P Parameter: Timepoint (hr) Value: 12
  misc_feature: MA Experiment 20000436 PARAMETER Experiment Name: At_Drought_P Parameter: Tissue Value: Whole Plant
  misc_feature: MA Experiment 20000436 PARAMETER Experiment Name: At_Drought_P Parameter: Treatment Value: Drought vs. No Drought
  misc_feature: MA Experiment ID: 20000437 Result: Down-regulated in Transcription
  misc_feature: MA Experiment 20000437 PARAMETER Experiment Name: At_Drought_P Parameter: Age (day) Value: 8
  misc_feature: MA Experiment 20000437 PARAMETER Experiment Name: At_Drought_P Parameter: Organism Value: A. thaliana
  misc_feature: MA Experiment 20000437 PARAMETER Experiment Name: At_Drought_P Parameter: Plant Line Value: WS
  misc_feature: MA Experiment 20000437 PARAMETER Experiment Name: At_Drought_P Parameter: Timepoint (hr) Value: 24
  misc_feature: MA Experiment 20000437 PARAMETER Experiment Name: At_Drought_P Parameter: Tissue Value: Whole Plant
  misc_feature: MA Experiment 20000437 PARAMETER Experiment Name: At_Drought_P Parameter: Treatment Value: Drought vs. No Drought
  misc_feature: MA Experiment ID: 20000438 Result: Up-regulated in Transcription
  misc_feature: MA Experiment 20000438 PARAMETER Experiment Name: At_Shoots__P Parameter: Age (day) Value: 14
  misc_feature: MA Experiment 20000438 PARAMETER Experiment Name: At_Shoots__P Parameter: Tissue Value: Shoots vs. Whole Plant
  misc_feature: MA Experiment ID: 20000451 Result: Up-regulated in Transcription
  misc_feature: MA Experiment 20000451 PARAMETER Experiment Name: At_CS6879_Shoots-Roots_P Parameter: Age (day) Value: 14
  misc_feature: MA Experiment 20000451 PARAMETER Experiment Name: At_CS6879_Shoots-Roots_P Parameter: Organism Value: A. thaliana
  misc_feature: MA Experiment 20000451 PARAMETER Experiment Name: At_CS6879_Shoots-Roots_P Parameter: Plant Line Value: CS6879 vs. WS
  misc_feature: MA Experiment 20000451 PARAMETER Experiment Name: At_CS6879_Shoots-Roots_P Parameter: Tissue Value: Roots
  misc_feature: MA Experiment ID: 20000453 Result: Down-regulated in Transcription
  misc_feature: MA Experiment 20000453 PARAMETER Experiment Name: At_100uM_ABA_P Parameter: Age (day) Value: 15
  misc_feature: MA Experiment 20000453 PARAMETER Experiment Name: At_100uM_ABA_P Parameter: Organism Value: A. thaliana
  misc_feature: MA Experiment 20000453 PARAMETER Experiment Name: At_100uM_ABA_P Parameter: Plant Line Value: WS
  misc_feature: MA Experiment 20000453 PARAMETER Experiment Name: At_100uM_ABA_P Parameter: Timepoint (hr) Value: 24
  misc_feature: MA Experiment 20000453 PARAMETER Experiment Name: At_100uM_ABA_P Parameter: Tissue Value: Aerial
  misc_feature: MA Experiment 20000453 PARAMETER Experiment Name: At_100uM_ABA_P Parameter: Treatment Value: 100uM ABA vs. No Treatment
  misc_feature: MA Experiment ID: 20000573 Result: Down-regulated in Transcription
  misc_feature: MA Experiment 20000573 PARAMETER Experiment Name: At_100uM_ABA_Mutants__P Parameter: Organism Value: A. thaliana
  misc_feature: MA Experiment 20000573 PARAMETER Experiment Name: At_100uM_ABA_Mutants__P Parameter: Plant Line Value: CS22 vs. Ler wt
  misc_feature: MA Experiment 20000573 PARAMETER Experiment Name: At_100uM_ABA_Mutants__P Parameter: Timepoint (hr) Value: N/A
  misc_feature: MA Experiment 20000573 PARAMETER Experiment Name: At_100uM_ABA_Mutants__P Parameter: Tissue Value: Whole Plant
  misc_feature: MA Experiment 20000573 PARAMETER Experiment Name: At_100uM_ABA_Mutants__P Parameter: Treatment Value: None
  misc_feature: MA Experiment ID: 20001248 Result: Up-regulated in Transcription
  misc_feature: MA Experiment 20001248 PARAMETER Experiment Name: At_Far-red-induction_P Parameter: Age (day) Value: 7
  misc_feature: MA Experiment 20001248 PARAMETER Experiment Name: At_Far-red-induction_P Parameter: Light Value: Far-red vs. White
  misc_feature: MA Experiment 20001248 PARAMETER Experiment Name: At_Far-red-induction_P Parameter: Organism Value: A. thaliana
  misc_feature: MA Experiment 20001248 PARAMETER Experiment Name: At_Far-red-induction_P Parameter: Plant Line Value: Columbia
  misc_feature: MA Experiment 20001248 PARAMETER Experiment Name: At_Far-red-induction_P Parameter: Timepoint (hr) Value: 4
  misc_feature: MA Experiment 20001248 PARAMETER Experiment Name: At_Far-red-induction_P Parameter: Tissue Value: Whole Plant
  misc_feature: MA Experiment ID: 20001450 Result: Up-regulated in Transcription
  misc_feature: MA Experiment 20001450 PARAMETER Experiment Name: At_Far-red-induction_P Parameter: Age (day) Value: 7
  misc_feature: MA Experiment 20001450 PARAMETER Experiment Name: At_Far-red-induction_P Parameter: Light Value: Far-red vs. White
  misc_feature: MA Experiment 20001450 PARAMETER Experiment Name: At_Far-red-induction_P Parameter: Organism Value: A. thaliana
  misc_feature: MA Experiment 20001450 PARAMETER Experiment Name: At_Far-red-induction_P Parameter: Plant Line Value: Columbia
  misc_feature: MA Experiment 20001450 PARAMETER Experiment Name: At_Far-red-induction_P Parameter: Timepoint (hr) Value: 8
  misc_feature: MA Experiment 20001450 PARAMETER Experiment Name: At_Far-red-induction_P Parameter: Tissue Value: Whole Plant
  misc_feature: MA Experiment ID: 20001554 Result: Down-regulated in Transcription
  misc_feature: MA Experiment 20001554 PARAMETER Experiment Name: At_Drought_Soil_Dry_P Parameter: Age (day) Value: 21
  misc_feature: MA Experiment 20001554 PARAMETER Experiment Name: At_Drought_Soil_Dry_P Parameter: Organism Value: A. thaliana
  misc_feature: MA Experiment 20001554 PARAMETER Experiment Name: At_Drought_Soil_Dry_P Parameter: Plant Line Value: WS
  misc_feature: MA Experiment 20001554 PARAMETER Experiment Name: At_Drought_Soil_Dry_P Parameter: Post Timepoint (hr) Value: None
  misc_feature: MA Experiment 20001554 PARAMETER Experiment Name: At_Drought_Soil_Dry_P Parameter: Post-Treatment Value: None
  misc_feature: MA Experiment 20001554 PARAMETER Experiment Name: At_Drought_Soil_Dry_P Parameter: Timepoint (day) Value: 7
  misc_feature: MA Experiment 20001554 PARAMETER Experiment Name: At_Drought_Soil_Dry_P Parameter: Treatment Value: Drought vs. No Drought
  misc_feature: MA Experiment ID: 20001555 Result: Down-regulated in Transcription
  misc_feature: MA Experiment 20001555 PARAMETER Experiment Name: At_Drought_Soil_Dry_P Parameter: Age (day) Value: 24
  misc_feature: MA Experiment 20001555 PARAMETER Experiment Name: At_Drought_Soil_Dry_P Parameter: Organism Value: A. thaliana
  misc_feature: MA Experiment 20001555 PARAMETER Experiment Name: At_Drought_Soil_Dry_P Parameter: Plant Line Value: WS
  misc_feature: MA Experiment 20001555 PARAMETER Experiment Name: At_Drought_Soil_Dry_P Parameter: Post Timepoint (hr) Value: None
  misc_feature: MA Experiment 20001555 PARAMETER Experiment Name: At_Drought_Soil_Dry_P Parameter: Post-Treatment Value: None
  misc_feature: MA Experiment 20001555 PARAMETER Experiment Name: At_Drought_Soil_Dry_P Parameter: Timepoint (day) Value: 10
  misc_feature: MA Experiment 20001555 PARAMETER Experiment Name: At_Drought_Soil_Dry_P Parameter: Treatment Value: Drought vs. No Drought
  misc_feature: MA Experiment ID: 20001556 Result: Down-regulated in Transcription
  misc_feature: MA Experiment 20001556 PARAMETER Experiment Name: At_Drought_Soil_Dry_P Parameter: Age (day) Value: 26
  misc_feature: MA Experiment 20001556 PARAMETER Experiment Name: At_Drought_Soil_Dry_P Parameter: Organism Value: A. thaliana
  misc_feature: MA Experiment 20001556 PARAMETER Experiment Name: At_Drought_Soil_Dry_P Parameter: Plant Line Value: WS
  misc_feature: MA Experiment 20001556 PARAMETER Experiment Name: At_Drought_Soil_Dry_P Parameter: Post Timepoint (hr) Value: None
  misc_feature: MA Experiment 20001556 PARAMETER Experiment Name: At_Drought_Soil_Dry_P Parameter: Post-Treatment Value: None
  misc_feature: MA Experiment 20001556 PARAMETER Experiment Name: At_Drought_Soil_Dry_P Parameter: Timepoint (day) Value: 12
  misc_feature: MA Experiment 20001556 PARAMETER Experiment Name: At_Drought_Soil_Dry_P Parameter: Treatment Value: Drought vs. No Drought
  misc_feature: MA Experiment ID: 20001557 Result: Up-regulated in Transcription
  misc_feature: MA Experiment 20001557 PARAMETER Experiment Name: At_Drought_Soil_Dry_P Parameter: Age (day) Value: 27
  misc_feature: MA Experiment 20001557 PARAMETER Experiment Name: At_Drought_Soil_Dry_P Parameter: Organism Value: A. thaliana
  misc_feature: MA Experiment 20001557 PARAMETER Experiment Name: At_Drought_Soil_Dry_P Parameter: Plant Line Value: WS
  misc_feature: MA Experiment 20001557 PARAMETER Experiment Name: At_Drought_Soil_Dry_P Parameter: Post Timepoint (hr) Value: 3
  misc_feature: MA Experiment 20001557 PARAMETER Experiment Name: At_Drought_Soil_Dry_P Parameter: Post-Treatment Value: Re-Water vs. No Drought
  misc_feature: MA Experiment 20001557 PARAMETER Experiment Name: At_Drought_Soil_Dry_P Parameter: Timepoint (day) Value: 13
  misc_feature: MA Experiment 20001557 PARAMETER Experiment Name: At_Drought_Soil_Dry_P Parameter: Treatment Value: Drought vs. No Drought
  misc_feature: MA Experiment ID: 20001558 Result: Up-regulated in Transcription
  misc_feature: MA Experiment 20001558 PARAMETER Experiment Name: At_Drought_Soil_Dry_P Parameter: Age (day) Value: 27
  misc_feature: MA Experiment 20001558 PARAMETER Experiment Name: At_Drought_Soil_Dry_P Parameter: Organism Value: A. thaliana
  misc_feature: MA Experiment 20001558 PARAMETER Experiment Name: At_Drought_Soil_Dry_P Parameter: Plant Line Value: WS
  misc_feature: MA Experiment 20001558 PARAMETER Experiment Name: At_Drought_Soil_Dry_P Parameter: Post Timepoint (hr) Value: 6
  misc_feature: MA Experiment 20001558 PARAMETER Experiment Name: At_Drought_Soil_Dry_P Parameter: Post-Treatment Value: Re-Water vs. No Drought
  misc_feature: MA Experiment 20001558 PARAMETER Experiment Name: At_Drought_Soil_Dry_P Parameter: Timepoint (day) Value: 13
  misc_feature: MA Experiment 20001558 PARAMETER Experiment Name: At_Drought_Soil_Dry_P Parameter: Treatment Value: Drought vs. No Drought
  misc_feature: MA Experiment ID: 20001559 Result: Down-regulated in Transcription
  misc_feature: MA Experiment 20001559 PARAMETER Experiment Name: At_Drought_Soil_Dry_P Parameter: Age (day) Value: 28
  misc_feature: MA Experiment 20001559 PARAMETER Experiment Name: At_Drought_Soil_Dry_P Parameter: Organism Value: A. thaliana
  misc_feature: MA Experiment 20001559 PARAMETER Experiment Name: At_Drought_Soil_Dry_P Parameter: Plant Line Value: WS
  misc_feature: MA Experiment 20001559 PARAMETER Experiment Name: At_Drought_Soil_Dry_P Parameter: Post Timepoint (hr) Value: 29
  misc_feature: MA Experiment 20001559 PARAMETER Experiment Name: At_Drought_Soil_Dry_P Parameter: Post-Treatment Value: Re-Water vs. No Drought
  misc_feature: MA Experiment 20001559 PARAMETER Experiment Name: At_Drought_Soil_Dry_P Parameter: Timepoint (day) Value: 14
  misc_feature: MA Experiment 20001559 PARAMETER Experiment Name: At_Drought_Soil_Dry_P Parameter: Treatment Value: Drought vs. No Drought
  misc_feature: MA Experiment ID: 20001757 Result: Up-regulated in Transcription
  misc_feature: MA Experiment 20001757 PARAMETER Experiment Name: At_50mM_NH4NO3_L-to-H_P Parameter: Timepoint (hr) Value: 6
  misc_feature: MA Experiment 20001757 PARAMETER Experiment Name: At_50mM_NH4NO3_L-to-H_P Parameter: Tissue Value: Leaf
  misc_feature: MA Experiment 20001757 PARAMETER Experiment Name: At_50mM_NH4NO3_L-to-H_P Parameter: Treatment Value: 50mM NH4NO3 vs 100mM Mannitol
  misc_feature: MA Experiment ID: 20001905 Result: Down-regulated in Transcription
  misc_feature: MA Experiment 20001905 PARAMETER Experiment Name: At_Drought_Reproduction_P Parameter: Age (day) Value: 40
  misc_feature: MA Experiment 20001905 PARAMETER Experiment Name: At_Drought_Reproduction_P Parameter: Organism Value: A. thaliana
  misc_feature: MA Experiment 20001905 PARAMETER Experiment Name: At_Drought_Reproduction_P Parameter: Plant Line Value: WS
  misc_feature: MA Experiment 20001905 PARAMETER Experiment Name: At_Drought_Reproduction_P Parameter: Timepoint (day) Value: 10
  misc_feature: MA Experiment 20001905 PARAMETER Experiment Name: At_Drought_Reproduction_P Parameter: Tissue Value: Rosettes
  misc_feature: MA Experiment 20001905 PARAMETER Experiment Name: At_Drought_Reproduction_P Parameter: Treatment Value: Drought vs. No Drought
  misc_feature: MA Experiment ID: 20001906 Result: Down-regulated in Transcription
  misc_feature: MA Experiment 20001906 PARAMETER Experiment Name: At_Drought_Reproduction_P Parameter: Age (day) Value: 35
  misc_feature: MA Experiment 20001906 PARAMETER Experiment Name: At_Drought_Reproduction_P Parameter: Organism Value: A. thaliana
  misc_feature: MA Experiment 20001906 PARAMETER Experiment Name: At_Drought_Reproduction_P Parameter: Plant Line Value: WS
  misc_feature: MA Experiment 20001906 PARAMETER Experiment Name: At_Drought_Reproduction_P Parameter: Timepoint (day) Value: 5
  misc_feature: MA Experiment 20001906 PARAMETER Experiment Name: At_Drought_Reproduction_P Parameter: Tissue Value: Siliques
  misc_feature: MA Experiment 20001906 PARAMETER Experiment Name: At_Drought_Reproduction_P Parameter: Treatment Value: Drought vs. No Drought
  misc_feature: MA Experiment ID: 20001908 Result: Down-regulated in Transcription
  misc_feature: MA Experiment 20001908 PARAMETER Experiment Name: At_Drought_Reproduction_P Parameter: Age (day) Value: 40
  misc_feature: MA Experiment 20001908 PARAMETER Experiment Name: At_Drought_Reproduction_P Parameter: Organism Value: A. thaliana
  misc_feature: MA Experiment 20001908 PARAMETER Experiment Name: At_Drought_Reproduction_P Parameter: Plant Line Value: WS
  misc_feature: MA Experiment 20001908 PARAMETER Experiment Name: At_Drought_Reproduction_P Parameter: Timepoint (day) Value: 10
  misc_feature: MA Experiment 20001908 PARAMETER Experiment Name: At_Drought_Reproduction_P Parameter: Tissue Value: Siliques
  misc_feature: MA Experiment 20001908 PARAMETER Experiment Name: At_Drought_Reproduction_P Parameter: Treatment Value: Drought vs. No Drought
  misc_feature: MA Experiment ID: 20001911 Result: Down-regulated in Transcription
  misc_feature: MA Experiment 20001911 PARAMETER Experiment Name: At_Drought_Reproduction_P Parameter: Age (day) Value: 40
  misc_feature: MA Experiment 20001911 PARAMETER Experiment Name: At_Drought_Reproduction_P Parameter: Organism Value: A. thaliana
  misc_feature: MA Experiment 20001911 PARAMETER Experiment Name: At_Drought_Reproduction_P Parameter: Plant Line Value: WS
  misc_feature: MA Experiment 20001911 PARAMETER Experiment Name: At_Drought_Reproduction_P Parameter: Timepoint (day) Value: 10
  misc_feature: MA Experiment 20001911 PARAMETER Experiment Name: At_Drought_Reproduction_P Parameter: Tissue Value: Flowers
  misc_feature: MA Experiment 20001911 PARAMETER Experiment Name: At_Drought_Reproduction_P Parameter: Treatment Value: Drought vs. No Drought
tgaacatttctcagtcccacagggtcgcagagctattgagcttgtagcgggtaaagagagtgccatcgctcaagtggttcggactgtcattgggaagacttacgtgctgtcttttgcggttggagacgccaacaatgcttgcaaaggatcaatggtggttgaggcttttgcaggaaaagatacacttaaggtcccttacgagtcgaaaggcacaggagggtttaaacgagcttctattcgatttgtggcggtttcgacccgatcaagaattatgttctacagcactttctatgccatgaggagcgatgatttctcgtcattgtgtgggcctgtgatcgatgatgtcaagcttataagcgttcgtaaaccatagatgaatcaccaatcctattacaagaaaatgcatcgtgtggtcttcttttattttccttaaactgtctttggtgtgtgttggattttattgaaacgagaaggtgaaaaaaacagagttttatttacgagagttagggttttatataggcagatgggcctttgcttatattgtattttcttgtatgagaaggcaaaagaaacgttgcctatatcttatgtatctaggccttttaatttttatggaagagttacaaaacttacaataaagttgtatgcatattttactt

SEQ ID NO: 86171 - protein, 123 aa, Arabidopsis thaliana
  peptide (1)..(123): Ceres Seq. ID no. 12687371
  misc_feature (1)..(121): Pfam Name: Protein of unknown function, DUF642 Pfam Description: Protein of unknown function, DUF642
  misc_feature (1)..(123): Homolog of NCBI NO: 15239438 NR Description: putative protein; protein id: At5g25460.1, by cDNA: 1351., supported by cDNA: gi_14423449, supported by gi_15809821 [Arabidopsis thaliana]
  misc_feature (1)..(123): Homolog of NCBI NO: 15809822 NR Description: AT5g25460/F18G18_200 [Arabidopsis thaliana]
  misc_feature (1)..(123): Homolog of NCBI NO: 21537379 NR Description: unknown [Arabidopsis thaliana]
  misc_feature (1)..(123): Homolog of NCBI NO: 15239049 NR Description: putative protein; protein id: At5g11420.1, by cDNA: 25522., supported by cDNA: gi_15028264, supported by
  misc_feature (1)..(123): Homolog of NCBI NO: 21554402 NR Description: unknown [Arabidopsis thaliana]
  misc_feature (1)..(123): Homolog of NCBI NO: 23397043 NR Description: unknown protein [Arabidopsis thaliana]
  misc_feature (1)..(123): Homolog of NCBI NO: 7488898 NR Description: hypothetical protein - castor bean
  misc_feature (1)..(123): Homolog of NCBI NO: 7486632 NR Description: hypothetical protein F8B4.160 - Arabidopsis >gi|4049348|emb|CAA22573.1| putative protein [Arabidopsis >gi|7270150|emb|CAB79963.1| putative protein [Arabidopsis
  misc_feature (1)..(123): Homolog of NCBI NO: 18418018 NR Description: putative protein; protein id: At4g32460.1, by cDNA: 37529. [Arabidopsis thaliana]
  misc_feature (2)..(122): Homolog of NCBI NO: 7488741 NR Description: hypothetical protein precursor - alfalfa
EHFSVPQGRRAIELVAGKESAIAQVVRTVIGKTYVLSFAVGDANNACKGSMVVEAFAGKDTLKVPYESKGTGGFKRASIRFVAVSTRSRIMFYSTFYAMRSDDFSSLCGPVIDDVKLISVRKP

SEQ ID NO: 86172 - protein, 73 aa, Arabidopsis thaliana; identical to SEQ ID NO: 39856
  peptide (1)..(73): Ceres Seq. ID no. 12687372
  misc_feature (1)..(71): Pfam Name: Protein of unknown function, DUF642 Pfam Description: Protein of unknown function, DUF642
  misc_feature (1)..(73): Homolog of NCBI NO: 15239438 NR Description: putative protein; protein id: At5g25460.1, by cDNA: 1351., supported by cDNA: gi_14423449, supported by gi_15809821 [Arabidopsis thaliana]
  misc_feature (1)..(73): Homolog of NCBI NO: 15809822 NR Description: AT5g25460/F18G18_200 [Arabidopsis thaliana]
  misc_feature (1)..(73): Homolog of NCBI NO: 21537379 NR Description: unknown [Arabidopsis thaliana]
  misc_feature (1)..(73): Homolog of NCBI NO: 15239049 NR Description: putative protein; protein id: At5g11420.1, by cDNA: 25522., supported by cDNA: gi_15028264, supported by
  misc_feature (1)..(73): Homolog of NCBI NO: 21554402 NR Description: unknown [Arabidopsis thaliana]
  misc_feature (1)..(73): Homolog of NCBI NO: 23397043 NR Description: unknown protein [Arabidopsis thaliana]
  misc_feature (1)..(73): Homolog of NCBI NO: 7488898 NR Description: hypothetical protein - castor bean
  misc_feature (1)..(73): Homolog of NCBI NO: 7486632 NR Description: hypothetical protein F8B4.160 - Arabidopsis >gi|4049348|emb|CAA22573.1| putative protein [Arabidopsis >gi|7270150|emb|CAB79963.1| putative protein [Arabidopsis
  misc_feature (1)..(73): Homolog of NCBI NO: 18418018 NR Description: putative protein; protein id: At4g32460.1, by cDNA: 37529. [Arabidopsis thaliana]
  misc_feature (1)..(72): Homolog of NCBI NO: 7488741 NR Description: hypothetical protein precursor - alfalfa

SEQ ID NO: 86173 - DNA, 1725 bp, Arabidopsis thaliana
  misc_feature (1)..(1725): Ceres Seq. ID no. 12687373
  misc_feature: MA Experiment ID: 108434 Result: Down-regulated in Transcription
  misc_feature: MA Experiment 108434 PARAMETER Experiment Name: At_Root_Tips_cDNA_P Parameter: Tissue Value: Root Tips
  misc_feature: MA Experiment ID: 108469 Result: Up-regulated in Transcription
  misc_feature: MA Experiment ID: 108488 Result: Down-regulated in Transcription
  misc_feature: MA Experiment ID: 108561 Result: Up-regulated in Transcription
  misc_feature: MA Experiment 108561 PARAMETER Experiment Name: At_100uM_ABA_cDNA_P Parameter: Timepoint (hr) Value: 6
  misc_feature: MA Experiment 108561 PARAMETER Experiment Name: At_100uM_ABA_cDNA_P Parameter: Tissue Value: Aerial
  misc_feature: MA Experiment 108561 PARAMETER Experiment Name: At_100uM_ABA_cDNA_P Parameter: Treatment Value: 100uM ABA vs. No Treatment
  misc_feature: MA Experiment ID: 108573 Result: Up-regulated in Transcription
  misc_feature: MA Experiment 108573 PARAMETER Experiment Name: At_Drought_cDNA_P Parameter: Timepoint (hr) Value: 6
  misc_feature: MA Experiment 108573 PARAMETER Experiment Name: At_Drought_cDNA_P Parameter: Tissue Value: Aerial
  misc_feature: MA Experiment 108573 PARAMETER Experiment Name: At_Drought_cDNA_P Parameter: Treatment Value: Drought vs. No Drought
  misc_feature: MA Experiment ID: 108579 Result: Down-regulated in Transcription
  misc_feature: MA Experiment 108579 PARAMETER Experiment Name: At_4deg_Cold_cDNA_P Parameter: Temperature (deg C) Value: 4 vs. 22
  misc_feature: MA Experiment 108579 PARAMETER Experiment Name: At_4deg_Cold_cDNA_P Parameter: Timepoint (hr) Value: 6
  misc_feature: MA Experiment 108579 PARAMETER Experiment Name: At_4deg_Cold_cDNA_P Parameter: Tissue Value: Aerial
  misc_feature: MA Experiment ID: 108668 Result: Up-regulated in Transcription
  misc_feature: MA Experiment 108668 PARAMETER Experiment Name: At_2mM_SA_cDNA_P Parameter: Plant Line Value: WS
  misc_feature: MA Experiment 108668 PARAMETER Experiment Name: At_2mM_SA_cDNA_P Parameter: Timepoint (hr) Value: 6
  misc_feature: MA Experiment 108668 PARAMETER Experiment Name: At_2mM_SA_cDNA_P Parameter: Treatment Value: 2mM SA vs. No Treatment
  misc_feature: MA Experiment ID: 20000069 Result: Up-regulated in Transcription
  misc_feature: MA Experiment 20000069 PARAMETER Experiment Name: At_100uM_ABA_Mutants_cDNA_P Parameter: Plant Line Value: CS23
  misc_feature: MA Experiment 20000069 PARAMETER Experiment Name: At_100uM_ABA_Mutants_cDNA_P Parameter: Timepoint (hr) Value: 6
  misc_feature: MA Experiment 20000069 PARAMETER Experiment Name: At_100uM_ABA_Mutants_cDNA_P Parameter: Tissue Value: Aerial
  misc_feature: MA Experiment 20000069 PARAMETER Experiment Name: At_100uM_ABA_Mutants_cDNA_P Parameter: Treatment Value: 100uM ABA vs. No Treatment
  misc_feature: MA Experiment ID: 20000070 Result: Up-regulated in Transcription
  misc_feature: MA Experiment 20000070 PARAMETER Experiment Name: At_100uM_ABA_Mutants_cDNA_P Parameter: Plant Line Value: CS24
  misc_feature: MA Experiment 20000070 PARAMETER Experiment Name: At_100uM_ABA_Mutants_cDNA_P Parameter: Timepoint (hr) Value: 6
  misc_feature: MA Experiment 20000070 PARAMETER Experiment Name: At_100uM_ABA_Mutants_cDNA_P Parameter: Tissue Value: Aerial
  misc_feature: MA Experiment 20000070 PARAMETER Experiment Name: At_100uM_ABA_Mutants_cDNA_P Parameter: Treatment Value: 100uM ABA vs. No Treatment
  misc_feature: MA Experiment ID: 20000071 Result: Up-regulated in Transcription
  misc_feature: MA Experiment 20000071 PARAMETER Experiment Name: At_100uM_ABA_Mutants_cDNA_P Parameter: Plant Line Value: CS8104
  misc_feature: MA Experiment 20000071 PARAMETER Experiment Name: At_100uM_ABA_Mutants_cDNA_P Parameter: Timepoint (hr) Value: 6
  misc_feature: MA Experiment 20000071 PARAMETER Experiment Name: At_100uM_ABA_Mutants_cDNA_P Parameter: Tissue Value: Aerial
  misc_feature: MA Experiment 20000071 PARAMETER Experiment Name: At_100uM_ABA_Mutants_cDNA_P Parameter: Treatment Value: 100uM ABA vs. No Treatment
  misc_feature: MA Experiment ID: 20000072 Result: Up-regulated in Transcription
  misc_feature: MA Experiment 20000072 PARAMETER Experiment Name: At_100uM_ABA_Mutants_cDNA_P Parameter: Plant Line Value: CS8105
  misc_feature: MA Experiment 20000072 PARAMETER Experiment Name: At_100uM_ABA_Mutants_cDNA_P Parameter: Timepoint (hr) Value: 6
  misc_feature: MA Experiment 20000072 PARAMETER Experiment Name: At_100uM_ABA_Mutants_cDNA_P Parameter: Tissue Value: Aerial
  misc_feature: MA Experiment 20000072 PARAMETER Experiment Name: At_100uM_ABA_Mutants_cDNA_P Parameter: Treatment Value: 100uM ABA vs. No Treatment
  misc_feature: MA Experiment ID: 20000086 Result: Up-regulated in Transcription
  misc_feature: MA Experiment 20000086 PARAMETER Experiment Name: At_100uM_ABA_Mutants_cDNA_P Parameter: Plant Line Value: CS22
  misc_feature: MA Experiment 20000086 PARAMETER Experiment Name: At_100uM_ABA_Mutants_cDNA_P Parameter: Timepoint (hr) Value: 6
  misc_feature: MA Experiment 20000086 PARAMETER Experiment Name: At_100uM_ABA_Mutants_cDNA_P Parameter: Tissue Value: Aerial
  misc_feature: MA Experiment 20000086 PARAMETER Experiment Name: At_100uM_ABA_Mutants_cDNA_P Parameter: Treatment Value: 100uM ABA vs. No Treatment
  misc_feature: MA Experiment ID: 20000087 Result: Up-regulated in Transcription
  misc_feature: MA Experiment 20000087 PARAMETER Experiment Name: At_100uM_ABA_Mutants_cDNA_P Parameter: Plant Line Value: WS
  misc_feature: MA Experiment 20000087 PARAMETER Experiment Name: At_100uM_ABA_Mutants_cDNA_P Parameter: Timepoint (hr) Value: 6
  misc_feature: MA Experiment 20000087 PARAMETER Experiment Name: At_100uM_ABA_Mutants_cDNA_P Parameter: Tissue Value: Aerial
  misc_feature: MA Experiment 20000087 PARAMETER Experiment Name: At_100uM_ABA_Mutants_cDNA_P Parameter: Treatment Value: 100uM ABA vs. No Treatment
  misc_feature: MA Experiment ID: 20000088 Result: Up-regulated in Transcription
  misc_feature: MA Experiment 20000088 PARAMETER Experiment Name: At_100uM_ABA_Mutants_cDNA_P Parameter: Plant Line Value: Landsberg
  misc_feature: MA Experiment 20000088 PARAMETER Experiment Name: At_100uM_ABA_Mutants_cDNA_P Parameter: Timepoint (hr) Value: 6
  misc_feature: MA Experiment 20000088 PARAMETER Experiment Name: At_100uM_ABA_Mutants_cDNA_P Parameter: Tissue Value: Aerial
  misc_feature: MA Experiment 20000088 PARAMETER Experiment Name: At_100uM_ABA_Mutants_cDNA_P Parameter: Treatment Value: 100uM ABA vs. No Treatment
  misc_feature: MA Experiment ID: 20000090 Result: Up-regulated in Transcription
  misc_feature: MA Experiment ID: 20000111 Result: Down-regulated in Transcription
  misc_feature: MA Experiment 20000111 PARAMETER Experiment Name: At_42deg_Heat_cDNA_P Parameter: Temperature (deg C) Value: 42 vs. 22
  misc_feature: MA Experiment 20000111 PARAMETER Experiment Name: At_42deg_Heat_cDNA_P Parameter: Timepoint (hr) Value: 6
  misc_feature: MA Experiment 20000111 PARAMETER Experiment Name: At_42deg_Heat_cDNA_P Parameter: Tissue Value: Aerial
  misc_feature: MA Experiment ID: 20000113 Result: Down-regulated in Transcription
  misc_feature: MA Experiment 20000113 PARAMETER Experiment Name: At_42deg_Heat_cDNA_P Parameter: Temperature (deg C) Value: 42 vs. 22
  misc_feature: MA Experiment 20000113 PARAMETER Experiment Name: At_42deg_Heat_cDNA_P Parameter: Timepoint (hr) Value: 8
  misc_feature: MA Experiment 20000113 PARAMETER Experiment Name: At_42deg_Heat_cDNA_P Parameter: Tissue Value: Aerial
  misc_feature: MA Experiment ID: 20000117 Result: Up-regulated in Transcription
  misc_feature: MA Experiment 20000117 PARAMETER Experiment Name: At_100uM_ABA_Mutants_cDNA_P Parameter: Plant Line Value: Columbia
  misc_feature: MA Experiment 20000117 PARAMETER Experiment Name: At_100uM_ABA_Mutants_cDNA_P Parameter: Timepoint (hr) Value: 6
  misc_feature: MA Experiment 20000117 PARAMETER Experiment Name: At_100uM_ABA_Mutants_cDNA_P Parameter: Tissue Value: Aerial
  misc_feature: MA Experiment 20000117 PARAMETER Experiment Name: At_100uM_ABA_Mutants_cDNA_P Parameter: Treatment Value: 100uM ABA vs. No Treatment
  misc_feature: MA Experiment ID: 20000169 Result: Up-regulated in Transcription
  misc_feature: MA Experiment 20000169 PARAMETER Experiment Name: At_100uM_ABA_P Parameter: Age (day) Value: 14
  misc_feature: MA Experiment 20000169 PARAMETER Experiment Name: At_100uM_ABA_P Parameter: Organism Value: A. thaliana
  misc_feature: MA Experiment 20000169 PARAMETER Experiment Name: At_100uM_ABA_P Parameter: Plant Line Value: WS
  misc_feature: MA Experiment 20000169 PARAMETER Experiment Name: At_100uM_ABA_P Parameter: Timepoint (hr) Value: 6
  misc_feature: MA Experiment 20000169 PARAMETER Experiment Name: At_100uM_ABA_P Parameter: Tissue Value: Aerial
  misc_feature: MA Experiment 20000169 PARAMETER Experiment Name: At_100uM_ABA_P Parameter: Treatment Value: 100uM ABA vs. No Treatment
  misc_feature: MA Experiment ID: 20000173 Result: Down-regulated in Transcription
  misc_feature: MA Experiment 20000173 PARAMETER Experiment Name: At_42deg_Heat_P Parameter: Age (day) Value: 14
  misc_feature: MA Experiment 20000173 PARAMETER Experiment Name: At_42deg_Heat_P Parameter: Organism Value: A. thaliana
  misc_feature: MA Experiment 20000173 PARAMETER Experiment Name: At_42deg_Heat_P Parameter: Plant Line Value: WS
  misc_feature: MA Experiment 20000173 PARAMETER Experiment Name: At_42deg_Heat_P Parameter: Temperature (deg C) Value: 42 vs. 22
  misc_feature: MA Experiment 20000173 PARAMETER Experiment Name: At_42deg_Heat_P Parameter: Timepoint (hr) Value: 6
  misc_feature: MA Experiment 20000173 PARAMETER Experiment Name: At_42deg_Heat_P Parameter: Tissue Value: Aerial
  misc_feature: MA Experiment ID: 20000179 Result: Up-regulated in Transcription
  misc_feature: MA Experiment 20000179 PARAMETER Experiment Name: At_Germinating_Seeds_P Parameter: Age (hr) Value: 6 vs. 0
  misc_feature: MA Experiment 20000179 PARAMETER Experiment Name: At_Germinating_Seeds_P Parameter: Tissue Value: Germinating Seeds
  misc_feature: MA Experiment ID: 20000180 Result: Up-regulated in Transcription
  misc_feature: MA Experiment 20000180 PARAMETER Experiment Name: At_Germinating_Seeds_P Parameter: Age (hr) Value: 24 vs. 0
  misc_feature: MA Experiment 20000180 PARAMETER Experiment Name: At_Germinating_Seeds_P Parameter: Tissue Value: Germinating Seeds
  misc_feature: MA Experiment ID: 20000182 Result: Up-regulated in Transcription
  misc_feature: MA Experiment 20000182 PARAMETER Experiment Name: At_2mM_SA_P Parameter: Age (day) Value: 14
  misc_feature: MA Experiment 20000182 PARAMETER Experiment Name: At_2mM_SA_P Parameter: Organism Value: A. thaliana
  misc_feature: MA Experiment 20000182 PARAMETER Experiment Name: At_2mM_SA_P Parameter: Plant Line Value: WS
  misc_feature: MA Experiment 20000182 PARAMETER Experiment Name: At_2mM_SA_P Parameter: Timepoint (hr) Value: 6
  misc_feature: MA Experiment 20000182 PARAMETER Experiment Name: At_2mM_SA_P Parameter: Tissue Value: Aerial
  misc_feature: MA Experiment 20000182 PARAMETER Experiment Name: At_2mM_SA_P Parameter: Treatment Value: 2mM SA vs. No Treatment
  misc_feature: MA Experiment ID: 20000184 Result: Down-regulated in Transcription
  misc_feature: MA Experiment 20000184 PARAMETER Experiment Name: At_Shoots__P Parameter: Age (day) Value: 7
  misc_feature: MA Experiment 20000184 PARAMETER Experiment Name: At_Shoots__P Parameter: Tissue Value: Shoots vs. Whole Plant
  misc_feature: MA Experiment ID: 20000185 Result: Up-regulated in Transcription
  misc_feature: MA Experiment 20000185 PARAMETER Experiment Name: At_Roots__P Parameter: Age (day) Value: 7 vs. 21
  misc_feature: MA Experiment 20000185 PARAMETER Experiment Name: At_Roots__P Parameter: Organism Value: A. thaliana
  misc_feature: MA Experiment 20000185 PARAMETER Experiment Name: At_Roots__P Parameter: Tissue Value: Roots vs. Whole Plant
  misc_feature: MA Experiment ID: 20000264 Result: Up-regulated in Transcription
  misc_feature: MA Experiment 20000264 PARAMETER Experiment Name: At_Open_Flower_P Parameter: Age (day) Value: 21
  misc_feature: MA Experiment 20000264 PARAMETER Experiment Name: At_Open_Flower_P Parameter: Plant Line Value: WS
  misc_feature: MA Experiment 20000264 PARAMETER Experiment Name: At_Open_Flower_P Parameter: Tissue Value: Open Flower vs. Whole Plant
  misc_feature: MA Experiment ID: 20000438 Result: Down-regulated in Transcription
  misc_feature: MA Experiment 20000438 PARAMETER Experiment Name: At_Shoots__P Parameter: Age (day) Value: 14
  misc_feature: MA Experiment 20000438 PARAMETER Experiment Name: At_Shoots__P Parameter: Tissue Value: Shoots vs. Whole Plant
  misc_feature: MA Experiment ID: 20000495 Result: Up-regulated in Transcription
  misc_feature: MA Experiment 20000495 PARAMETER Experiment Name: At_Guard_Cells_P Parameter: Harvest Date Value: 8/2/2002
  misc_feature: MA Experiment 20000495 PARAMETER Experiment Name: At_Guard_Cells_P Parameter: Organism Value: A. thaliana
  misc_feature: MA Experiment 20000495 PARAMETER Experiment Name: At_Guard_Cells_P Parameter: Tissue Value: Guard Cells vs. Leaves
  misc_feature: MA Experiment ID: 20000794 Result: Up-regulated in Transcription
  misc_feature: MA Experiment 20000794 PARAMETER Experiment Name: At_Petals_P Parameter: Age (day) Value: 23-25 days
  misc_feature: MA Experiment 20000794 PARAMETER Experiment Name: At_Petals_P Parameter: Plant Line Value: WS
  misc_feature: MA Experiment 20000794 PARAMETER Experiment Name: At_Petals_P Parameter: Tissue Value: Petals vs. Whole plant
  misc_feature: MA Experiment ID: 20001757 Result: Down-regulated in Transcription
  misc_feature: MA Experiment 20001757 PARAMETER Experiment Name: At_50mM_NH4NO3_L-to-H_P Parameter: Timepoint (hr) Value: 6
  misc_feature: MA Experiment 20001757 PARAMETER Experiment Name: At_50mM_NH4NO3_L-to-H_P Parameter: Tissue Value: Leaf
  misc_feature: MA Experiment 20001757 PARAMETER Experiment Name: At_50mM_NH4NO3_L-to-H_P Parameter: Treatment Value: 50mM NH4NO3 vs 100mM Mannitol
  misc_feature: MA Experiment ID: 20001904 Result: Up-regulated in Transcription
  misc_feature: MA Experiment 20001904 PARAMETER Experiment Name: At_Drought_Reproduction_P Parameter: Age (day) Value: 37
  misc_feature: MA Experiment 20001904 PARAMETER Experiment Name: At_Drought_Reproduction_P Parameter: Organism Value: A. thaliana
  misc_feature: MA Experiment 20001904 PARAMETER Experiment Name: At_Drought_Reproduction_P Parameter: Plant Line Value: WS
  misc_feature: MA Experiment 20001904 PARAMETER Experiment Name: At_Drought_Reproduction_P Parameter: Timepoint (day) Value: 7
  misc_feature: MA Experiment 20001904 PARAMETER Experiment Name: At_Drought_Reproduction_P Parameter: Tissue Value: Rosettes
  misc_feature: MA Experiment 20001904 PARAMETER Experiment Name: At_Drought_Reproduction_P Parameter: Treatment Value: Drought vs. No Drought
  misc_feature: MA Experiment ID: 20001905 Result: Up-regulated in Transcription
  misc_feature: MA Experiment 20001905 PARAMETER Experiment Name: At_Drought_Reproduction_P Parameter: Age (day) Value: 40
  misc_feature: MA Experiment 20001905 PARAMETER Experiment Name: At_Drought_Reproduction_P Parameter: Organism Value: A. thaliana
  misc_feature: MA Experiment 20001905 PARAMETER Experiment Name: At_Drought_Reproduction_P Parameter: Plant Line Value: WS
  misc_feature: MA Experiment 20001905 PARAMETER Experiment Name: At_Drought_Reproduction_P Parameter: Timepoint (day) Value: 10
  misc_feature: MA Experiment 20001905 PARAMETER Experiment Name: At_Drought_Reproduction_P Parameter: Tissue Value: Rosettes
  misc_feature: MA Experiment 20001905 PARAMETER Experiment Name: At_Drought_Reproduction_P Parameter: Treatment Value: Drought vs. No Drought
  misc_feature: MA Experiment ID: 20001906 Result: Up-regulated in Transcription
  misc_feature: MA Experiment 20001906 PARAMETER Experiment Name: At_Drought_Reproduction_P Parameter: Age (day) Value: 35
  misc_feature: MA Experiment 20001906 PARAMETER Experiment Name: At_Drought_Reproduction_P Parameter: Organism Value: A. thaliana
  misc_feature: MA Experiment 20001906 PARAMETER Experiment Name: At_Drought_Reproduction_P Parameter: Plant Line Value: WS
  misc_feature: MA Experiment 20001906 PARAMETER Experiment Name: At_Drought_Reproduction_P Parameter: Timepoint (day) Value: 5
  misc_feature: MA Experiment 20001906 PARAMETER Experiment Name: At_Drought_Reproduction_P Parameter: Tissue Value: Siliques
  misc_feature: MA Experiment 20001906 PARAMETER Experiment Name: At_Drought_Reproduction_P Parameter: Treatment Value: Drought vs. No Drought
  misc_feature: MA Experiment ID: 20001908 Result: Up-regulated in Transcription
  misc_feature: MA Experiment 20001908 PARAMETER Experiment Name: At_Drought_Reproduction_P Parameter: Age (day) Value: 40
  misc_feature: MA Experiment 20001908 PARAMETER Experiment Name: At_Drought_Reproduction_P Parameter: Organism Value: A. thaliana
  misc_feature: MA Experiment 20001908 PARAMETER Experiment Name: At_Drought_Reproduction_P Parameter: Plant Line Value: WS
  misc_feature: MA Experiment 20001908 PARAMETER Experiment Name: At_Drought_Reproduction_P Parameter: Timepoint (day) Value: 10
  misc_feature: MA Experiment 20001908 PARAMETER Experiment Name: At_Drought_Reproduction_P Parameter: Tissue Value: Siliques
  misc_feature: MA Experiment 20001908 PARAMETER Experiment Name: At_Drought_Reproduction_P Parameter: Treatment Value: Drought vs. No Drought
  misc_feature: MA Experiment ID: 20001911 Result: Up-regulated in Transcription
  misc_feature: MA Experiment 20001911 PARAMETER Experiment Name: At_Drought_Reproduction_P Parameter: Age (day) Value: 40
  misc_feature: MA Experiment 20001911 PARAMETER Experiment Name: At_Drought_Reproduction_P Parameter: Organism Value: A. thaliana
  misc_feature: MA Experiment 20001911 PARAMETER Experiment Name: At_Drought_Reproduction_P Parameter: Plant Line Value: WS
  misc_feature: MA Experiment 20001911 PARAMETER Experiment Name: At_Drought_Reproduction_P Parameter: Timepoint (day) Value: 10
  misc_feature: MA Experiment 20001911 PARAMETER Experiment Name: At_Drought_Reproduction_P Parameter: Tissue Value: Flowers
  misc_feature: MA Experiment 20001911 PARAMETER Experiment Name: At_Drought_Reproduction_P Parameter: Treatment Value: Drought vs. No Drought
  misc_feature: Pfam Name: DLH Pfam Description: Dienelactone hydrolase family
gtcctttttttcttggtttctgaaacataatttcttagaggcggtctgctgcgaaagatccttcctctcacaaccatctctgttcgatagatccaaccaaaaaccgcatcgattttccattcacacggcactgaatgatgatgacttggaggagagcttctcaagtttgtagctgtcgattgttaaatattttcttgtttcttcttgtccagatttcacatataactcaaggaaacaatgttccctctccaataccagttggtgcaaggcatgtgatttgattttttttcaatttcatttaacttatcgaaatttttttaaaaagtatctaaccaaatgcaatagaaaacaaaatatgtgacgacaaatataaaaagtgtttttattaaagataacattaaagaaaacaaaaaggtatttaaagctaactaaaacacgtcattaagagtcatgtagataattgtgaaattgcatgccgttgacataaatttcgtaacaaaagaaaaaacagaacacagaatcttgttctcccaccgatcaccaccggagatatggaatcgccgattactcaaccccaaatgtttagattgcagtttcttcgtcttcttcatagtcgacgatcaccccaagttccattaatagccgattcttcaaatcctatcgagaatcctctctttcaagctgatgttccttctaccacagcaatagagtcttgtccaaaagaaaacattggtaagttaaaagatatgcttaaagaagaaaacattcatttgcacactgaggattcagagcaagggaaattacctttgcttattttaagcttgaaagagagaagtgaagaaaaaaggccagcgattgtgtttatgcatggcacaaacacaaacaaagaatggttaaggccatggcttgaagcatatgcttcgcggggatatgtagccatcggtttagactctcgttaccacggtgaacgtgctgattgcaaaactgcatatcgagatgctcttatatcatcttggagaaatggaaacactatgccttttatctttgatactgtatgggatttgatcaaactagctgaatatcttactcagagggatgatatagacccgaaaaagataggaatcaccggtatttcgctaggagggatgcatgcttggtttgctgctgcagctgacactcgctattccgtggttgtcccattaatcggtgttcagggttttagatgggcaatagagaatgatgagtgggaagcaagagtcaacagtatcaaacctttatttgaagaagcaaggattgatctcggaaagaacataatcgacaaagaactagtcgagaaggtgtggaacagaatagctcctggcctagcttcgaagtttgattcaccgtactcattaccagtgattgctccacggcctctttacatccttaacggcgcaaatgatcctcgatgtcctcttggcggactagaacttgcgttaaagagagctgaaaaggcgtataaggaaacagcttctcctggaaacttcaagttcaaagcagaagatggagttggacacgaagcgacgagtttcatgatcaaagaatcatcagactggtttgacaaattccttaaacaagaagatatgacaacttgacagattgtaatattgtgaactaataaagaagaatcatcttcttctcgttaataatgtattcactctcgcaaatcaatatcattacaaattt

SEQ ID NO: 86174 - protein, 360 aa, Arabidopsis thaliana
  peptide (1)..(360): Ceres Seq. ID no. 12687374
  misc_feature: Pfam Name: DLH Pfam Description: Dienelactone hydrolase family
  misc_feature (1)..(360): Homolog of NCBI NO: 30689997 NR Description: expressed protein [Arabidopsis thaliana] putative protein [Arabidopsis thaliana]
  misc_feature (143)..(353): Homolog of NCBI NO: 34898368 NR Description: ESTs C19441(E10423),C99201(E10423) correspond to
  misc_feature (8)..(124): Homolog of NCBI NO: 34898368 NR Description: ESTs C19441(E10423),C99201(E10423) correspond to
MESPITQPQMFRLQFLRLLHSRRSPQVPLIADSSNPIENPLFQADVPSTTAIESCPKENIGKLKDMLKEENIHLHTEDSEQGKLPLLILSLKERSEEKRPAIVFMHGTNTNKEWLRPWLEAYASRGYVAIGLDSRYHGERADCKTAYRDALISSWRNGNTMPFIFDTVWDLIKLAEYLTQRDDIDPKKIGITGISLGGMHAWFAAAADTRYSVVVPLIGVQGFRWAIENDEWEARVNSIKPLFEEARIDLGKNIIDKELVEKVWNRIAPGLASKFDSPYSLPVIAPRPLYILNGANDPRCPLGGLELALKRAEKAYKETASPGNFKFKAEDGVGHEATSFMIKESSDWFDKFLKQEDMTT

SEQ ID NO: 86175 - protein, 351 aa, Arabidopsis thaliana
  peptide (1)..(351): Ceres Seq. ID no. 12687375
  misc_feature: Pfam Name: DLH Pfam Description: Dienelactone hydrolase family
  misc_feature (1)..(351): Homolog of NCBI NO: 30689997 NR Description: expressed protein [Arabidopsis thaliana] putative protein [Arabidopsis thaliana]
  misc_feature (134)..(344): Homolog of NCBI NO: 34898368 NR Description: ESTs C19441(E10423),C99201(E10423) correspond to
  misc_feature (1)..(115): Homolog of NCBI NO: 34898368 NR Description: ESTs C19441(E10423),C99201(E10423) correspond to
MFRLQFLRLLHSRRSPQVPLIADSSNPIENPLFQADVPSTTAIESCPKENIGKLKDMLKEENIHLHTEDSEQGKLPLLILSLKERSEEKRPAIVFMHGTNTNKEWLRPWLEAYASRGYVAIGLDSRYHGERADCKTAYRDALISSWRNGNTMPFIFDTVWDLIKLAEYLTQRDDIDPKKIGITGISLGGMHAWFAAAADTRYSVVVPLIGVQGFRWAIENDEWEARVNSIKPLFEEARIDLGKNIIDKELVEKVWNRIAPGLASKFDSPYSLPVIAPRPLYILNGANDPRCPLGGLELALKRAEKAYKETASPGNFKFKAEDGVGHEATSFMIKESSDWFDKFLKQEDMTT

SEQ ID NO: 86176 - protein, 295 aa, Arabidopsis thaliana; identical to SEQ ID NO: 24152
  peptide (1)..(295): Ceres Seq. ID no. 12687376
  misc_feature: Pfam Name: DLH Pfam Description: Dienelactone hydrolase family
  misc_feature (1)..(295): Homolog of NCBI NO: 30689997 NR Description: expressed protein [Arabidopsis thaliana] putative protein [Arabidopsis thaliana]
  misc_feature (78)..(288): Homolog of NCBI NO: 34898368 NR Description: ESTs C19441(E10423),C99201(E10423) correspond to
  misc_feature (1)..(59): Homolog of NCBI NO: 34898368 NR Description: ESTs C19441(E10423),C99201(E10423) correspond to

SEQ ID NO: 86177 - DNA, 1038 bp, Arabidopsis thaliana
  misc_feature (1)..(1038): Ceres Seq. ID no. 12687430
  misc_feature: MA Experiment ID: 108561 Result: Down-regulated in Transcription
  misc_feature: MA Experiment 108561 PARAMETER Experiment Name: At_100uM_ABA_cDNA_P Parameter: Timepoint (hr) Value: 6
  misc_feature: MA Experiment 108561 PARAMETER Experiment Name: At_100uM_ABA_cDNA_P Parameter: Tissue Value: Aerial
  misc_feature: MA Experiment 108561 PARAMETER Experiment Name: At_100uM_ABA_cDNA_P Parameter: Treatment Value: 100uM ABA vs. No Treatment
  misc_feature: MA Experiment ID: 108585 Result: Down-regulated in Transcription
  misc_feature: MA Experiment 108585 PARAMETER Experiment Name: At_5mM_NaNP_cDNA_P Parameter: Timepoint (hr) Value: 6
  misc_feature: MA Experiment 108585 PARAMETER Experiment Name: At_5mM_NaNP_cDNA_P Parameter: Tissue Value: Aerial
  misc_feature: MA Experiment 108585 PARAMETER Experiment Name: At_5mM_NaNP_cDNA_P Parameter: Treatment Value: null
  misc_feature: MA Experiment ID: 108595 Result: Down-regulated in Transcription
  misc_feature: MA Experiment 108595 PARAMETER Experiment Name: At_Ler-pi_Ovule_cDNA_P Parameter: Plant Line Value: null
  misc_feature: MA Experiment ID: 20000087 Result: Down-regulated in Transcription
  misc_feature: MA Experiment 20000087 PARAMETER Experiment Name: At_100uM_ABA_Mutants_cDNA_P Parameter: Plant Line Value: WS
  misc_feature: MA Experiment 20000087 PARAMETER Experiment Name: At_100uM_ABA_Mutants_cDNA_P Parameter: Timepoint (hr) Value: 6
  misc_feature: MA Experiment 20000087 PARAMETER Experiment Name: At_100uM_ABA_Mutants_cDNA_P Parameter: Tissue Value: Aerial
  misc_feature: MA Experiment 20000087 PARAMETER Experiment Name: At_100uM_ABA_Mutants_cDNA_P Parameter: Treatment Value: 100uM ABA vs. No Treatment
  misc_feature: MA Experiment ID: 20000113 Result: Up-regulated in Transcription
  misc_feature: MA Experiment 20000113 PARAMETER Experiment Name: At_42deg_Heat_cDNA_P Parameter: Temperature (deg C) Value: 42 vs. 22
  misc_feature: MA Experiment 20000113 PARAMETER Experiment Name: At_42deg_Heat_cDNA_P Parameter: Timepoint (hr) Value: 8
  misc_feature: MA Experiment 20000113 PARAMETER Experiment Name: At_42deg_Heat_cDNA_P Parameter: Tissue Value: Aerial
  misc_feature: MA Experiment ID: 20000117 Result: Down-regulated in Transcription
  misc_feature: MA Experiment 20000117 PARAMETER Experiment Name: At_100uM_ABA_Mutants_cDNA_P Parameter: Plant Line Value: Columbia
  misc_feature: MA Experiment 20000117 PARAMETER Experiment Name: At_100uM_ABA_Mutants_cDNA_P Parameter: Timepoint (hr) Value: 6
  misc_feature: MA Experiment 20000117 PARAMETER Experiment Name: At_100uM_ABA_Mutants_cDNA_P Parameter: Tissue Value: Aerial
  misc_feature: MA Experiment 20000117 PARAMETER Experiment Name: At_100uM_ABA_Mutants_cDNA_P Parameter: Treatment Value: 100uM ABA vs. No Treatment
  misc_feature: MA Experiment ID: 20000184 Result: Up-regulated in Transcription
  misc_feature: MA Experiment 20000184 PARAMETER Experiment Name: At_Shoots__P Parameter: Age (day) Value: 7
  misc_feature: MA Experiment 20000184 PARAMETER Experiment Name: At_Shoots__P Parameter: Tissue Value: Shoots vs. Whole Plant
  misc_feature: MA Experiment ID: 20000185 Result: Down-regulated in Transcription
  misc_feature: MA Experiment 20000185 PARAMETER Experiment Name: At_Roots__P Parameter: Age (day) Value: 7 vs. 21
  misc_feature: MA Experiment 20000185 PARAMETER Experiment Name: At_Roots__P Parameter: Organism Value: A. thaliana
  misc_feature: MA Experiment 20000185 PARAMETER Experiment Name: At_Roots__P Parameter: Tissue Value: Roots vs. Whole Plant
  misc_feature: MA Experiment ID: 20000234 Result: Up-regulated in Transcription
  misc_feature: MA Experiment 20000234 PARAMETER Experiment Name: At_Siliques_P Parameter: Age (day) Value: 21
  misc_feature: MA Experiment 20000234 PARAMETER Experiment Name: At_Siliques_P Parameter: Organism Value: A. thaliana
  misc_feature: MA Experiment 20000234 PARAMETER Experiment Name: At_Siliques_P Parameter: Plant Line Value: WS
  misc_feature: MA Experiment 20000234 PARAMETER Experiment Name: At_Siliques_P Parameter: Tissue Value: Less Than 5mm Siliques vs. Whole Plant
  misc_feature: MA Experiment ID: 20000235 Result: Up-regulated in Transcription
  misc_feature: MA Experiment 20000235 PARAMETER Experiment Name: At_Siliques_P Parameter: Age (day) Value: 21
  misc_feature: MA Experiment 20000235 PARAMETER Experiment Name: At_Siliques_P Parameter: Organism Value: A. thaliana
  misc_feature: MA Experiment 20000235 PARAMETER Experiment Name: At_Siliques_P Parameter: Plant Line Value: WS
  misc_feature: MA Experiment 20000235 PARAMETER Experiment Name: At_Siliques_P Parameter: Tissue Value: 5-10mm Siliques vs. Whole Plant
  misc_feature: MA Experiment ID: 20000265 Result: Up-regulated in Transcription
  misc_feature: MA Experiment 20000265 PARAMETER Experiment Name: At_Open_Flower_P Parameter: Age (day) Value: 21
  misc_feature: MA Experiment 20000265 PARAMETER Experiment Name: At_Open_Flower_P Parameter: Plant Line Value: WS
  misc_feature: MA Experiment 20000265 PARAMETER Experiment Name: At_Open_Flower_P Parameter: Tissue Value: Closed Flower vs. Whole Plant
  misc_feature: MA Experiment ID: 20000436 Result: Down-regulated in Transcription
  misc_feature: MA Experiment 20000436 PARAMETER Experiment Name: At_Drought_P Parameter: Age (day) Value: 7
  misc_feature: MA Experiment 20000436 PARAMETER Experiment Name: At_Drought_P Parameter: Organism Value: A. thaliana
  misc_feature: MA Experiment 20000436 PARAMETER Experiment Name: At_Drought_P Parameter: Plant Line Value: WS
  misc_feature: MA Experiment 20000436 PARAMETER Experiment Name: At_Drought_P Parameter: Timepoint (hr) Value: 12
  misc_feature: MA Experiment 20000436 PARAMETER Experiment Name: At_Drought_P Parameter: Tissue Value: Whole Plant
  misc_feature: MA Experiment 20000436 PARAMETER Experiment Name: At_Drought_P Parameter: Treatment Value: Drought vs. No Drought
  misc_feature: MA Experiment ID: 20000437 Result: Down-regulated in Transcription
  misc_feature: MA Experiment 20000437 PARAMETER Experiment Name: At_Drought_P Parameter: Age (day) Value: 8
  misc_feature: MA Experiment 20000437 PARAMETER Experiment Name: At_Drought_P Parameter: Organism Value: A. thaliana
  misc_feature: MA Experiment 20000437 PARAMETER Experiment Name: At_Drought_P Parameter: Plant Line Value: WS
  misc_feature: MA Experiment 20000437 PARAMETER Experiment Name: At_Drought_P Parameter: Timepoint (hr) Value: 24
  misc_feature: MA Experiment 20000437 PARAMETER Experiment Name: At_Drought_P Parameter: Tissue Value: Whole Plant
  misc_feature: MA Experiment 20000437 PARAMETER Experiment Name: At_Drought_P Parameter: Treatment Value: Drought vs. No Drought
  misc_feature: MA Experiment ID: 20000438 Result: Up-regulated in Transcription
  misc_feature: MA Experiment 20000438 PARAMETER Experiment Name: At_Shoots__P Parameter: Age (day) Value: 14
  misc_feature: MA Experiment 20000438 PARAMETER Experiment Name: At_Shoots__P Parameter: Tissue Value: Shoots vs. Whole Plant
  misc_feature: MA Experiment ID: 20000439 Result: Down-regulated in Transcription
  misc_feature: MA Experiment 20000439 PARAMETER Experiment Name: At_Roots__P Parameter: Age (day) Value: 14 vs. 21
  misc_feature: MA Experiment 20000439 PARAMETER Experiment Name: At_Roots__P Parameter: Organism Value: A. thaliana
  misc_feature: MA Experiment 20000439 PARAMETER Experiment Name: At_Roots__P Parameter: Tissue Value: Roots vs. Whole Plant
  misc_feature: MA Experiment ID: 20000794 Result: Down-regulated in Transcription
  misc_feature: MA Experiment 20000794 PARAMETER Experiment Name: At_Petals_P Parameter: Age (day) Value: 23-25 days
  misc_feature: MA Experiment 20000794 PARAMETER Experiment Name: At_Petals_P Parameter: Plant Line Value: WS
  misc_feature: MA Experiment 20000794 PARAMETER Experiment Name: At_Petals_P Parameter: Tissue Value: Petals vs. Whole plant
  misc_feature: MA Experiment ID: 20001248 Result: Down-regulated in Transcription
  misc_feature: MA Experiment 20001248 PARAMETER Experiment Name: At_Far-red-induction_P Parameter: Age (day) Value: 7
  misc_feature: MA Experiment 20001248 PARAMETER Experiment Name: At_Far-red-induction_P Parameter: Light Value: Far-red vs. White
  misc_feature: MA Experiment 20001248 PARAMETER Experiment Name: At_Far-red-induction_P Parameter: Organism Value: A. thaliana
  misc_feature: MA Experiment 20001248 PARAMETER Experiment Name: At_Far-red-induction_P Parameter: Plant Line Value: Columbia
  misc_feature: MA Experiment 20001248 PARAMETER Experiment Name: At_Far-red-induction_P Parameter: Timepoint (hr) Value: 4
  misc_feature: MA Experiment 20001248 PARAMETER Experiment Name: At_Far-red-induction_P Parameter: Tissue Value: Whole Plant
  misc_feature: MA Experiment ID: 20001560 Result: Up-regulated in Transcription
  misc_feature: MA Experiment 20001560 PARAMETER Experiment Name: At_Drought_Soil_Dry_P Parameter: Age (day) Value: 28
  misc_feature: MA Experiment 20001560 PARAMETER Experiment Name: At_Drought_Soil_Dry_P Parameter: Organism Value: A. thaliana
  misc_feature: MA Experiment 20001560 PARAMETER Experiment Name: At_Drought_Soil_Dry_P Parameter: Plant Line Value: WS
  misc_feature: MA Experiment 20001560 PARAMETER Experiment Name: At_Drought_Soil_Dry_P Parameter: Post Timepoint (hr) Value: None
  misc_feature: MA Experiment 20001560 PARAMETER Experiment Name: At_Drought_Soil_Dry_P Parameter: Post-Treatment Value: None
  misc_feature: MA Experiment 20001560 PARAMETER Experiment Name: At_Drought_Soil_Dry_P Parameter: Timepoint (day) Value: 14
  misc_feature: MA Experiment 20001560 PARAMETER Experiment Name: At_Drought_Soil_Dry_P Parameter: Treatment Value: Drought vs. No Drought
  misc_feature: MA Experiment ID: 20001757 Result: Up-regulated in Transcription
  misc_feature: MA Experiment 20001757 PARAMETER Experiment Name: At_50mM_NH4NO3_L-to-H_P Parameter: Timepoint (hr) Value: 6
  misc_feature: MA Experiment 20001757 PARAMETER Experiment Name: At_50mM_NH4NO3_L-to-H_P Parameter: Tissue Value: Leaf
  misc_feature: MA Experiment 20001757 PARAMETER Experiment Name: At_50mM_NH4NO3_L-to-H_P Parameter: Treatment Value: 50mM NH4NO3 vs 100mM Mannitol
  misc_feature: MA Experiment ID: 20001906 Result: Down-regulated in Transcription
  misc_feature: MA Experiment 20001906 PARAMETER Experiment Name: At_Drought_Reproduction_P Parameter: Age (day) Value: 35
  misc_feature: MA Experiment 20001906 PARAMETER Experiment Name: At_Drought_Reproduction_P Parameter: Organism Value: A. thaliana
  misc_feature: MA Experiment 20001906 PARAMETER Experiment Name: At_Drought_Reproduction_P Parameter: Plant Line Value: WS
  misc_feature: MA Experiment 20001906 PARAMETER Experiment Name: At_Drought_Reproduction_P Parameter: Timepoint (day) Value: 5
  misc_feature: MA Experiment 20001906 PARAMETER Experiment Name: At_Drought_Reproduction_P Parameter: Tissue Value: Siliques
  misc_feature: MA Experiment 20001906 PARAMETER Experiment Name: At_Drought_Reproduction_P Parameter: Treatment Value: Drought vs. No Drought
cccacttcttatccattcgaagcaatgaagccttcttctatcttcttcttcttcttcttcttcctcttctcatggccattctacttcactccctctctcttcatccaccaaaccctaaacctcaaaacccttataaacccaaaattctctcttcttctgctacctttcggagagatgtggtgcttagaacagcatcactctgtttcgtctccttcatctttcaaaaccaaattccagagtcattagctgatcctttgaagtctaccaaaccgttacgactcggcattgcgaacactaagtcttggttccagtactttggtagtgggttcgctattagggttcctcctgactttgaagacgtcaatgagcctgaggattactctgcgggattgtctctctatggtgacaaggcaaagccacaaactttcgccgcccggttccaaactcctgatggatcagaagttttgagtgtagtcattcgtccttcaaatcaacttaagatcactttcttagaggctaaagatatatctgatttgggatcattgaaggcagctgcaagactttttgttccaggtgcggcaacaatttactctgctcgtacaatcaaggtaaaggaagaagaaggtttaagaaattactacttctacgagtttggtagagatgaagaacgcatagctctagtagcctctgtgaacagagggaaggtttatatcgctggagcagctgcaccggaatccaaatggaaagacgatgagttgaagctccgatctgctgccatttctttcactattctatagtcaaaaggcagcttcttctaacagaaaactcgaaaatcgctctctagtcgactcgaaaatgtgggactaagaacaaactggccaaatgcgataaccagatattgttttgagacacatttgtcattccattttcgtttatctgtttatttttggttgatgtaatatgttcattgatgttctgtataatgagataacaaatcaagattctttgtaccgcgaaagtcctagaacgtgtttttac

SEQ ID NO: 86178 - protein, 264 aa, Arabidopsis thaliana
  peptide (1)..(264): Ceres Seq. ID no. 12687431
  misc_feature (227)..(264): Pfam Name: PsbP Pfam Description: PsbP
  misc_feature (8)..(264): Homolog of NCBI NO: 26452557 NR Description: unknown protein [Arabidopsis thaliana]
  misc_feature (24)..(210): Homolog of NCBI NO: 15240916 NR Description: putative protein; protein id: At5g27390.1
HFLSIRSNEAFFYLLLLLLLPLLMAILLHSLSLHPPNPKPQNPYKPKILSSSATFRRDVVLRTASLCFVSFIFQNQIPESLADPLKSTKPLRLGIANTKSWFQYFGSGFAIRVPPDFEDVNEPEDYSAGLSLYGDKAKPQTFAARFQTPDGSEVLSVVIRPSNQLKITFLEAKDISDLGSLKAAARLFVPGAATIYSARTIKVKEEEGLRNYYFYEFGRDEERIALVASVNRGKVYIAGAAAPESKWKDDELKLRSAAISFTIL

SEQ ID NO: 86179 - protein, 241 aa, Arabidopsis thaliana; identical to SEQ ID NO: 43398
  peptide (1)..(241): Ceres Seq. ID no. 12687432
  misc_feature (204)..(241): Pfam Name: PsbP Pfam Description: PsbP
  misc_feature (1)..(241): Homolog of NCBI NO: 26452557 NR Description: unknown protein [Arabidopsis thaliana]
  misc_feature (1)..(187): Homolog of NCBI NO: 15240916 NR Description: putative protein; protein id: At5g27390.1

SEQ ID NO: 86180 - DNA, 2189 bp, Arabidopsis thaliana
  misc_feature (1)..(2189): Ceres Seq. ID no. 12687448
  misc_feature: MA Experiment ID: 20000327 Result: Up-regulated in Transcription
  misc_feature: MA Experiment 20000327 PARAMETER Experiment Name: At_42deg_Heat_Sub_P Parameter: Age (day) Value: 14
  misc_feature: MA Experiment 20000327 PARAMETER Experiment Name: At_42deg_Heat_Sub_P Parameter: Organism Value: A. thaliana
  misc_feature: MA Experiment 20000327 PARAMETER Experiment Name: At_42deg_Heat_Sub_P Parameter: Plant Line Value: WS
  misc_feature: MA Experiment 20000327 PARAMETER Experiment Name: At_42deg_Heat_Sub_P Parameter: Temperature (deg C) Value: 42 vs. 22
  misc_feature: MA Experiment 20000327 PARAMETER Experiment Name: At_42deg_Heat_Sub_P Parameter: Timepoint (hr) Value: 1
  misc_feature: MA Experiment 20000327 PARAMETER Experiment Name: At_42deg_Heat_Sub_P Parameter: Tissue Value: Aerial
  misc_feature: MA Experiment ID: 20000328 Result: Up-regulated in Transcription
  misc_feature: MA Experiment 20000328 PARAMETER Experiment Name: At_42deg_Heat_Sub_P Parameter: Age (day) Value: 14
  misc_feature: MA Experiment 20000328 PARAMETER Experiment Name: At_42deg_Heat_Sub_P Parameter: Organism Value: A. thaliana
  misc_feature: MA Experiment 20000328 PARAMETER Experiment Name: At_42deg_Heat_Sub_P Parameter: Plant Line Value: WS
  misc_feature: MA Experiment 20000328 PARAMETER Experiment Name: At_42deg_Heat_Sub_P Parameter: Temperature (deg C) Value: 42 vs. 22
  misc_feature: MA Experiment 20000328 PARAMETER Experiment Name: At_42deg_Heat_Sub_P Parameter: Timepoint (hr) Value: 6
  misc_feature: MA Experiment 20000328 PARAMETER Experiment Name: At_42deg_Heat_Sub_P Parameter: Tissue Value: Aerial
aaaagagagatcgtacgcaaaagtttccgatatggctcgctcgtttggagctaacagtaccgttgtgttggcgatcatcttcttcggatgtttatttgcgttgtcctctgcaatagaagaggctacgaagttaggatcagtgatagggatagatcttggtactacttactcttgtgttggtgtttacaagaatggtcatgtcgaaattattgccaatgaccaaggaaaccgtattacaccttcatgggttggttttactgactctgaaagactcattggtgaggctgctaagaatcaagcagctgttaatccagagaggactgtcttcgacgttaagagattgatcgggcgaaaatttgaggataaggaggttcaaaaggataggaaacttgtaccttaccagattgtgaacaaggatggtaagccatacattcaagtcaagatcaaggatggtgagactaaggttttcagtcctgaggagattagtgctatgattctgactaagatgaaggagacagctgaagcctaccttggaaagaaaatcaaggacgctgttgtcactgttccagcttacttcaatgatgctcaaaggcaagctactaaggatgctggtgttattgctgggctcaatgttgctagaatcattaatgaacctactgctgctgctattgcctatggtcttgataagaagggtggcgagaagaatatccttgtgtttgatcttggtggtggtacttttgatgtcagtgtcttgaccattgataacggagtgtttgaggttctctccacaaatggtgacactcacttgggaggtgaggactttgaccacagggtgatggagtacttcatcaagttgattaagaagaagcaccagaaggacatcagcaaggacaacaaggctcttggtaagctccgaagggaatgtgagagggcaaagagagctctaagtagtcagcaccaagtccgtgtagagattgagtcactctttgatggtgttgatttttctgagccactcaccagagctcgtttcgaggagcttaacaatgatttgttcaggaagaccatgggacctgtgaagaaggccatggatgatgccggtctacagaagagccagatcgatgagattgtccttgttggtggaagcaccaggatcccaaaggttcagcaactgttgaaggacttctttgaaggtaaagagccaaacaagggtgtgaaccccgacgaggctgttgcctatggtgctgctgttcagggtggtattttgagcggagaaggcggtgatgagaccaaagatatccttcttcttgatgttgcgccactcactttgggtatcgagactgtaggaggagtgatgacaaagttgatcccgagaaacacggttattccaaccaagaaatctcaggttttcacaacgtaccaagaccagcagactaccgtctccattcaggtctttgaaggtgaacgaagtctcaccaaggactgcaggctactcgggaaattcgacctcaatggaatcccaccggccccaagaggaacccctcaaatcgaggtcacattcgaagtggacgccaacggtattcttaatgtgaaagcagaggacaaggcgagtggtaaatcagagaagattactatcacaaacgagaagggtcgtctgagccaagaagagattgaccggatggtgaaggaggcagaggagtttgcagaggaagacaagaaggtaaaggagaagatcgacgccaggaatgccctggagacatacgtgtacaacatgaagaaccaagtgaacgacaaggacaagcttgccgacaaattggaaggagatgaaaaggagaagatcgaagcagcgacgaaagaggctttggagtggctcgacgaaaaccaaaactcagagaaagaagagtacgacgagaagctcaaggaggtagaggcagtgtgtaacccaatcatcacagcagtttaccagagatctggcggagcaccaggtggtgcaggaggagaatcatcgactgaggaggaagatgagtctcacgatgagctctagatgtcttttgttattgttaatttgttaaaccatagagacgagttttgaggatgaaacgtcgttttttttgtatttggtttcctttttatatggatttttaggaaaaggggagagattaagtaacgtcccttctttagtctccctggac

SEQ ID NO: 86181 - protein, 679 aa, Arabidopsis thaliana
  peptide (1)..(679): Ceres Seq. ID no. 12687449
  misc_feature (3)..(674): Homolog of NCBI NO: 13897312 NR Description: luminal binding protein, BiP [Scherffelia dubia]
  misc_feature (47)..(679): Homolog of NCBI NO: 1037176 NR Description: immunoglobulin heavy chain binding protein
  misc_feature (45)..(679): Homolog of NCBI NO: 29539338 NR Description: Heat shock 70 kDa protein [Cyanidioschyzon
  misc_feature (25)..(679): Homolog of NCBI NO: 23480384 NR Description: heat shock protein [Plasmodium yoelii yoelii]
  misc_feature (209)..(679): Homolog of NCBI NO: 168424 NR Description: polypeptide chain-binding protein
  misc_feature (45)..(666): Homolog of NCBI NO: 21263753 NR Description: Heat shock cognate 71 kDa protein (Hsc70.1)
  misc_feature (44)..(665): Homolog of NCBI NO: 14423732 NR Description: Heat shock 70 kDa protein
KERSYAKVSDMARSFGANSTVVLAIIFFGCLFALSSAIEEATKLGSVIGIDLGTTYSCVGVYKNGHVEIIANDQGNRITPSWVGFTDSERLIGEAAKNQAAVNPERTVFDVKRLIGRKFEDKEVQKDRKLVPYQIVNKDGKPYIQVKIKDGETKVFSPEEISAMILTKMKETAEAYLGKKIKDAVVTVPAYFNDAQRQATKDAGVIAGLNVARIINEPTAAAIAYGLDKKGGEKNILVFDLGGGTFDVSVLTIDNGVFEVLSTNGDTHLGGEDFDHRVMEYFIKLIKKKHQKDISKDNKALGKLRRECERAKRALSSQHQVRVEIESLFDGVDFSEPLTRARFEELNNDLFRKTMGPVKKAMDDAGLQKSQIDEIVLVGGSTRIPKVQQLLKDFFEGKEPNKGVNPDEAVAYGAAVQGGILSGEGGDETKDILLLDVAPLTLGIETVGGVMTKLIPRNTVIPTKKSQVFTTYQDQQTTVSIQVFEGERSLTKDCRLLGKFDLNGIPPAPRGTPQIEVTFEVDANGILNVKAEDKASGKSEKITITNEKGRLSQEEIDRMVKEAEEFAEEDKKVKEKIDARNALETYVYNMKNQVNDKDKLADKLEGDEKEKIEAATKEALEWLDENQNSEKEEYDEKLKEVEAVCNPIITAVYQRSGGAPGGAGGESSTEEEDESHDEL

SEQ ID NO: 86182 - protein, 669 aa, Arabidopsis thaliana; identical to SEQ ID NO: 25857
  peptide (1)..(669): Ceres Seq. ID no. 12687450
  misc_feature (1)..(664): Homolog of NCBI NO: 13897312 NR Description: luminal binding protein, BiP [Scherffelia dubia]
  misc_feature (37)..(669): Homolog of NCBI NO: 1037176 NR Description: immunoglobulin heavy chain binding protein
  misc_feature (35)..(669): Homolog of NCBI NO: 29539338 NR Description: Heat shock 70 kDa protein [Cyanidioschyzon
  misc_feature (15)..(669): Homolog of NCBI NO: 23480384 NR Description: heat shock protein [Plasmodium yoelii yoelii]
  misc_feature (199)..(669): Homolog of NCBI NO: 168424 NR Description: polypeptide chain-binding protein
  misc_feature (35)..(656): Homolog of NCBI NO: 21263753 NR Description: Heat shock cognate 71 kDa protein (Hsc70.1)
  misc_feature (34)..(655): Homolog of NCBI NO: 14423732 NR Description: Heat shock 70 kDa protein

SEQ ID NO: 86183 - protein, 516 aa, Arabidopsis thaliana; identical to SEQ ID NO: 25858
  peptide (1)..(516): Ceres Seq. ID no. 12687451
  misc_feature (1)..(511): Homolog of NCBI NO: 13897312 NR Description: luminal binding protein, BiP [Scherffelia dubia]
  misc_feature (1)..(516): Homolog of NCBI NO: 1037176 NR Description: immunoglobulin heavy chain binding protein
  misc_feature (1)..(516): Homolog of NCBI NO: 29539338 NR Description: Heat shock 70 kDa protein [Cyanidioschyzon
  misc_feature (1)..(516): Homolog of NCBI NO: 23480384 NR Description: heat shock protein [Plasmodium yoelii yoelii]
  misc_feature (46)..(516): Homolog of NCBI NO: 168424 NR Description: polypeptide chain-binding protein
  misc_feature (1)..(503): Homolog of NCBI NO: 21263753 NR Description: Heat shock cognate 71 kDa protein (Hsc70.1)
  misc_feature (1)..(502): Homolog of NCBI NO: 14423732 NR Description: Heat shock 70 kDa protein

SEQ ID NO: 86184 - DNA, 4806 bp, Arabidopsis thaliana
  misc_feature (1)..(4806): Ceres Seq. ID no. 12687456
  misc_feature: MA Experiment ID: 20000314 Result: Up-regulated in Transcription
  misc_feature: MA Experiment 20000314 PARAMETER Experiment Name: At_14day_Shoots-Roots_Sub_P Parameter: Age (day) Value: 14
  misc_feature: MA Experiment 20000314 PARAMETER Experiment Name: At_14day_Shoots-Roots_Sub_P Parameter: Organism Value: A. thaliana
  misc_feature: MA Experiment 20000314 PARAMETER Experiment Name: At_14day_Shoots-Roots_Sub_P Parameter: Plant Line Value: WS
  misc_feature: MA Experiment 20000314 PARAMETER Experiment Name: At_14day_Shoots-Roots_Sub_P Parameter: Tissue Value: Roots vs. Whole Plant
  misc_feature: MA Experiment ID: 20000315 Result: Down-regulated in Transcription
  misc_feature: MA Experiment 20000315 PARAMETER Experiment Name: At_14day_Shoots-Roots_Sub_P Parameter: Age (day) Value: 14
  misc_feature: MA Experiment 20000315 PARAMETER Experiment Name: At_14day_Shoots-Roots_Sub_P Parameter: Organism Value: A. thaliana
  misc_feature: MA Experiment 20000315 PARAMETER Experiment Name: At_14day_Shoots-Roots_Sub_P Parameter: Plant Line Value: WS
  misc_feature: MA Experiment 20000315 PARAMETER Experiment Name: At_14day_Shoots-Roots_Sub_P Parameter: Tissue Value: Shoots vs. Whole Plant
  misc_feature: MA Experiment ID: 20000347 Result: Up-regulated in Transcription
  misc_feature: MA Experiment 20000347 PARAMETER Experiment Name: At_2mM_SA_Sub_P Parameter: Age (day) Value: 14
  misc_feature: MA Experiment 20000347 PARAMETER Experiment Name: At_2mM_SA_Sub_P Parameter: Organism Value: A. thaliana
  misc_feature: MA Experiment 20000347 PARAMETER Experiment Name: At_2mM_SA_Sub_P Parameter: Plant Line Value: WS
  misc_feature: MA Experiment 20000347 PARAMETER Experiment Name: At_2mM_SA_Sub_P Parameter: Timepoint (hr) Value: 6
  misc_feature: MA Experiment 20000347 PARAMETER Experiment Name: At_2mM_SA_Sub_P Parameter: Tissue Value: Aerial
  misc_feature: MA Experiment 20000347 PARAMETER Experiment Name: At_2mM_SA_Sub_P Parameter: Treatment Value: 2mM SA vs. No Treatment
atggaactgcctgacgttccggtgtggagaagagtcatgtccgttgtttgggattatataaaactgtttgcgttttctgcattctttgaggcgttgactttcaatattgatatcgaagaagaaagatcggagataatgatgaagaccggtgctgttgtttccaatccacgttcgagggtcaagtgggacgcattcctgagtttccaaagagacacgagccacaatttcacggatcgtctctatgaagcgcttgtcaaggaagagctccgggtttggaacgatgatttggaacgtgtggatcatgatcatgatcatgagctacgtccaagtctcgtggaggctatagaggactcggtggcttttgtcgtcgtcttatcccctaactacgctaactctcacctgcgcctcgaagaattagctaagctctgcgatctaaaatgtttgatggtaccgatcttttataaggttgaaccacgggaagttaaggaacagaacggtcctttcgaaaaggattttgaagagcattccaaaagatttggcgaggagaagatacaacgatggaagggagctatgactacggtcggaaatatctccggattcatttgcgggtatgagatccaattggagatggagactggcgttgttccgaataggctaaagtacagcgtctttctgagcttccgaggattcgacacgcgaaccaacttctgtgagcgtctgtatatcgctctcaacgaaaagcaaaatgtccgagtctttcgcgacaacgagggtatggaaaaaggtgataagatcgatccaagtctcttcgaagccattgaggactcggctgcctccgtcatcatcttatccactaactacgctaactcttcttggtgcctagatgaattagctttgctctgcgatcttagatcgtctctgaaacgtcccatgatacctatcttctatggagtcaatcccgaggatgtccgcaaacagagcggtgagttcaggaaagattttgaagagaaagcgaaaagttttgatgaggagacgattcagcgatggaagcgagctatgaatttagtcggaaatatccctggatatgtttgcacagcaaagactgttggagatgacaatgaaggcataaacagagagaaagtagatgacatgattgatctggtggtgaaaaaggttgtagctgctgtgaggaatagaccagagatagttgcagactacactgttggtctggaatcacctataaaggatttgatgaaactgttcaacactgaatccagttctggcatccaagtcatgggactttatggtatgggcggtattgggaagactacccttgcaaaagccttttataacaagatcattgttaacttcaaccgtcatcgagttttcatcgaaagcgttaggggaaaatcgtcagaccaagatggtttagtcaatctacaaaaaactctcatcaaggaacttttccgtttggtacctgaaatagaggatgttagcataggcctggaaaagataaaagagaatgttcatgagaagaagattattgtggttttggatgatgttgatcacatagaccaggttaatgcgctggttggtgaaacaagctggtatggtgaaggaagtcttatagtcatcactaccagagattctgagattctgagtaagctctcagtgaaccaacagtatgaggtcaagtgcttgactgaaccgcaggcgttgaagctctttagtttttattcactacgaaaagagaaaccaccaacacagggtttattggagttgtccaagaagattgccgaggtgacgggactgttgccactggctgttaaagtgtttggttctcatttttatgacaaggacgaaaacgaatggcaagttgaactagagaagctgaaaacccaacaagacaaacttcacggtgttctggctctgagtttcaaatctttagacgaagaagaaaagaagatattcctcgacattgcatgtctctttctcaaaatggatataacaaaagaagaagttgtcgacatactgaaaggatgtgggttaaacgccgaggctgctctccgtgttcttatacagaaatctctccttacaatcttgacagacgacactctgtggatgcatgatcagatcagagacatgggtaggcagatggttcataaagaaagcagcgatgatcctgagatgcggagtagactctgggatcgtggtgaaataatgaacgtattggactatatgaagggaacatcatccattcgaggaatcgtactagactttaataagaagtttgcgagggaccatactgcagatgaaattttctcgagtaatctacgcaacaatccgggtatctactctgtattcaattacctgaagaataagttagtaagatttccagcagaggaaaagccaaaaaggtctgaaatcaccattcccgtagaatcttttgcaccaatgaagaagttgagacttcttcagattaataacgtggaactggaaggagatcttaaacttctcccatctgaactcaagtggatacagtggaaaggtttcccattagaaaatctccctccggatattctttctaggcaacttggtgttcttgatctttcagagagtggagtaagacgagtcaagactttgccccgcaaaaggggggatgagaacttgaaagttgtaaatttgcgtggttgccacggcttagaagccattcctgatttatcaaaccataatgcactagaaaagcttgttcttgagcgatgcaaccttctggtgaaggttcctagatcagttggtaatctgggaaaattgcttcagctggaccttagaaggtgctcaagtctttctgaatttcttggggatgtttctggactgaagtgtcttgaaaaatttttcctctctggctgttcaaatctgagtgtgttaccagaaaacattggttccatgccatgtttgaaagagcttcttcttgatggaactgcgataagtaacttaccgtactctatttttcgcctccaaaagcttgaaaagcttagtctaatgggttgcaggtctattgaagagctaccttcgtgtgtaggatatttgacatcgctcgaagatttatatcttgatgatactgcattgcgaaaccttcctagttctattggagatctaaaaaatctccagaagctgcatctgatgcgctgcacgtccctttctacgattcctgagactataaataagctcatgtcattgaaggaattattcatcaatggaagcgcggtggaggagctacctatagaaaccggctcactcctatgtttgactgacctctctgcaggagattgcaaatttctgaaacaggttccgagttcaattggtggattaaattctcttctccaacttcagttggatagcaccccaattgaagctctaccagaagagattggagacttgcactttattcgacaacttgacttgagaaactgcaaatctctgaaggctctgcctaaaacaatcggaaagatggacacactctatagcttaaaccttgtaggctctaacattgaggaactgccggaagaatttggcaagctggaaaacctagttgaactgcgaatgaacaactgtaaaatgctcaaacggcttcctaaatcgtttggagacttgaaatctcttcaccgtctgtacatgcaggaaactttggtcgcggagttgccagaaagtttcggaaacctctcaaatttaatggtactggaaatgctgaagaagcctctttttagaatttctgagagtaatgttccaggtacaagcgaagaacctcgttttgtagaagtaccaaactctttctcaaagctcttgaagcttgaggaactagatgcttgcagctggagaatatcgggtaaaatccctgatgatcttgagaagctttcgtgtttgatgaaactgaatctggggaataattattttcatagtcttccgtctagcctcgtaaagttatcaaatctccaagaactttcattacgtgactgccgagagctcaagcgtcttccccctcttccatgtaaactggagcagctaaacctagcaaactgtttctcattggagagtgtatccgacctttcagagttaacgatcttgacggatctcaatctcacaaactgtgcgaaagtggttgatattccaggcctagagcacttgacggctctgaaaagattatacatgaccggatgtaactccaactactcccttgcagtaaagaaaagactttccaaggcttctttgaagatgatgcggaatctgagcttgcctggaaacagggtcccggactggttctcgcaaggccctgtcacattctcagctcaaccgaacagagagctcagaggtgtaatcattgctgttgttgtggctcttaatgatgaaaccgaagatgacgactatcagctgcctgatgtgatggaggttcaagcccaaattcataaacttgatcatcacaaatgcaccaacacattgcatctctccggagtgcctagaacaaataacgatcagcttcacatctgccgatactcagcttttcacccactggttacgatgttgaaagacgggtacaccatacaggtgatcaaacgaaacccaccaatcaaacaaggcgttgagctaaagatgcatggcattcatctcgtttacgagggggatgatgatttggaaggcagagaaaatacattacccgaggctcaacaaaccgtttctcagaaacttgccaattttttcagctcgtttgaagaaggtgaagccagcgcaaaaggtgattccactgttgcatga

SEQ ID NO: 86185 - protein, 1601 aa, Arabidopsis thaliana
  peptide (1)..(1601): Ceres Seq. ID no. 12687457
  misc_feature (424)..(688): Pfam Name: NB-ARC domain Pfam Description: NB-ARC domain
  misc_feature (221)..(1366): Homolog of NCBI NO: 12597786 NR Description: disease resistance protein, putative [Arabidopsis
  misc_feature (308)..(1234): Homolog of NCBI NO: 9759045 NR Description: disease resistance protein-like [Arabidopsis
  misc_feature (220)..(389): Homolog of NCBI NO: 9759045 NR Description: disease resistance protein-like [Arabidopsis
  misc_feature (215)..(758): Homolog of NCBI NO: 10178211 NR Description: TMV resistance protein N [Arabidopsis thaliana]
  misc_feature (813)..(1164): Homolog of NCBI NO: 10178211 NR Description: TMV resistance protein N [Arabidopsis thaliana]
  misc_feature (215)..(758): Homolog of NCBI NO: 30692996 NR Description: disease resistance protein (TIR-NBS-LRR class),
  misc_feature (813)..(1164): Homolog of NCBI NO: 30692996 NR Description: disease resistance protein (TIR-NBS-LRR class),
  misc_feature (54)..(199): Homolog of NCBI NO: 9759045 NR Description: disease resistance protein-like [Arabidopsis
  misc_feature (1055)..(1466): Homolog of NCBI NO: 10178211 NR Description: TMV resistance protein N [Arabidopsis thaliana]
  misc_feature (208)..(1173): Homolog of NCBI NO: 37781356 NR Description: nematode resistance-like protein [Solanum
MELPDVPVWRRVMSVVWDYIKLFAFSAFFEALTFNIDIEEERSEIMMKTGAVVSNPRSRVKWDAFLSFQRDTSHNFTDRLYEALVKEELRVWNDDLERVDHDHDHELRPSLVEAIEDSVAFVVVLSPNYANSHLRLEELAKLCDLKCLMVPIFYKVEPREVKEQNGPFEKDFEEHSKRFGEEKIQRWKGAMTTVGNISGFICGYEIQLEMETGVVPNRLKYSVFLSFRGFDTRTNFCERLYIALNEKQNVRVFRDNEGMEKGDKIDPSLFEAIEDSAASVIILSTNYANSSWCLDELALLCDLRSSLKRPMIPIFYGVNPEDVRKQSGEFRKDFEEKAKSFDEETIQRWKRAMNLVGNIPGYVCTAKTVGDDNEGINREKVDDMIDLVVKKVVAAVRNRPEIVADYTVGLESPIKDLMKLFNTESSSGIQVMGLYGMGGIGKTTLAKAFYNKIIVNFNRHRVFIESVRGKSSDQDGLVNLQKTLIKELFRLVPEIEDVSIGLEKIKENVHEKKIIVVLDDVDHIDQVNALVGETSWYGEGSLIVITTRDSEILSKLSVNQQYEVKCLTEPQALKLFSFYSLRKEKPPTQGLLELSKKIAEVTGLLPLAVKVFGSHFYDKDENEWQVELEKLKTQQDKLHGVLALSFKSLDEEEKKIFLDIACLFLKMDITKEEVVDILKGCGLNAEAALRVLIQKSLLTILTDDTLWMHDQIRDMGRQMVHKESSDDPEMRSRLWDRGEIMNVLDYMKGTSSIRGIVLDFNKKFARDHTADEIFSSNLRNNPGIYSVFNYLKNKLVRFPAEEKPKRSEITIPVESFAPMKKLRLLQINNVELEGDLKLLPSELKWIQWKGFPLENLPPDILSRQLGVLDLSESGVRRVKTLPRKRGDENLKVVNLRGCHGLEAIPDLSNHNALEKLVLERCNLLVKVPRSVGNLGKLLQLDLRRCSSLSEFLGDVSGLKCLEKFFLSGCSNLSVLPENIGSMPCLKELLLDGTAISNLPYSIFRLQKLEKLSLMGCRSIEELPSCVGYLTSLEDLYLDDTALRNLPSSIGDLKNLQKLHLMRCTSLSTIPETINKLMSLKELFINGSAVEELPIETGSLLCLTDLSAGDCKFLKQVPSSIGGLNSLLQLQLDSTPIEALPEEIGDLHFIRQLDLRNCKSLKALPKTIGKMDTLYSLNLVGSNIEELPEEFGKLENLVELRMNNCKMLKRLPKSFGDLKSLHRLYMQETLVAELPESFGNLSNLMVLEMLKKPLFRISESNVPGTSEEPRFVEVPNSFSKLLKLEELDACSWRISGKIPDDLEKLSCLMKLNLGNNYFHSLPSSLVKLSNLQELSLRDCRELKRLPPLPCKLEQLNLANCFSLESVSDLSELTILTDLNLTNCAKVVDIPGLEHLTALKRLYMTGCNSNYSLAVKKRLSKASLKMMRNLSLPGNRVPDWFSQGPVTFSAQPNRELRGVIIAVVVALNDETEDDDYQLPDVMEVQAQIHKLDHHKCTNTLHLSGVPRTNNDQLHICRYSAFHPLVTMLKDGYTIQVIKRNPPIKQGVELKMHGIHLVYEGDDDLEGRENTLPEAQQTVSQKLANFFSSFEEGEASAKGDSTVA

SEQ ID NO: 86186 - protein, 1589 aa, Arabidopsis thaliana
  peptide (1)..(1589): Ceres Seq. ID no. 12687458
  misc_feature (412)..(676): Pfam Name: NB-ARC domain Pfam Description: NB-ARC domain
  misc_feature (209)..(1354): Homolog of NCBI NO: 12597786 NR Description: disease resistance protein, putative [Arabidopsis
  misc_feature (296)..(1222): Homolog of NCBI NO: 9759045 NR Description: disease resistance protein-like [Arabidopsis
  misc_feature (208)..(377): Homolog of NCBI NO: 9759045 NR Description: disease resistance protein-like [Arabidopsis
  misc_feature (203)..(746): Homolog of NCBI NO: 10178211 NR Description: TMV resistance protein N [Arabidopsis thaliana]
  misc_feature (801)..(1152): Homolog of NCBI NO: 10178211 NR Description: TMV resistance protein N [Arabidopsis thaliana]
  misc_feature (203)..(746): Homolog of NCBI NO: 30692996 NR Description: disease resistance protein (TIR-NBS-LRR class),
  misc_feature (801)..(1152): Homolog of NCBI NO: 30692996 NR Description: disease resistance protein (TIR-NBS-LRR class),
  misc_feature (42)..(187): Homolog of NCBI NO: 9759045 NR Description: disease resistance protein-like [Arabidopsis
  misc_feature (1043)..(1454): Homolog of NCBI NO: 10178211 NR Description: TMV resistance protein N [Arabidopsis thaliana]
  misc_feature (196)..(1161): Homolog of NCBI NO: 37781356 NR Description: nematode resistance-like protein [Solanum
MSVVWDYIKLFAFSAFFEALTFNIDIEEERSEIMMKTGAVVSNPRSRVKWDAFLSFQRDTSHNFTDRLYEALVKEELRVWNDDLERVDHDHDHELRPSLVEAIEDSVAFVVVLSPNYANSHLRLEELAKLCDLKCLMVPIFYKVEPREVKEQNGPFEKDFEEHSKRFGEEKIQRWKGAMTTVGNISGFICGYEIQLEMETGVVPNRLKYSVFLSFRGFDTRTNFCERLYIALNEKQNVRVFRDNEGMEKGDKIDPSLFEAIEDSAASVIILSTNYANSSWCLDELALLCDLRSSLKRPMIPIFYGVNPEDVRKQSGEFRKDFEEKAKSFDEETIQRWKRAMNLVGNIPGYVCTAKTVGDDNEGINREKVDDMIDLVVKKVVAAVRNRPEIVADYTVGLESPIKDLMKLFNTESSSGIQVMGLYGMGGIGKTTLAKAFYNKIIVNFNRHRVFIESVRGKSSDQDGLVNLQKTLIKELFRLVPEIEDVSIGLEKIKENVHEKKIIVVLDDVDHIDQVNALVGETSWYGEGSLIVITTRDSEILSKLSVNQQYEVKCLTEPQALKLFSFYSLRKEKPPTQGLLELSKKIAEVTGLLPLAVKVFGSHFYDKDENEWQVELEKLKTQQDKLHGVLALSFKSLDEEEKKIFLDIACLFLKMDITKEEVVDILKGCGLNAEAALRVLIQKSLLTILTDDTLWMHDQIRDMGRQMVHKESSDDPEMRSRLWDRGEIMNVLDYMKGTSSIRGIVLDFNKKFARDHTADEIFSSNLRNNPGIYSVFNYLKNKLVRFPAEEKPKRSEITIPVESFAPMKKLRLLQINNVELEGDLKLLPSELKWIQWKGFPLENLPPDILSRQLGVLDLSESGVRRVKTLPRKRGDENLKVVNLRGCHGLEAIPDLSNHNALEKLVLERCNLLVKVPRSVGNLGKLLQLDLRRCSSLSEFLGDVSGLKCLEKFFLSGCSNLSVLPENIGSMPCLKELLLDGTAISNLPYSIFRLQKLEKLSLMGCRSIEELPSCVGYLTSLEDLYLDDTALRNLPSSIGDLKNLQKLHLMRCTSLSTIPETINKLMSLKELFINGSAVEELPIETGSLLCLTDLSAGDCKFLKQVPSSIGGLNSLLQLQLDSTPIEALPEEIGDLHFIRQLDLRNCKSLKALPKTIGKMDTLYSLNLVGSNIEELPEEFGKLENLVELRMNNCKMLKRLPKSFGDLKSLHRLYMQETLVAELPESFGNLSNLMVLEMLKKPLFRISESNVPGTSEEPRFVEVPNSFSKLLKLEELDACSWRISGKIPDDLEKLSCLMKLNLGNNYFHSLPSSLVKLSNLQELSLRDCRELKRLPPLPCKLEQLNLANCFSLESVSDLSELTILTDLNLTNCAKVVDIPGLEHLTALKRLYMTGCNSNYSLAVKKRLSKASLKMMRNLSLPGNRVPDWFSQGPVTFSAQPNRELRGVIIAVVVALNDETEDDDYQLPDVMEVQAQIHKLDHHKCTNTLHLSGVPRTNNDQLHICRYSAFHPLVTMLKDGYTIQVIKRNPPIKQGVELKMHGIHLVYEGDDDLEGRENTLPEAQQTVSQKLANFFSSFEEGEASAKGDSTVA

SEQ ID NO: 86187 - protein, 1556 aa, Arabidopsis thaliana; identical to SEQ ID NO: 73561
  peptide (1)..(1556): Ceres Seq. ID no. 12687459
  misc_feature (379)..(643): Pfam Name: NB-ARC domain Pfam Description: NB-ARC domain
  misc_feature (176)..(1321): Homolog of NCBI NO: 12597786 NR Description: disease resistance protein, putative [Arabidopsis
  misc_feature (263)..(1189): Homolog of NCBI NO: 9759045 NR Description: disease resistance protein-like [Arabidopsis
  misc_feature (175)..(344): Homolog of NCBI NO: 9759045 NR Description: disease resistance protein-like [Arabidopsis
  misc_feature (170)..(713): Homolog of NCBI NO: 10178211 NR Description: TMV resistance protein N [Arabidopsis thaliana]
  misc_feature (768)..(1119): Homolog of NCBI NO: 10178211 NR Description: TMV resistance protein N [Arabidopsis thaliana]
  misc_feature (170)..(713): Homolog of NCBI NO: 30692996 NR Description: disease resistance protein (TIR-NBS-LRR class),
  misc_feature (768)..(1119): Homolog of NCBI NO: 30692996 NR Description: disease resistance protein (TIR-NBS-LRR class),
  misc_feature (9)..(154): Homolog of NCBI NO: 9759045 NR Description: disease resistance protein-like [Arabidopsis
  misc_feature (1010)..(1421): Homolog of NCBI NO: 10178211 NR Description: TMV resistance protein N [Arabidopsis thaliana]
  misc_feature (163)..(1128): Homolog of NCBI NO: 37781356 NR Description: nematode resistance-like protein [Solanum

SEQ ID NO: 86188 - DNA, 1791 bp, Arabidopsis thaliana
  misc_feature (1)..(1791): Ceres Seq. ID no. 12687548
  misc_feature: MA Experiment ID: 20000235 Result: Up-regulated in Transcription
  misc_feature: MA Experiment 20000235 PARAMETER Experiment Name: At_Siliques_P Parameter: Age (day) Value: 21
  misc_feature: MA Experiment 20000235 PARAMETER Experiment Name: At_Siliques_P Parameter: Organism Value: A. thaliana
  misc_feature: MA Experiment 20000235 PARAMETER Experiment Name: At_Siliques_P Parameter: Plant Line Value: WS
  misc_feature: MA Experiment 20000235 PARAMETER Experiment Name: At_Siliques_P Parameter: Tissue Value: 5-10mm Siliques vs. Whole Plant
  misc_feature: MA Experiment ID: 20000265 Result: Up-regulated in Transcription
  misc_feature: MA Experiment 20000265 PARAMETER Experiment Name: At_Open_Flower_P Parameter: Age (day) Value: 21
  misc_feature: MA Experiment 20000265 PARAMETER Experiment Name: At_Open_Flower_P Parameter: Plant Line Value: WS
  misc_feature: MA Experiment 20000265 PARAMETER Experiment Name: At_Open_Flower_P Parameter: Tissue Value: Closed Flower vs. Whole Plant
  misc_feature: MA Experiment ID: 20000437 Result: Up-regulated in Transcription
  misc_feature: MA Experiment 20000437 PARAMETER Experiment Name: At_Drought_P Parameter: Age (day) Value: 8
  misc_feature: MA Experiment 20000437 PARAMETER Experiment Name: At_Drought_P Parameter: Organism Value: A. thaliana
  misc_feature: MA Experiment 20000437 PARAMETER Experiment Name: At_Drought_P Parameter: Plant Line Value: WS
  misc_feature: MA Experiment 20000437 PARAMETER Experiment Name: At_Drought_P Parameter: Timepoint (hr) Value: 24
  misc_feature: MA Experiment 20000437 PARAMETER Experiment Name: At_Drought_P Parameter: Tissue Value: Whole Plant
  misc_feature: MA Experiment 20000437 PARAMETER Experiment Name: At_Drought_P Parameter: Treatment Value: Drought vs. No Drought
  misc_feature: MA Experiment ID: 20000439 Result: Up-regulated in Transcription
  misc_feature: MA Experiment 20000439 PARAMETER Experiment Name: At_Roots__P Parameter: Age (day) Value: 14 vs. 21
  misc_feature: MA Experiment 20000439 PARAMETER Experiment Name: At_Roots__P Parameter: Organism Value: A. thaliana
  misc_feature: MA Experiment 20000439 PARAMETER Experiment Name: At_Roots__P Parameter: Tissue Value: Roots vs. Whole Plant
atgttaaaagaaaagaaaacattgcagaattatccatccgaatatgggttcgcttcagacaccgatagaaatgagaagctcatcgttgttggatacgtcctgcggatatttgctcagagagttacaggcaagtttgttttgatgagtattctgatcgatgcccgatggtcactgttttatgcacagatgatatgggatgaagttggagaagataagtttgagagagaaaaagtgttgcttgatatagagcaggaatgtgtagaggcttaccggagaaaagttgaccatgccaatgtttcgaggtctcgtctacatcaagagctggcagaatctgaagccgaactcacccattttcttttgtgcctcggtgaaagatcagtacctggaagaccggagaaaaagggaggaacactgagggagcagctggattctattgcgcctgcactgcgtgagatgaggcttaggaaagacgagagagtgaagcagttccgatctgtcaaaggggaaattcagaaaatatcagcagaaatagcaggtagatcgacatatgaagactcaactagaaagataaccatagatgacaacgatctttctaataaaaaacttgaggaatatcagaatgaactgcatagactccatgatgagaagaatgagagactacagaaggttgatatatacatatgcgccattcgagatctatcagcaacattgggaacagaagcatcaatgatcataacaaagattcacccaagcttgaacgacctctatggaatatccaaaaacatcagtgatgatatcttaaaaaagcttaatggcactgttgtgtctctggaagaggaaaagcacaagcgccttgaaaagcttcaccatcttggtagagctttatcgaacctgtggaatctgatggatgcatcttatgaagatcgtcaaaagttttttcatgtcattgatttactgtcgtccgcaccatcagacgtgtgtgctcctggaagcattacattggacataattcagcaggctgaggctgaagtcaagagactagatcaactgaaagcaagcagaatcaaagaacttttcatcaagaagcaaaaggaactagaagatacgtgcaacatgtcgcatatggagactccatcaacggaaatgggaaatatcacgaaccttgtagactctggggaagttgaccatgttgaccttctagccgccatggatgaaaagatagcaagagcaaaggaagaagcagcaagtagaaaaggaataattgaaaaagttgataggtggatgttggcaagtgatgaagagcgctggctagaagaatatgaccaggacgagaatcggtactcagtaagtagaaatgctcatcgaaacctaaggagagcagaacgggcacgcataacagtcagcaaaatctcaggattagtggaatctatattggttaaggctaagagctgggaggtagaaagacagaaagtcttcttatacaatgaggtacctcttgttgcaatgttgcaagaatacaataagctgaggcaggaaaaagaaatggagaagcaaaggctccgggaaatgaagaagatgagcattccacaacctgtggctgagggagataatttttacatggcaaggccagctagcagcaataggcgaatatcaaatcgaagcatgaatggtggatttggaagtggaagtcctataaacagaaagtattcaggaggattcaacaatactaacaataattacacagcacttggtacatctataagaagagaaagcagaaagagtgaggcataa

SEQ ID NO: 86189 - protein, 596 aa, Arabidopsis thaliana
  peptide (1)..(596): Ceres Seq. ID no. 12687549
  misc_feature (74)..(596): Pfam Name: Microtubule associated protein (MAP65/ASE1 family) Pfam Description: Microtubule associated protein (MAP65/ASE1
  misc_feature (1)..(596): Homolog of NCBI NO: 15217774 NR Description: hypothetical protein; protein id: At1g27920.1
  misc_feature (62)..(592): Homolog of NCBI NO: 11558252 NR Description: microtubule-associated protein MAP65-1a
  misc_feature (62)..(591): Homolog of NCBI NO: 15240485 NR Description: putative protein; protein id: At5g55230.1 thaliana] >gi|9758120|dbj|BAB08592.1| similarity to unknown protein [Arabidopsis thaliana]
  misc_feature (62)..(596): Homolog of NCBI NO: 28200790 NR Description: 65kD microtubule associated protein [Daucus
  misc_feature (62)..(591): Homolog of NCBI NO: 18416818 NR Description: putative protein; protein id: At4g26760.1, by cDNA: 151418., supported by cDNA: gi_18377611 [Arabidopsis
  misc_feature (62)..(593): Homolog of NCBI NO: 11558254 NR Description: microtubule-associated protein MAP65-1b
  misc_feature (62)..(593): Homolog of NCBI NO: 11558256 NR Description: microtubule-associated protein MAP65-1c
  misc_feature (62)..(591): Homolog of NCBI NO: 21539547 NR Description: unknown protein [Arabidopsis thaliana]
  misc_feature (62)..(596): Homolog of NCBI NO: 27357984 NR Description: Unknown protein [Oryza sativa (japonica
  misc_feature (62)..(572): Homolog of NCBI NO: 25410943 NR Description: hypothetical protein At2g01910 [imported] - thaliana >gi|4522009|gb|AAD21782.1| unknown protein [Arabidopsis
MLKEKKTLQNYPSEYGFASDTDRNEKLIVVGYVLRIFAQRVTGKFVLMSILIDARWSLFYAQMIWDEVGEDKFEREKVLLDIEQECVEAYRRKVDHANVSRSRLHQELAESEAELTHFLLCLGERSVPGRPEKKGGTLREQLDSIAPALREMRLRKDERVKQFRSVKGEIQKISAEIAGRSTYEDSTRKITIDDNDLSNKKLEEYQNELHRLHDEKNERLQKVDIYICAIRDLSATLGTEASMIITKIHPSLNDLYGISKNISDDILKKLNGTVVSLEEEKHKRLEKLHHLGRALSNLWNLMDASYEDRQKFFHVIDLLSSAPSDVCAPGSITLDIIQQAEAEVKRLDQLKASRIKELFIKKQKELEDTCNMSHMETPSTEMGNITNLVDSGEVDHVDLLAAMDEKIARAKEEAASRKGIIEKVDRWMLASDEERWLEEYDQDENRYSVSRNAHRNLRRAERARITVSKISGLVESILVKAKSWEVERQKVFLYNEVPLVAMLQEYNKLRQEKEMEKQRLREMKKMSIPQPVAEGDNFYMARPASSNRRISNRSMNGGFGSGSPINRKYSGGFNNTNNNYTALGTSIRRESRKSEA

SEQ ID NO: 86190 - protein, 549 aa, Arabidopsis thaliana
  peptide (1)..(549): Ceres Seq. ID no. 12687550
  misc_feature (27)..(549): Pfam Name: Microtubule associated protein (MAP65/ASE1 family) Pfam Description: Microtubule associated protein (MAP65/ASE1
  misc_feature (1)..(549): Homolog of NCBI NO: 15217774 NR Description: hypothetical protein; protein id: At1g27920.1
  misc_feature (15)..(545): Homolog of NCBI NO: 11558252 NR Description: microtubule-associated protein MAP65-1a
  misc_feature (15)..(544): Homolog of NCBI NO: 15240485 NR Description: putative protein; protein id: At5g55230.1 thaliana] >gi|9758120|dbj|BAB08592.1| similarity to unknown protein [Arabidopsis thaliana]
  misc_feature (15)..(549): Homolog of NCBI NO: 28200790 NR Description: 65kD microtubule associated protein [Daucus
  misc_feature (15)..(544): Homolog of NCBI NO: 18416818 NR Description: putative protein; protein id: At4g26760.1, by cDNA: 151418., supported by cDNA: gi_18377611 [Arabidopsis
  misc_feature (15)..(546): Homolog of NCBI NO: 11558254 NR Description: microtubule-associated protein MAP65-1b
  misc_feature (15)..(546): Homolog of NCBI NO: 11558256 NR Description: microtubule-associated protein MAP65-1c
  misc_feature (15)..(544): Homolog of NCBI NO: 21539547 NR Description: unknown protein [Arabidopsis thaliana]
  misc_feature (15)..(549): Homolog of NCBI NO: 27357984 NR Description: Unknown protein [Oryza sativa (japonica
  misc_feature (15)..(525): Homolog of NCBI NO: 25410943 NR Description: hypothetical protein At2g01910 [imported] - thaliana >gi|4522009|gb|AAD21782.1| unknown protein [Arabidopsis
MSILIDARWSLFYAQMIWDEVGEDKFEREKVLLDIEQECVEAYRRKVDHANVSRSRLHQELAESEAELTHFLLCLGERSVPGRPEKKGGTLREQLDSIAPALREMRLRKDERVKQFRSVKGEIQKISAEIAGRSTYEDSTRKITIDDNDLSNKKLEEYQNELHRLHDEKNERLQKVDIYICAIRDLSATLGTEASMIITKIHPSLNDLYGISKNISDDILKKLNGTVVSLEEEKHKRLEKLHHLGRALSNLWNLMDASYEDRQKFFHVIDLLSSAPSDVCAPGSITLDIIQQAEAEVKRLDQLKASRIKELFIKKQKELEDTCNMSHMETPSTEMGNITNLVDSGEVDHVDLLAAMDEKIARAKEEAASRKGIIEKVDRWMLASDEERWLEEYDQDENRYSVSRNAHRNLRRAERARITVSKISGLVESILVKAKSWEVERQKVFLYNEVPLVAMLQEYNKLRQEKEMEKQRLREMKKMSIPQPVAEGDNFYMARPASSNRRISNRSMNGGFGSGSPINRKYSGGFNNTNNNYTALGTSIRRESRKSEA

SEQ ID NO: 86191 - protein, 534 aa, Arabidopsis thaliana
  peptide (1)..(534): Ceres Seq. ID no. 12687551
  misc_feature (12)..(534): Pfam Name: Microtubule associated protein (MAP65/ASE1 family) Pfam Description: Microtubule associated protein (MAP65/ASE1
  misc_feature (1)..(534): Homolog of NCBI NO: 15217774 NR Description: hypothetical protein; protein id: At1g27920.1
  misc_feature (1)..(530): Homolog of NCBI NO: 11558252 NR Description: microtubule-associated protein MAP65-1a
  misc_feature (1)..(529): Homolog of NCBI NO: 15240485 NR Description: putative protein; protein id: At5g55230.1 thaliana] >gi|9758120|dbj|BAB08592.1| similarity to unknown protein [Arabidopsis thaliana]
  misc_feature (1)..(534): Homolog of NCBI NO: 28200790 NR Description: 65kD microtubule associated protein [Daucus
  misc_feature (1)..(529): Homolog of NCBI NO: 18416818 NR Description: putative protein; protein id: At4g26760.1, by cDNA: 151418., supported by cDNA: gi_18377611 [Arabidopsis
  misc_feature (1)..(531): Homolog of NCBI NO: 11558254 NR Description: microtubule-associated protein MAP65-1b
  misc_feature (1)..(531): Homolog of NCBI NO: 11558256 NR Description: microtubule-associated protein MAP65-1c
  misc_feature (1)..(529): Homolog of NCBI NO: 21539547 NR Description: unknown protein [Arabidopsis thaliana]
  misc_feature (1)..(534): Homolog of NCBI NO: 27357984 NR Description: Unknown protein [Oryza sativa (japonica
  misc_feature (1)..(510): Homolog of NCBI NO: 25410943 NR Description: hypothetical protein At2g01910 [imported] - thaliana >gi|4522009|gb|AAD21782.1| unknown protein [Arabidopsis
MIWDEVGEDKFEREKVLLDIEQECVEAYRRKVDHANVSRSRLHQELAESEAELTHFLLCLGERSVPGRPEKKGGTLREQLDSIAPALREMRLRKDERVKQFRSVKGEIQKISAEIAGRSTYEDSTRKITIDDNDLSNKKLEEYQNELHRLHDEKNERLQKVDIYICAIRDLSATLGTEASMIITKIHPSLNDLYGISKNISDDILKKLNGTVVSLEEEKHKRLEKLHHLGRALSNLWNLMDASYEDRQKFFHVIDLLSSAPSDVCAPGSITLDIIQQAEAEVKRLDQLKASRIKELFIKKQKELEDTCNMSHMETPSTEMGNITNLVDSGEVDHVDLLAAMDEKIARAKEEAASRKGIIEKVDRWMLASDEERWLEEYDQDENRYSVSRNAHRNLRRAERARITVSKISGLVESILVKAKSWEVERQKVFLYNEVPLVAMLQEYNKLRQEKEMEKQRLREMKKMSIPQPVAEGDNFYMARPASSNRRISNRSMNGGFGSGSPINRKYSGGFNNTNNNYTALGTSIRRESRKSEA

SEQ ID NO: 86192 - DNA, 782 bp, Arabidopsis thaliana
  misc_feature (1)..(782): Ceres Seq. ID no. 12687555
  misc_feature: MA Experiment ID: 108573 Result: Up-regulated in Transcription
  misc_feature: MA Experiment 108573 PARAMETER Experiment Name: At_Drought_cDNA_P Parameter: Timepoint (hr) Value: 6
  misc_feature: MA Experiment 108573 PARAMETER Experiment Name: At_Drought_cDNA_P Parameter: Tissue Value: Aerial
  misc_feature: MA Experiment 108573 PARAMETER Experiment Name: At_Drought_cDNA_P Parameter: Treatment Value: Drought vs. No Drought
  misc_feature: MA Experiment ID: 108579 Result: Up-regulated in Transcription
  misc_feature: MA Experiment 108579 PARAMETER Experiment Name: At_4deg_Cold_cDNA_P Parameter: Temperature (deg C) Value: 4 vs. 22
  misc_feature: MA Experiment 108579 PARAMETER Experiment Name: At_4deg_Cold_cDNA_P Parameter: Timepoint (hr) Value: 6
  misc_feature: MA Experiment 108579 PARAMETER Experiment Name: At_4deg_Cold_cDNA_P Parameter: Tissue Value: Aerial
  misc_feature: MA Experiment ID: 20000171 Result: Down-regulated in Transcription
  misc_feature: MA Experiment 20000171 PARAMETER Experiment Name: At_42deg_Heat_P Parameter: Age (day) Value: 14
  misc_feature: MA Experiment 20000171 PARAMETER Experiment Name: At_42deg_Heat_P Parameter: Organism Value: A. thaliana
  misc_feature: MA Experiment 20000171 PARAMETER Experiment Name: At_42deg_Heat_P Parameter: Plant Line Value: WS
  misc_feature: MA Experiment 20000171 PARAMETER Experiment Name: At_42deg_Heat_P Parameter: Temperature (deg C) Value: 42 vs. 22
  misc_feature: MA Experiment 20000171 PARAMETER Experiment Name: At_42deg_Heat_P Parameter: Timepoint (hr) Value: 1
  misc_feature: MA Experiment 20000171 PARAMETER Experiment Name: At_42deg_Heat_P Parameter: Tissue Value: Aerial
  misc_feature: MA Experiment ID: 20000184 Result: Up-regulated in Transcription
  misc_feature: MA Experiment 20000184 PARAMETER Experiment Name: At_Shoots__P Parameter: Age (day) Value: 7
  misc_feature: MA Experiment 20000184 PARAMETER Experiment Name: At_Shoots__P Parameter: Tissue Value: Shoots vs. Whole Plant
  misc_feature: MA Experiment ID: 20000185 Result: Down-regulated in Transcription
  misc_feature: MA Experiment 20000185 PARAMETER Experiment Name: At_Roots__P Parameter: Age (day) Value: 7 vs. 21
  misc_feature: MA Experiment 20000185 PARAMETER Experiment Name: At_Roots__P Parameter: Organism Value: A. thaliana
  misc_feature: MA Experiment 20000185 PARAMETER Experiment Name: At_Roots__P Parameter: Tissue Value: Roots vs. Whole Plant
  misc_feature: MA Experiment ID: 20000234 Result: Up-regulated in Transcription
  misc_feature: MA Experiment 20000234 PARAMETER Experiment Name: At_Siliques_P Parameter: Age (day) Value: 21
  misc_feature: MA Experiment 20000234 PARAMETER Experiment Name: At_Siliques_P Parameter: Organism Value: A. thaliana
  misc_feature: MA Experiment 20000234 PARAMETER Experiment Name: At_Siliques_P Parameter: Plant Line Value: WS
  misc_feature: MA Experiment 20000234 PARAMETER Experiment Name: At_Siliques_P Parameter: Tissue Value: Less Than 5mm Siliques vs. Whole Plant
  misc_feature: MA Experiment ID: 20000436 Result: Up-regulated in Transcription
  misc_feature: MA Experiment 20000436 PARAMETER Experiment Name: At_Drought_P Parameter: Age (day) Value: 7
  misc_feature: MA Experiment 20000436 PARAMETER Experiment Name: At_Drought_P Parameter: Organism Value: A. thaliana
  misc_feature: MA Experiment 20000436 PARAMETER Experiment Name: At_Drought_P Parameter: Plant Line Value: WS
  misc_feature: MA Experiment 20000436 PARAMETER Experiment Name: At_Drought_P Parameter: Timepoint (hr) Value: 12
  misc_feature: MA Experiment 20000436 PARAMETER Experiment Name: At_Drought_P Parameter: Tissue Value: Whole Plant
  misc_feature: MA Experiment 20000436 PARAMETER Experiment Name: At_Drought_P Parameter: Treatment Value: Drought vs. No Drought
  misc_feature: MA Experiment ID: 20000438 Result: Up-regulated in Transcription
  misc_feature: MA Experiment 20000438 PARAMETER Experiment Name: At_Shoots__P Parameter: Age (day) Value: 14
  misc_feature: MA Experiment 20000438 PARAMETER Experiment Name: At_Shoots__P Parameter: Tissue Value: Shoots vs. Whole Plant
  misc_feature: MA Experiment ID: 20000439 Result: Down-regulated in Transcription
  misc_feature: MA Experiment 20000439 PARAMETER Experiment Name: At_Roots__P Parameter: Age (day) Value: 14 vs. 21
  misc_feature: MA Experiment 20000439 PARAMETER Experiment Name: At_Roots__P Parameter: Organism Value: A. thaliana
  misc_feature: MA Experiment 20000439 PARAMETER Experiment Name: At_Roots__P Parameter: Tissue Value: Roots vs. Whole Plant
  misc_feature: MA Experiment ID: 20000451 Result: Up-regulated in Transcription
  misc_feature: MA Experiment 20000451 PARAMETER Experiment Name: At_CS6879_Shoots-Roots_P Parameter: Age (day) Value: 14
  misc_feature: MA Experiment 20000451 PARAMETER Experiment Name: At_CS6879_Shoots-Roots_P Parameter: Organism Value: A. thaliana
  misc_feature: MA Experiment 20000451 PARAMETER Experiment Name: At_CS6879_Shoots-Roots_P Parameter: Plant Line Value: CS6879 vs. WS
  misc_feature: MA Experiment 20000451 PARAMETER Experiment Name: At_CS6879_Shoots-Roots_P Parameter: Tissue Value: Roots
  misc_feature: MA Experiment ID: 20000573 Result: Down-regulated in Transcription
  misc_feature: MA Experiment 20000573 PARAMETER Experiment Name: At_100uM_ABA_Mutants__P Parameter: Organism Value: A. thaliana
  misc_feature: MA Experiment 20000573 PARAMETER Experiment Name: At_100uM_ABA_Mutants__P Parameter: Plant Line Value: CS22 vs. Ler wt
  misc_feature: MA Experiment 20000573 PARAMETER Experiment Name: At_100uM_ABA_Mutants__P Parameter: Timepoint (hr) Value: N/A
  misc_feature: MA Experiment 20000573 PARAMETER Experiment Name: At_100uM_ABA_Mutants__P Parameter: Tissue Value: Whole Plant
  misc_feature: MA Experiment 20000573 PARAMETER Experiment Name: At_100uM_ABA_Mutants__P Parameter: Treatment Value: None
  misc_feature: MA Experiment ID: 20001248 Result: Down-regulated in Transcription
  misc_feature: MA Experiment 20001248 PARAMETER Experiment Name: At_Far-red-induction_P Parameter: Age (day) Value: 7
  misc_feature: MA Experiment 20001248 PARAMETER Experiment Name: At_Far-red-induction_P Parameter: Light Value: Far-red vs. White
  misc_feature: MA Experiment 20001248 PARAMETER Experiment Name: At_Far-red-induction_P Parameter: Organism Value: A. thaliana
  misc_feature: MA Experiment 20001248 PARAMETER Experiment Name: At_Far-red-induction_P Parameter: Plant Line Value: Columbia
  misc_feature: MA Experiment 20001248 PARAMETER Experiment Name: At_Far-red-induction_P Parameter: Timepoint (hr) Value: 4
  misc_feature: MA Experiment 20001248 PARAMETER Experiment Name: At_Far-red-induction_P Parameter: Tissue Value: Whole Plant
  misc_feature: MA Experiment ID: 20001557 Result: Up-regulated in Transcription
  misc_feature: MA Experiment 20001557 PARAMETER Experiment Name: At_Drought_Soil_Dry_P Parameter: Age (day) Value: 27
  misc_feature: MA Experiment 20001557 PARAMETER Experiment Name: At_Drought_Soil_Dry_P Parameter: Organism Value: A. thaliana
  misc_feature: MA Experiment 20001557 PARAMETER Experiment Name: At_Drought_Soil_Dry_P Parameter: Plant Line Value: WS
  misc_feature: MA Experiment 20001557 PARAMETER Experiment Name: At_Drought_Soil_Dry_P Parameter: Post Timepoint (hr) Value: 3
  misc_feature: MA Experiment 20001557 PARAMETER Experiment Name: At_Drought_Soil_Dry_P Parameter: Post-Treatment Value: Re-Water vs. No Drought
  misc_feature: MA Experiment 20001557 PARAMETER Experiment Name: At_Drought_Soil_Dry_P Parameter: Timepoint (day) Value: 13
  misc_feature: MA Experiment 20001557 PARAMETER Experiment Name: At_Drought_Soil_Dry_P Parameter: Treatment Value: Drought vs. No Drought
  misc_feature: MA Experiment ID: 20001558 Result: Up-regulated in Transcription
  misc_feature: MA Experiment 20001558 PARAMETER Experiment Name: At_Drought_Soil_Dry_P Parameter: Age (day) Value: 27
  misc_feature: MA Experiment 20001558 PARAMETER Experiment Name: At_Drought_Soil_Dry_P Parameter: Organism Value: A. thaliana
  misc_feature: MA Experiment 20001558 PARAMETER Experiment Name: At_Drought_Soil_Dry_P Parameter: Plant Line Value: WS
  misc_feature: MA Experiment 20001558 PARAMETER Experiment Name: At_Drought_Soil_Dry_P Parameter: Post Timepoint (hr) Value: 6
  misc_feature: MA Experiment 20001558 PARAMETER Experiment Name: At_Drought_Soil_Dry_P Parameter: Post-Treatment Value: Re-Water vs. No Drought
  misc_feature: MA Experiment 20001558 PARAMETER Experiment Name: At_Drought_Soil_Dry_P Parameter: Timepoint (day) Value: 13
  misc_feature: MA Experiment 20001558 PARAMETER Experiment Name: At_Drought_Soil_Dry_P Parameter: Treatment Value: Drought vs. No Drought
  misc_feature: MA Experiment ID: 20001560 Result: Up-regulated in Transcription
  misc_feature: MA Experiment 20001560 PARAMETER Experiment Name: At_Drought_Soil_Dry_P Parameter: Age (day) Value: 28
  misc_feature: MA Experiment 20001560 PARAMETER Experiment Name: At_Drought_Soil_Dry_P Parameter: Organism Value: A. thaliana
  misc_feature: MA Experiment 20001560 PARAMETER Experiment Name: At_Drought_Soil_Dry_P Parameter: Plant Line Value: WS
  misc_feature: MA Experiment 20001560 PARAMETER Experiment Name: At_Drought_Soil_Dry_P Parameter: Post Timepoint (hr) Value: None
  misc_feature: MA Experiment 20001560 PARAMETER Experiment Name: At_Drought_Soil_Dry_P Parameter: Post-Treatment Value: None
  misc_feature: MA Experiment 20001560 PARAMETER Experiment Name: At_Drought_Soil_Dry_P Parameter: Timepoint (day) Value: 14
  misc_feature: MA Experiment 20001560 PARAMETER Experiment Name: At_Drought_Soil_Dry_P Parameter: Treatment Value: Drought vs. No Drought
  misc_feature: MA Experiment ID: 20001904 Result: Up-regulated in Transcription
  misc_feature: MA Experiment 20001904 PARAMETER Experiment Name: At_Drought_Reproduction_P Parameter: Age (day) Value: 37
  misc_feature: MA Experiment 20001904 PARAMETER Experiment Name: At_Drought_Reproduction_P Parameter: Organism Value: A. thaliana
  misc_feature: MA Experiment 20001904 PARAMETER Experiment Name: At_Drought_Reproduction_P Parameter: Plant Line Value: WS
  misc_feature: MA Experiment 20001904 PARAMETER Experiment Name: At_Drought_Reproduction_P Parameter: Timepoint (day) Value: 7
  misc_feature: MA Experiment 20001904 PARAMETER Experiment Name: At_Drought_Reproduction_P Parameter: Tissue Value: Rosettes
  misc_feature: MA Experiment 20001904 PARAMETER Experiment Name: At_Drought_Reproduction_P Parameter: Treatment Value: Drought vs. No Drought
aaaagagtaattgaacaaaagaaagaaaaactgataatgaagggtcttcatctccacctcgtcctagtcaccatgacgatcgttgcctccatcgccgccgctgcaccggctgctcccggaggagctctggctgatgaatgcaaccaggattttcaaaaggtgactttgtgtttggactttgcgaccgggaaggcaacaattccgtctaagaagtgttgtgacgctgttgaagatatcaaagaaagagatccaaagtgtttgtgtttcgttatacaacaagcgaagacaggaggacaagccttgaaggatcttggtgttcaagaagacaaactcattcaactcccaacttcttgtcagctccacaacgctagcattaccaactgtccaaagcttctagggatttcacctagctcgccagacgcagccgtattcacaaacaatgccacaacaacaccggtggcaccagcaggaaagtctccggcaactccagctacgtccacggataagggaggatcagcttcagcaaaggatggtcacgcagtcgttgctctagccgtcgctttgatggccgtctcctttgtcttgaccttgcctagacatgtcacattagggatgtaatcttttcttatgaagttggttggtgcttttgtttttgtcccttttgtttcaaaacttatctttcaagtgtgtttctttgttcggacatttgttgtaatgagtcaacttcccactcaaatctgatatctctccgcaaatgagtaaatttatgctatttcattttc

SEQ ID NO: 86193 - protein, 205 aa, Arabidopsis thaliana; identical to SEQ ID NO: 29703
  peptide (1)..(205): Ceres Seq. ID no. 12687556
  misc_feature (47)..(128): Pfam Name: Protease inhibitor/seed storage/LTP family Pfam Description: Protease inhibitor/seed storage/LTP family
  misc_feature (13)..(205): Homolog of NCBI NO: 15217777 NR Description: lipid transfer protein, putative; protein id: supported by cDNA: 15027., supported by cDNA: gi_20260113
  misc_feature (13)..(205): Homolog of NCBI NO: 21553541 NR Description: lipid transfer protein, putative [Arabidopsis
  misc_feature (23)..(178): Homolog of NCBI NO: 15224862 NR Description: unknown protein; protein id: At2g44290.1
  misc_feature (16)..(173): Homolog of NCBI NO: 15224863 NR Description: unknown protein; protein id: At2g44300.1
  misc_feature (12)..(195): Homolog of NCBI NO: 25553588 NR Description: OJ1656_E11.14 [Oryza sativa (japonica
  misc_feature (17)..(182): Homolog of NCBI NO: 34394084 NR Description: lipid transfer protein-like [Oryza sativa
  misc_feature (25)..(194): Homolog of NCBI NO: 25553602 NR Description: OJ1656_E11.34 [Oryza sativa (japonica
  misc_feature (23)..(193): Homolog of NCBI NO: 25553595 NR Description: OJ1656_E11.26 [Oryza sativa (japonica
  misc_feature (16)..(174): Homolog of NCBI NO: 28269449 NR Description: putative protease inhibitor [Oryza sativa
  misc_feature (20)..(196): Homolog of NCBI NO: 38344972 NR Description: OSJNBa0072F16.17 [Oryza sativa (japonica

SEQ ID NO: 86194 - protein, 193 aa, Arabidopsis thaliana; identical to SEQ ID NO: 29704
  peptide (1)..(193): Ceres Seq. ID no. 12687557
  misc_feature (35)..(116): Pfam Name: Protease inhibitor/seed storage/LTP family Pfam Description: Protease inhibitor/seed storage/LTP family
  misc_feature (1)..(193): Homolog of NCBI NO: 15217777 NR Description: lipid transfer protein, putative; protein id: supported by cDNA: 15027., supported by cDNA: gi_20260113
  misc_feature (1)..(193): Homolog of NCBI NO: 21553541 NR Description: lipid transfer protein, putative [Arabidopsis
  misc_feature (11)..(166): Homolog of NCBI NO: 15224862 NR Description: unknown protein; protein id: At2g44290.1
  misc_feature (4)..(161): Homolog of NCBI NO: 15224863 NR Description: unknown protein; protein id: At2g44300.1
  misc_feature (1)..(183): Homolog of NCBI NO: 25553588 NR Description: OJ1656_E11.14 [Oryza sativa (japonica
  misc_feature (5)..(170): Homolog of NCBI NO: 34394084 NR Description: lipid transfer protein-like [Oryza sativa
  misc_feature (13)..(182): Homolog of NCBI NO: 25553602 NR Description: OJ1656_E11.34 [Oryza sativa (japonica
  misc_feature (11)..(181): Homolog of NCBI NO: 25553595 NR Description: OJ1656_E11.26 [Oryza sativa (japonica
  misc_feature (4)..(162): Homolog of NCBI NO: 28269449 NR Description: putative protease inhibitor [Oryza sativa
  misc_feature (8)..(184): Homolog of NCBI NO: 38344972 NR Description: OSJNBa0072F16.17 [Oryza sativa (japonica

SEQ ID NO: 86195 - protein, 181 aa, Arabidopsis thaliana; identical to SEQ ID NO: 29705
  peptide (1)..(181): Ceres Seq. ID no. 12687558
  misc_feature (23)..(104): Pfam Name: Protease inhibitor/seed storage/LTP family Pfam Description: Protease inhibitor/seed storage/LTP family
  misc_feature (1)..(181): Homolog of NCBI NO: 15217777 NR Description: lipid transfer protein, putative; protein id: supported by cDNA: 15027., supported by cDNA: gi_20260113
  misc_feature (1)..(181): Homolog of NCBI NO: 21553541 NR Description: lipid transfer protein, putative [Arabidopsis
  misc_feature (1)..(154): Homolog of NCBI NO: 15224862 NR Description: unknown protein; protein id: At2g44290.1
  misc_feature (1)..(149): Homolog of NCBI NO: 15224863 NR Description: unknown protein; protein id: At2g44300.1
  misc_feature (1)..(171): Homolog of NCBI NO: 25553588 NR Description: OJ1656_E11.14 [Oryza sativa (japonica
  misc_feature (1)..(158): Homolog of NCBI NO: 34394084 NR Description: lipid transfer protein-like [Oryza sativa
  misc_feature (1)..(170): Homolog of NCBI NO: 25553602 NR Description: OJ1656_E11.34 [Oryza sativa (japonica
  misc_feature (1)..(169): Homolog of NCBI NO: 25553595 NR Description: OJ1656_E11.26 [Oryza sativa (japonica
  misc_feature (1)..(150): Homolog of NCBI NO: 28269449 NR Description: putative protease inhibitor [Oryza sativa
  misc_feature (1)..(172): Homolog of NCBI NO: 38344972 NR Description: OSJNBa0072F16.17 [Oryza sativa (japonica

SEQ ID NO: 86196 - DNA, 1367 bp, Arabidopsis thaliana
  misc_feature (1)..(1367): Ceres Seq. ID no. 12687585
  misc_feature: MA Experiment ID: 108434 Result: Up-regulated in Transcription
  misc_feature: MA Experiment 108434 PARAMETER Experiment Name: At_Root_Tips_cDNA_P Parameter: Tissue Value: Root Tips
  misc_feature: MA Experiment ID: 108595 Result: Down-regulated in Transcription
  misc_feature: MA Experiment 108595 PARAMETER Experiment Name: At_Ler-pi_Ovule_cDNA_P Parameter: Plant Line Value: null
gatttgagaaatctttttcatcatcatcactcttcctccttccccattgcttagtgttggttcccaagtcccaacctgcttcaatttaggtcgcaaacgatctcaattattcacaatccaatcttttcttcaatcgatcttcgtttctgatcaagctaataataagctaggaagagagtttagtgaagtagtgaagatgcagaatcagattgatatggtgaaggatgaagcggaagtagctgcatcgatttcagcaattaagggtgaagaatggggaaattgttcatcagtggaagatcaaccatcttttcaagaagaagaagctgctaaagttccttatgttggtgataaggaacctctgtctagtttagctgcagagtatcaatcagggagtcccattttgctggagaagattaagatactggacagtcaatatatcggaatccggcgaacaagaggagatggaaattgcttcttccgaagttttatgttctcttaccttgagcatatattggaatcacaagatcgtgctgaagtcgatcgtatcaaggtcaatgttgagaaatgtagaaagactctgcaaaacttaggttatacagattttacatttgaggacttctttgcgttgttccttgagcaactagatgacattctccaaggaactgaagagtctataagctacgatgagctggttaacagaagtagagatcagtcagtctcagattacattgtaatgttctttaggtttgttactgctggtgatatacgaacgcgtgccgattttttcgagccttttataacaggcttatcaaatgcaacagtggatcagttttgcaagtcctcggtcgaaccaatgggggaagagagtgaccatattcacataactgctttgtcggacgcacttggtgttgcaatccgtgttgtgtatcttgaccgtagctcatgtgatagtgggggcgtcactgtgaatcatcatgactttgttcctgtgggcattaccaatgagaaagatgaagaagcttctgctccatttataaccttgctgtatcgtccaggccattacgatatcctctaccccaagccatcttgtaaggtatcagacaatgtggggaaatgatcatttgacatatcgtaaatcgcattaggagacgtttacaaaaaactgtggtaatatggattcatgtggatgaaaccatggaacaatcaacaattaccccatcgatttgcattttgattatgataaaagaaccctttttgcaacactatagaatggaccgtctctttactttgatattgccttgtatttttcatgaatcatgataatatcctttatgatatttctgatgagcaagtggaatcaaagggtt

SEQ ID NO: 86197 - protein, 306 aa, Arabidopsis thaliana; identical to SEQ ID NO: 39407
  peptide (1)..(306): Ceres Seq. ID no. 12687586
  misc_feature (87)..(289): Pfam Name: OTU-like cysteine protease Pfam Description: OTU-like cysteine protease
  misc_feature (1)..(306): Homolog of NCBI NO: 18396650 NR Description: expressed protein; protein id: At1g28120.1, by cDNA: 106626. [Arabidopsis thaliana] >gi|25342412|pir||A86407
  misc_feature (1)..(306): Homolog of NCBI NO: 21536634 NR Description: unknown [Arabidopsis thaliana]
  misc_feature (98)..(295): Homolog of NCBI NO: 38175546 NR Description: putative ubiquitin-specific protease otubain 1
  misc_feature (32)..(294): Homolog of NCBI NO: 19921060 NR Description: CG4968-PA [Drosophila melanogaster]
  misc_feature (35)..(293): Homolog of NCBI NO: 27717729 NR Description: similar to expressed sequence AI850305 [Mus
  misc_feature (35)..(266): Homolog of NCBI NO: 6841176 NR Description: HSPC263 [Homo sapiens]
  misc_feature (35)..(266): Homolog of NCBI NO: 19527388 NR Description: expressed sequence AI850305 [Mus musculus] similar to expressed sequence AI850305 [Mus musculus] [Rattus >gi|18490720|gb|AAH22575.1| Unknown (protein for MGC:31052) [Mus
  misc_feature (35)..(266): Homolog of NCBI NO: 13960159 NR Description: Unknown (protein for MGC:4584) [Homo sapiens]
  misc_feature (35)..(266): Homolog of NCBI NO: 34861851 NR Description: similar to HSPC263 [Rattus norvegicus]
  misc_feature (35)..(266): Homolog of NCBI NO: 8923114 NR Description: ubiquitin-specific protease otubain 1 [Homo >gi|7020000|dbj|BAA90956.1| unnamed protein product [Homo

SEQ ID NO: 86198 - protein, 300 aa, Arabidopsis thaliana; identical to SEQ ID NO: 39408
  peptide (1)..(300): Ceres Seq. ID no. 12687587
  misc_feature (81)..(283): Pfam Name: OTU-like cysteine protease Pfam Description: OTU-like cysteine protease
  misc_feature (1)..(300): Homolog of NCBI NO: 18396650 NR Description: expressed protein; protein id: At1g28120.1, by cDNA: 106626. [Arabidopsis thaliana] >gi|25342412|pir||A86407
  misc_feature (1)..(300): Homolog of NCBI NO: 21536634 NR Description: unknown [Arabidopsis thaliana]
  misc_feature (92)..(289): Homolog of NCBI NO: 38175546 NR Description: putative ubiquitin-specific protease otubain 1
  misc_feature (26)..(288): Homolog of NCBI NO: 19921060 NR Description: CG4968-PA [Drosophila melanogaster]
  misc_feature (29)..(287): Homolog of NCBI NO: 27717729 NR Description: similar to expressed sequence AI850305 [Mus
  misc_feature (29)..(260): Homolog of NCBI NO: 6841176 NR Description: HSPC263 [Homo sapiens]
  misc_feature (29)..(260): Homolog of NCBI NO: 13960159 NR Description: Unknown (protein for MGC:4584) [Homo sapiens]
  misc_feature (29)..(260): Homolog of NCBI NO: 19527388 NR Description: expressed sequence AI850305 [Mus musculus] similar to expressed sequence AI850305 [Mus musculus] [Rattus >gi|18490720|gb|AAH22575.1| Unknown (protein for MGC:31052) [Mus
  misc_feature (29)..(260): Homolog of NCBI NO: 34861851 NR Description: similar to HSPC263 [Rattus norvegicus]
  misc_feature (29)..(260): Homolog of NCBI NO: 8923114 NR Description: ubiquitin-specific protease otubain 1 [Homo >gi|7020000|dbj|BAA90956.1| unnamed protein product [Homo

SEQ ID NO: 86199 - protein, 209 aa, Arabidopsis thaliana; identical to SEQ ID NO: 39409
  peptide (1)..(209): Ceres Seq. ID no. 12687588
  misc_feature (1)..(192): Pfam Name: OTU-like cysteine protease Pfam Description: OTU-like cysteine protease
  misc_feature (1)..(209): Homolog of NCBI NO: 18396650 NR Description: expressed protein; protein id: At1g28120.1, by cDNA: 106626. [Arabidopsis thaliana] >gi|25342412|pir||A86407
  misc_feature (1)..(209): Homolog of NCBI NO: 21536634 NR Description: unknown [Arabidopsis thaliana]
  misc_feature (1)..(198): Homolog of NCBI NO: 38175546 NR Description: putative ubiquitin-specific protease otubain 1
  misc_feature (1)..(197): Homolog of NCBI NO: 19921060 NR Description: CG4968-PA [Drosophila melanogaster]
  misc_feature (1)..(196): Homolog of NCBI NO: 27717729 NR Description: similar to expressed sequence AI850305 [Mus
  misc_feature (1)..(169): Homolog of NCBI NO: 6841176 NR Description: HSPC263 [Homo sapiens]
  misc_feature (1)..(169): Homolog of NCBI NO: 13960159 NR Description: Unknown (protein for MGC:4584) [Homo sapiens]
  misc_feature (1)..(169): Homolog of NCBI NO: 19527388 NR Description: expressed sequence AI850305 [Mus musculus] similar to expressed sequence AI850305 [Mus musculus] [Rattus >gi|18490720|gb|AAH22575.1| Unknown (protein for MGC:31052) [Mus
  misc_feature (1)..(169): Homolog of NCBI NO: 34861851 NR Description: similar to HSPC263 [Rattus norvegicus]
  misc_feature (1)..(169): Homolog of NCBI NO: 8923114 NR Description: ubiquitin-specific protease otubain 1 [Homo >gi|7020000|dbj|BAA90956.1| unnamed protein product [Homo

SEQ ID NO: 86200 - DNA, 1080 bp, Arabidopsis thaliana
  misc_feature (1)..(1080): Ceres Seq. ID no. 12687601
  misc_feature: MA Experiment ID: 108434 Result: Up-regulated in Transcription
  misc_feature: MA Experiment 108434 PARAMETER Experiment Name: At_Root_Tips_cDNA_P Parameter: Tissue Value: Root Tips
  misc_feature: MA Experiment ID: 108461 Result: Up-regulated in Transcription
  misc_feature: MA Experiment 108461 PARAMETER Experiment Name: At_Germinating_Seeds_cDNA_P Parameter: Age (day) Value: 1 vs. 0
  misc_feature: MA Experiment 108461 PARAMETER Experiment Name: At_Germinating_Seeds_cDNA_P Parameter: Tissue Value: Germinating Seeds
  misc_feature: MA Experiment ID: 108595 Result: Up-regulated in Transcription
  misc_feature: MA Experiment 108595 PARAMETER Experiment Name: At_Ler-pi_Ovule_cDNA_P Parameter: Plant Line Value: null
  misc_feature: MA Experiment ID: 108607 Result: Down-regulated in Transcription
  misc_feature: MA Experiment 108607 PARAMETER Experiment Name: At_100uM_ABA_cDNA_P Parameter: Timepoint (hr) Value: 4
  misc_feature: MA Experiment 108607 PARAMETER Experiment Name: At_100uM_ABA_cDNA_P Parameter: Tissue Value: Aerial
  misc_feature: MA Experiment 108607 PARAMETER Experiment Name: At_100uM_ABA_cDNA_P Parameter: Treatment Value: 100uM ABA vs. No Treatment
  misc_feature: MA Experiment ID: 108668 Result: Down-regulated in Transcription
  misc_feature: MA Experiment 108668 PARAMETER Experiment Name: At_2mM_SA_cDNA_P Parameter: Plant Line Value: WS
  misc_feature: MA Experiment 108668 PARAMETER Experiment Name: At_2mM_SA_cDNA_P Parameter: Timepoint (hr) Value: 6
  misc_feature: MA Experiment 108668 PARAMETER Experiment Name: At_2mM_SA_cDNA_P Parameter: Treatment Value: 2mM SA vs. No Treatment
atgggtttcattggtaagagtgtattagtgagtctcgtagcactttggtgcttcacttcctctgtcttcactgaagaagtgaaccataagactcaaaccccttctctagctcctgctcctgctccttaccaccacggccaccaccacccacaccctcctcatcaccaccaccctcaccctcaccctcacccccacccaccggccaaatctcctgttaaacccccggttaaggcaccagtgtctccaccagccaaacctccggttaagcccccggtttacccacccaccaaagccccggtgaaacccccaactaaacccccggtcaagccacctgtttccccaccagccaaacctccggttaagccaccagtttaccctccaaccaaagctccagttaagcccccaactaaacccccagtcaagccaccagtttaccctccaaccaaagccccggttaagcccccaactaaacccccagtcaagccaccagtttaccctccaaccaaagccccggttaagcccccaactaaacccccggtcaagccaccagtttccccaccagccaaacctccagttaagcccccggtttaccctcctaccaaagctccggttaagcctccggtttctcctccgacgaagccacctgttacaccgccggtttacccgcctaagttcaaccgtagtctagtcgccgttcggggtacggtttactgcaaaagctgcaagtacgctgctttcaacacactcttaggcgctaaacccatcgaaggtgctacggtgaaactagtgtgtaagagcaagaagaacataacagcggagacgacgacagacaagaacggatacttcttgttgttggctcctaagacggtgacgaacttcggtttcagaggatgtcgtgtgtatttggtgaaatcaaaggactacaaatgcagcaaagtctcaaagctcttcggtggagatgtcggcgctgaacttaagcctgagaaaaagctgggaaaatctacggtggtcgtcaacaagctcgtatacggtctctttaacgttggtccatttgcctttaacccgtcttgccccaaatga

SEQ ID NO: 86201 - protein, 359 aa, Arabidopsis thaliana
  peptide (1)..(359): Ceres Seq. ID no. 12687602
  misc_feature (232)..(359): Pfam Name: Pollen proteins Ole e I family Pfam Description: Pollen proteins Ole e I family
  misc_feature (1)..(359): Homolog of NCBI NO: 15217879 NR Description: prolin-rich protein, putative; protein id:
  misc_feature (166)..(359): Homolog of NCBI NO: 15226166 NR Description: putative proline-rich protein; protein id:
  misc_feature (31)..(238): Homolog of NCBI NO: 480109 NR Description: EPPT protein - hydromedusa (Podocoryne carnea)
  misc_feature (31)..(223): Homolog of NCBI NO: 480109 NR Description: EPPT protein - hydromedusa (Podocoryne carnea)
  misc_feature (31)..(223): Homolog of NCBI NO: 480109 NR Description: EPPT protein - hydromedusa (Podocoryne carnea)
  misc_feature (31)..(223): Homolog of NCBI NO: 480109 NR Description: EPPT protein - hydromedusa (Podocoryne carnea)
  misc_feature (31)..(223): Homolog of NCBI NO: 480109 NR Description: EPPT protein - hydromedusa (Podocoryne carnea)
  misc_feature (31)..(223): Homolog of NCBI NO: 480109 NR Description: EPPT protein - hydromedusa (Podocoryne carnea)
  misc_feature (31)..(223): Homolog of NCBI NO: 480109 NR Description: EPPT protein - hydromedusa (Podocoryne carnea)
  misc_feature (31)..(223): Homolog of NCBI NO: 480109 NR Description: EPPT protein - hydromedusa (Podocoryne carnea)
MGFIGKSVLVSLVALWCFTSSVFTEEVNHKTQTPSLAPAPAPYHHGHHHPHPPHHHHPHPHPHPHPPAKSPVKPPVKAPVSPPAKPPVKPPVYPPTKAPVKPPTKPPVKPPVSPPAKPPVKPPVYPPTKAPVKPPTKPPVKPPVYPPTKAPVKPPTKPPVKPPVYPPTKAPVKPPTKPPVKPPVSPPAKPPVKPPVYPPTKAPVKPPVSPPTKPPVTPPVYPPKFNRSLVAVRGTVYCKSCKYAAFNTLLGAKPIEGATVKLVCKSKKNITAETTTDKNGYFLLLAPKTVTNFGFRGCRVYLVKSKDYKCSKVSKLFGGDVGAELKPEKKLGKSTVVVNKLVYGLFNVGPFAFNPSCPK

SEQ ID NO: 86202 - DNA, 1170 bp, Arabidopsis thaliana
  misc_feature (1)..(1170): Ceres Seq. ID no. 12687637
  misc_feature: MA Experiment ID: 20000185 Result: Down-regulated in Transcription
  misc_feature: MA Experiment 20000185 PARAMETER Experiment Name: At_Roots__P Parameter: Age (day) Value: 7 vs. 21
  misc_feature: MA Experiment 20000185 PARAMETER Experiment Name: At_Roots__P Parameter: Organism Value: A. thaliana
  misc_feature: MA Experiment 20000185 PARAMETER Experiment Name: At_Roots__P Parameter: Tissue Value: Roots vs. Whole Plant
  misc_feature: MA Experiment ID: 20000451 Result: Down-regulated in Transcription
  misc_feature: MA Experiment 20000451 PARAMETER Experiment Name: At_CS6879_Shoots-Roots_P Parameter: Age (day) Value: 14
  misc_feature: MA Experiment 20000451 PARAMETER Experiment Name: At_CS6879_Shoots-Roots_P Parameter: Organism Value: A. thaliana
  misc_feature: MA Experiment 20000451 PARAMETER Experiment Name: At_CS6879_Shoots-Roots_P Parameter: Plant Line Value: CS6879 vs. WS
  misc_feature: MA Experiment 20000451 PARAMETER Experiment Name: At_CS6879_Shoots-Roots_P Parameter: Tissue Value: Roots
  misc_feature: MA Experiment ID: 20000455 Result: Up-regulated in Transcription
  misc_feature: MA Experiment 20000455 PARAMETER Experiment Name: At_100uM_ABA_P Parameter: Age (day) Value: 16
  misc_feature: MA Experiment 20000455 PARAMETER Experiment Name: At_100uM_ABA_P Parameter: Organism Value: A. thaliana
  misc_feature: MA Experiment 20000455 PARAMETER Experiment Name: At_100uM_ABA_P Parameter: Plant Line Value: WS
  misc_feature: MA Experiment 20000455 PARAMETER Experiment Name: At_100uM_ABA_P Parameter: Timepoint (hr) Value: 48
  misc_feature: MA Experiment 20000455 PARAMETER Experiment Name: At_100uM_ABA_P Parameter: Tissue Value: Aerial
  misc_feature: MA Experiment 20000455 PARAMETER Experiment Name: At_100uM_ABA_P Parameter: Treatment Value: 100uM ABA vs. No Treatment
  misc_feature: MA Experiment ID: 20000495 Result: Down-regulated in Transcription
  misc_feature: MA Experiment 20000495 PARAMETER Experiment Name: At_Guard_Cells_P Parameter: Harvest Date Value: 8/2/2002
  misc_feature: MA Experiment 20000495 PARAMETER Experiment Name: At_Guard_Cells_P Parameter: Organism Value: A. thaliana
  misc_feature: MA Experiment 20000495 PARAMETER Experiment Name: At_Guard_Cells_P Parameter: Tissue Value: Guard Cells vs. Leaves
  misc_feature: MA Experiment ID: 20000496 Result: Down-regulated in Transcription
  misc_feature: MA Experiment 20000496 PARAMETER Experiment Name: At_Guard_Cells_P Parameter: Harvest Date Value: 7/19/2002
  misc_feature: MA Experiment 20000496 PARAMETER Experiment Name: At_Guard_Cells_P Parameter: Organism Value: Canola
  misc_feature: MA Experiment 20000496 PARAMETER Experiment Name: At_Guard_Cells_P Parameter: Tissue Value: Guard Cells vs. Leaves
  misc_feature: MA Experiment ID: 20000527 Result: Down-regulated in Transcription
  misc_feature: MA Experiment 20000527 PARAMETER Experiment Name: At_10percent_PEG_P Parameter: Age (day) Value: 20
  misc_feature: MA Experiment 20000527 PARAMETER Experiment Name: At_10percent_PEG_P Parameter: Organism Value: A. thaliana
  misc_feature: MA Experiment 20000527 PARAMETER Experiment Name: At_10percent_PEG_P Parameter: Plant Line Value: WS
  misc_feature: MA Experiment 20000527 PARAMETER Experiment Name: At_10percent_PEG_P Parameter: Timepoint (day) Value: 20
  misc_feature: MA Experiment 20000527 PARAMETER Experiment Name: At_10percent_PEG_P Parameter: Tissue Value: Whole Plant
  misc_feature: MA Experiment 20000527 PARAMETER Experiment Name: At_10percent_PEG_P Parameter: Treatment Value: 10percent PEG vs. No Treatment
  misc_feature: MA Experiment ID: 20001248 Result: Down-regulated in Transcription
  misc_feature: MA Experiment 20001248 PARAMETER Experiment Name: At_Far-red-induction_P Parameter: Age (day) Value: 7
  misc_feature: MA Experiment 20001248 PARAMETER Experiment Name: At_Far-red-induction_P Parameter: Light Value: Far-red vs. White
  misc_feature: MA Experiment 20001248 PARAMETER Experiment Name: At_Far-red-induction_P Parameter: Organism Value: A. thaliana
  misc_feature: MA Experiment 20001248 PARAMETER Experiment Name: At_Far-red-induction_P Parameter: Plant Line Value: Columbia
  misc_feature: MA Experiment 20001248 PARAMETER Experiment Name: At_Far-red-induction_P Parameter: Timepoint (hr) Value: 4
  misc_feature: MA Experiment 20001248 PARAMETER Experiment Name: At_Far-red-induction_P Parameter: Tissue Value: Whole Plant
  misc_feature: MA Experiment ID: 20001450 Result: Down-regulated in Transcription
  misc_feature: MA Experiment 20001450 PARAMETER Experiment Name: At_Far-red-induction_P Parameter: Age (day) Value: 7
  misc_feature: MA Experiment 20001450 PARAMETER Experiment Name: At_Far-red-induction_P Parameter: Light Value: Far-red vs. White
  misc_feature: MA Experiment 20001450 PARAMETER Experiment Name: At_Far-red-induction_P Parameter: Organism Value: A. thaliana
  misc_feature: MA Experiment 20001450 PARAMETER Experiment Name: At_Far-red-induction_P Parameter: Plant Line Value: Columbia
  misc_feature: MA Experiment 20001450 PARAMETER Experiment Name: At_Far-red-induction_P Parameter: Timepoint (hr) Value: 8
  misc_feature: MA Experiment 20001450 PARAMETER Experiment Name: At_Far-red-induction_P Parameter: Tissue Value: Whole Plant
  misc_feature: MA Experiment ID: 20001458 Result: Down-regulated in Transcription
  misc_feature: MA Experiment 20001458 PARAMETER Experiment Name: At_50mM_NH4NO3_L-to-H_P Parameter: Age (day) Value: Undefined
  misc_feature: MA Experiment 20001458 PARAMETER Experiment Name: At_50mM_NH4NO3_L-to-H_P Parameter: Organism Value: Undefined
  misc_feature: MA Experiment 20001458 PARAMETER Experiment Name: At_50mM_NH4NO3_L-to-H_P Parameter: Plant Line Value: Undefined
  misc_feature: MA Experiment 20001458 PARAMETER Experiment Name: At_50mM_NH4NO3_L-to-H_P Parameter: Timepoint (hr) Value: 2
  misc_feature: MA Experiment 20001458 PARAMETER Experiment Name: At_50mM_NH4NO3_L-to-H_P Parameter: Tissue Value: Siliques
  misc_feature: MA Experiment 20001458 PARAMETER Experiment Name: At_50mM_NH4NO3_L-to-H_P Parameter: Treatment Value: 50mM NH4NO3 vs. 100mM Manitol
  misc_feature: MA Experiment ID: 20001757 Result: Down-regulated in Transcription
  misc_feature: MA Experiment 20001757 PARAMETER Experiment Name: At_50mM_NH4NO3_L-to-H_P Parameter: Timepoint (hr) Value: 6
  misc_feature: MA Experiment 20001757 PARAMETER Experiment Name: At_50mM_NH4NO3_L-to-H_P Parameter: Tissue Value: Leaf
  misc_feature: MA Experiment 20001757 PARAMETER Experiment Name: At_50mM_NH4NO3_L-to-H_P Parameter: Treatment Value: 50mM NH4NO3 vs 100mM Mannitol
atggctactctgttcatgaagctggtgagcttctttctaattctatctactttttgtctcactactgtgaactcggagccacagtgccataatttcaaatcgatcattagtttcggcgattctattgccgacactggaaacttgctcgccctctccgatcctaccaatctccctaaggtcgcgtttctaccgtacggagaaaccttcttccaccatccgaccggccgtttctcaaacggccgcctcatcatcgatttcattgctgaatttttgggttttccgcttgtgcctcctttttacggatctcaaaatgcaaattttgagaaaggagttaattttgcggttggaggagcaacggcactggaacgttcctttcttgaagagagaggcattcattttccttacaccaacgttagtttagccgtacagcttagtagcttcaaggagagtttgcctaacttatgtgtctctccttcagactgcagagatatgatagaaaattctttgattctcatgggagaaattggagggaatgactataactacgcattctttgtgggcaaaaacattgaagagatcaaagagctggttccgcttgttattgaaactatctcttctgcaatcacggagttgattggtatgggggggaaaacatttctggtgcccggagagttcccgctcggatgctcagtagcctatttgagtttatatcaaacatcaaacatagaagaatatgatcctctaacaggatgtttgaaatggctgaacaagttttcagaataccacgacgagcagcttcaagcagaactcaacagacttcagaagttgtaccctcatgtcaacatcatatacgctgactactacaacacactgttgcgtcttgcccaagaaccagccaaattcgggttcataagcagacccttgccggcttgctgcgctttaggaggaccgtttaacttcacattaggtaggaaacgtgggactcaagtacctgaatgttgtgacgatccttcaaagtatgtgagttgggatggtgttcatatgactgaagctgcatatagattgatggctgagggtatacttaagggaccttatgcgattcctcctttcgattggtcttgcctcagctctgaaattaagaacacacagaattctttgatgaacaactga

SEQ ID NO: 86203 - protein, 389 aa, Arabidopsis thaliana; identical to SEQ ID NO: 48604
  peptide (1)..(389): Ceres Seq. ID no. 12687638
  misc_feature (35)..(360): Pfam Name: GDSL-like Lipase/Acylhydrolase Pfam Description: GDSL-like Lipase/Acylhydrolase
  misc_feature (1)..(389): Homolog of NCBI NO: 15218723 NR Description: lipase, putative; protein id: At1g28570.1 thaliana] >gi|10764860|gb|AAG22837.1|AC007508_14 F1K23.19
  misc_feature (4)..(385): Homolog of NCBI NO: 15218725 NR Description: lipase, putative; protein id: At1g28580.1, by cDNA: gi_13605564, supported by cDNA: gi_15027914, supported cDNA: gi_18491140, supported by cDNA: gi_19310790 [Arabidopsis
  misc_feature (6)..(381): Homolog of NCBI NO: 10764858 NR Description: F1K23.17 [Arabidopsis thaliana]
  misc_feature (6)..(381): Homolog of NCBI NO: 15218728 NR Description: lipase, putative; protein id: At1g28590.1
  misc_feature (8)..(389): Homolog of NCBI NO: 15225872 NR Description: putative lipase; protein id: At2g27360.1
  misc_feature (4)..(383): Homolog of NCBI NO: 12322540 NR Description: unknown protein [Arabidopsis thaliana]
  misc_feature (1)..(384): Homolog of NCBI NO: 25336243 NR Description: pnrotein F1K23.16 [imported] - Arabidopsis >gi|10764857|gb|AAG22835.1|AC007508_11 F1K23.16 [Arabidopsis
  misc_feature (1)..(388): Homolog of NCBI NO: 21593234 NR Description: lipase, putative [Arabidopsis thaliana]
  misc_feature (4)..(383): Homolog of NCBI NO: 30692564 NR Description: lipase, putative [Arabidopsis thaliana]
  misc_feature (4)..(383): Homolog of NCBI NO: 12597843 NR Description: lipase, putative [Arabidopsis thaliana]

SEQ ID NO: 86204 - protein, 384 aa, Arabidopsis thaliana; identical to SEQ ID NO: 48605
  peptide (1)..(384): Ceres Seq. ID no. 12687639
  misc_feature (30)..(355): Pfam Name: GDSL-like Lipase/Acylhydrolase Pfam Description: GDSL-like Lipase/Acylhydrolase
  misc_feature (1)..(384): Homolog of NCBI NO: 15218723 NR Description: lipase, putative; protein id: At1g28570.1 thaliana] >gi|10764860|gb|AAG22837.1|AC007508_14 F1K23.19
  misc_feature (1)..(380): Homolog of NCBI NO: 15218725 NR Description: lipase, putative; protein id: At1g28580.1, by cDNA: gi_13605564, supported by cDNA: gi_15027914, supported cDNA: gi_18491140, supported by cDNA: gi_19310790 [Arabidopsis
  misc_feature (1)..(376): Homolog of NCBI NO: 10764858 NR Description: F1K23.17 [Arabidopsis thaliana]
  misc_feature (1)..(376): Homolog of NCBI NO: 15218728 NR Description: lipase, putative; protein id: At1g28590.1
  misc_feature (3)..(384): Homolog of NCBI NO: 15225872 NR Description: putative lipase; protein id: At2g27360.1
  misc_feature (1)..(378): Homolog of NCBI NO: 12322540 NR Description: unknown protein [Arabidopsis thaliana]
  misc_feature (1)..(379): Homolog of NCBI NO: 25336243 NR Description: pnrotein F1K23.16 [imported] - Arabidopsis >gi|10764857|gb|AAG22835.1|AC007508_11 F1K23.16 [Arabidopsis
  misc_feature (1)..(383): Homolog of NCBI NO: 21593234 NR Description: lipase, putative [Arabidopsis thaliana]
  misc_feature (1)..(378): Homolog of NCBI NO: 30692564 NR Description: lipase, putative [Arabidopsis thaliana]
  misc_feature (1)..(378): Homolog of NCBI NO: 12597843 NR Description: lipase, putative [Arabidopsis thaliana]

SEQ ID NO: 86205 - protein, 226 aa, Arabidopsis thaliana; identical to SEQ ID NO: 48606
  peptide (1)..(226): Ceres Seq. ID no. 12687640
  misc_feature (1)..(197): Pfam Name: GDSL-like Lipase/Acylhydrolase Pfam Description: GDSL-like Lipase/Acylhydrolase
  misc_feature (1)..(226): Homolog of NCBI NO: 15218723 NR Description: lipase, putative; protein id: At1g28570.1 thaliana] >gi|10764860|gb|AAG22837.1|AC007508_14 F1K23.19
  misc_feature (1)..(222): Homolog of NCBI NO: 15218725 NR Description: lipase, putative; protein id: At1g28580.1, by cDNA: gi_13605564, supported by cDNA: gi_15027914, supported cDNA: gi_18491140, supported by cDNA: gi_19310790 [Arabidopsis
  misc_feature (1)..(218): Homolog of NCBI NO: 10764858 NR Description: F1K23.17 [Arabidopsis thaliana]
  misc_feature (1)..(218): Homolog of NCBI NO: 15218728 NR Description: lipase, putative; protein id: At1g28590.1
  misc_feature (1)..(226): Homolog of NCBI NO: 15225872 NR Description: putative lipase; protein id: At2g27360.1
  misc_feature (1)..(220): Homolog of NCBI NO: 12322540 NR Description: unknown protein [Arabidopsis thaliana]
  misc_feature (1)..(221): Homolog of NCBI NO: 25336243 NR Description: pnrotein F1K23.16 [imported] - Arabidopsis >gi|10764857|gb|AAG22835.1|AC007508_11 F1K23.16 [Arabidopsis
  misc_feature (1)..(225): Homolog of NCBI NO: 21593234 NR Description: lipase, putative [Arabidopsis thaliana]
  misc_feature (1)..(220): Homolog of NCBI NO: 30692564 NR Description: lipase, putative [Arabidopsis thaliana]
  misc_feature (1)..(220): Homolog of NCBI NO: 12597843 NR Description: lipase, putative [Arabidopsis thaliana]

SEQ ID NO: 86206 - DNA, 1409 bp, Arabidopsis thaliana
  misc_feature (1)..(1409): Ceres Seq. ID no. 12687641
  misc_feature: MA Experiment ID: 108434 Result: Down-regulated in Transcription
  misc_feature: MA Experiment 108434 PARAMETER Experiment Name: At_Root_Tips_cDNA_P Parameter: Tissue Value: Root Tips
  misc_feature: MA Experiment ID: 108435 Result: Down-regulated in Transcription
  misc_feature: MA Experiment 108435 PARAMETER Experiment Name: At_stm_Mutants_cDNA_P Parameter: Plant Line Value: wt Landsburg vs stm
  misc_feature: MA Experiment 108435 PARAMETER Experiment Name: At_stm_Mutants_cDNA_P Parameter: Tissue Value: Shoot Apical Meristem Region
  misc_feature: MA Experiment ID: 108473 Result: Down-regulated in Transcription
  misc_feature: MA Experiment 108473 PARAMETER Experiment Name: At_Drought_Flowers_cDNA_P Parameter: Timepoint (hr) Value: 7 d
  misc_feature: MA Experiment 108473 PARAMETER Experiment Name: At_Drought_Flowers_cDNA_P Parameter: Tissue Value: Flower
  misc_feature: MA Experiment 108473 PARAMETER Experiment Name: At_Drought_Flowers_cDNA_P Parameter: Treatment Value: Drought vs. No Drought
  misc_feature: MA Experiment ID: 108488 Result: Down-regulated in Transcription
  misc_feature: MA Experiment ID: 108569 Result: Up-regulated in Transcription
  misc_feature: MA Experiment 108569 PARAMETER Experiment Name: At_0.001%_MeJA__cDNA_P Parameter: Timepoint (hr) Value: 6
  misc_feature: MA Experiment 108569 PARAMETER Experiment Name: At_0.001%_MeJA__cDNA_P Parameter: Tissue Value: Aerial
  misc_feature: MA Experiment 108569 PARAMETER Experiment Name: At_0.001%_MeJA__cDNA_P Parameter: Treatment Value: 0.001% MeJA vs. No Treatment
  misc_feature: MA Experiment ID: 108576 Result: Down-regulated in Transcription
  misc_feature: MA Experiment 108576 PARAMETER Experiment Name: At_42deg_Heat_cDNA_P Parameter: Temperature (deg C) Value: 42 vs. 22
  misc_feature: MA Experiment 108576 PARAMETER Experiment Name: At_42deg_Heat_cDNA_P Parameter: Timepoint (hr) Value: 1
  misc_feature: MA Experiment 108576 PARAMETER Experiment Name: At_42deg_Heat_cDNA_P Parameter: Tissue Value: Aerial
  misc_feature: MA Experiment ID: 108579 Result: Up-regulated in Transcription
  misc_feature: MA Experiment 108579 PARAMETER Experiment Name: At_4deg_Cold_cDNA_P Parameter: Temperature (deg C) Value: 4 vs. 22
  misc_feature: MA Experiment 108579 PARAMETER Experiment Name: At_4deg_Cold_cDNA_P Parameter: Timepoint (hr) Value: 6
  misc_feature: MA Experiment 108579 PARAMETER Experiment Name: At_4deg_Cold_cDNA_P Parameter: Tissue Value: Aerial
  misc_feature: MA Experiment ID: 108595 Result: Down-regulated in Transcription
  misc_feature: MA Experiment 108595 PARAMETER Experiment Name: At_Ler-pi_Ovule_cDNA_P Parameter: Plant Line Value: null
  misc_feature: MA Experiment ID: 108667 Result: Up-regulated in Transcription
  misc_feature: MA Experiment 108667 PARAMETER Experiment Name: At_2mM_SA_cDNA_P Parameter: Plant Line Value: WS
  misc_feature: MA Experiment 108667 PARAMETER Experiment Name: At_2mM_SA_cDNA_P Parameter: Timepoint (hr) Value: 1
  misc_feature: MA Experiment 108667 PARAMETER Experiment Name: At_2mM_SA_cDNA_P Parameter: Treatment Value: 2mM SA vs. No Treatment
  misc_feature: MA Experiment ID: 20000070 Result: Up-regulated in Transcription
  misc_feature: MA Experiment 20000070 PARAMETER Experiment Name: At_100uM_ABA_Mutants_cDNA_P Parameter: Plant Line Value: CS24
  misc_feature: MA Experiment 20000070 PARAMETER Experiment Name: At_100uM_ABA_Mutants_cDNA_P Parameter: Timepoint (hr) Value: 6
  misc_feature: MA Experiment 20000070 PARAMETER Experiment Name: At_100uM_ABA_Mutants_cDNA_P Parameter: Tissue Value: Aerial
  misc_feature: MA Experiment 20000070 PARAMETER Experiment Name: At_100uM_ABA_Mutants_cDNA_P Parameter: Treatment Value: 100uM ABA vs. No Treatment
  misc_feature: MA Experiment ID: 20000088 Result: Up-regulated in Transcription
  misc_feature: MA Experiment 20000088 PARAMETER Experiment Name: At_100uM_ABA_Mutants_cDNA_P Parameter: Plant Line Value: Landsberg
  misc_feature: MA Experiment 20000088 PARAMETER Experiment Name: At_100uM_ABA_Mutants_cDNA_P Parameter: Timepoint (hr) Value: 6
  misc_feature: MA Experiment 20000088 PARAMETER Experiment Name: At_100uM_ABA_Mutants_cDNA_P Parameter: Tissue Value: Aerial
  misc_feature: MA Experiment 20000088 PARAMETER Experiment Name: At_100uM_ABA_Mutants_cDNA_P Parameter: Treatment Value: 100uM ABA vs. No Treatment
  misc_feature: MA Experiment ID: 20000093 Result: Down-regulated in Transcription
  misc_feature: MA Experiment 20000093 PARAMETER Experiment Name: At_42deg_Heat_cDNA_P Parameter: Temperature (deg C) Value: 42 vs. 22
  misc_feature: MA Experiment 20000093 PARAMETER Experiment Name: At_42deg_Heat_cDNA_P Parameter: Timepoint (hr) Value: 0.5
  misc_feature: MA Experiment 20000093 PARAMETER Experiment Name: At_42deg_Heat_cDNA_P Parameter: Tissue Value: Aerial
  misc_feature: MA Experiment ID: 20000111 Result: Down-regulated in Transcription
  misc_feature: MA Experiment 20000111 PARAMETER Experiment Name: At_42deg_Heat_cDNA_P Parameter: Temperature (deg C) Value: 42 vs. 22
  misc_feature: MA Experiment 20000111 PARAMETER Experiment Name: At_42deg_Heat_cDNA_P Parameter: Timepoint (hr) Value: 6
  misc_feature: MA Experiment 20000111 PARAMETER Experiment Name: At_42deg_Heat_cDNA_P Parameter: Tissue Value: Aerial
  misc_feature: MA Experiment ID: 20000112 Result: Down-regulated in Transcription
  misc_feature: MA Experiment 20000112 PARAMETER Experiment Name: At_42deg_Heat_cDNA_P Parameter: Temperature (deg C) Value: 42 vs. 22
  misc_feature: MA Experiment 20000112 PARAMETER Experiment Name: At_42deg_Heat_cDNA_P Parameter: Timepoint (hr) Value: 2
  misc_feature: MA Experiment 20000112 PARAMETER Experiment Name: At_42deg_Heat_cDNA_P Parameter: Tissue Value: Aerial
  misc_feature: MA Experiment ID: 20000113 Result: Down-regulated in Transcription
  misc_feature: MA Experiment 20000113 PARAMETER Experiment Name: At_42deg_Heat_cDNA_P Parameter: Temperature (deg C) Value: 42 vs. 22
  misc_feature: MA Experiment 20000113 PARAMETER Experiment Name: At_42deg_Heat_cDNA_P Parameter: Timepoint (hr) Value: 8
  misc_feature: MA Experiment 20000113 PARAMETER Experiment Name: At_42deg_Heat_cDNA_P Parameter: Tissue Value: Aerial
  misc_feature: MA Experiment ID: 20000144 Result: Down-regulated in Transcription
  misc_feature: MA Experiment 20000144 PARAMETER Experiment Name: At_42deg_Heat_cDNA_P Parameter: Temperature (deg C) Value: 42 vs. 22
  misc_feature: MA Experiment 20000144 PARAMETER Experiment Name: At_42deg_Heat_cDNA_P Parameter: Timepoint (hr) Value: 1
  misc_feature: MA Experiment 20000144 PARAMETER Experiment Name: At_42deg_Heat_cDNA_P Parameter: Tissue Value: Aerial
  misc_feature: MA Experiment ID: 20000171 Result: Down-regulated in Transcription
  misc_feature: MA Experiment 20000171 PARAMETER Experiment Name: At_42deg_Heat_P Parameter: Age (day) Value: 14
  misc_feature: MA Experiment 20000171 PARAMETER Experiment Name: At_42deg_Heat_P Parameter: Organism Value: A. thaliana
  misc_feature: MA Experiment 20000171 PARAMETER Experiment Name: At_42deg_Heat_P Parameter: Plant Line Value: WS
  misc_feature: MA Experiment 20000171 PARAMETER Experiment Name: At_42deg_Heat_P Parameter: Temperature (deg C) Value: 42 vs. 22
  misc_feature: MA Experiment 20000171 PARAMETER Experiment Name: At_42deg_Heat_P Parameter: Timepoint (hr) Value: 1
  misc_feature: MA Experiment 20000171 PARAMETER Experiment Name: At_42deg_Heat_P Parameter: Tissue Value: Aerial
  misc_feature: MA Experiment ID: 20000173 Result: Down-regulated in Transcription
  misc_feature: MA Experiment 20000173 PARAMETER Experiment Name: At_42deg_Heat_P Parameter: Age (day) Value: 14
  misc_feature: MA Experiment 20000173 PARAMETER Experiment Name: At_42deg_Heat_P Parameter: Organism Value: A. thaliana
  misc_feature: MA Experiment 20000173 PARAMETER Experiment Name: At_42deg_Heat_P Parameter: Plant Line Value: WS
  misc_feature: MA Experiment 20000173 PARAMETER Experiment Name: At_42deg_Heat_P Parameter: Temperature (deg C) Value: 42 vs. 22
  misc_feature: MA Experiment 20000173 PARAMETER Experiment Name: At_42deg_Heat_P Parameter: Timepoint (hr) Value: 6
  misc_feature: MA Experiment 20000173 PARAMETER Experiment Name: At_42deg_Heat_P Parameter: Tissue Value: Aerial
  misc_feature: MA Experiment ID: 20000185 Result: Down-regulated in Transcription
  misc_feature: MA Experiment 20000185 PARAMETER Experiment Name: At_Roots__P Parameter: Age (day) Value: 7 vs. 21
  misc_feature: MA Experiment 20000185 PARAMETER Experiment Name: At_Roots__P Parameter: Organism Value: A. thaliana
  misc_feature: MA Experiment 20000185 PARAMETER Experiment Name: At_Roots__P Parameter: Tissue Value: Roots vs. Whole Plant
  misc_feature: MA Experiment ID: 20000213 Result: Up-regulated in Transcription
  misc_feature: MA Experiment 20000213 PARAMETER Experiment Name: At_4deg_Cold_P Parameter: Timepoint (hr) Value: 2
  misc_feature: MA Experiment ID: 20000224 Result: Up-regulated in Transcription
  misc_feature: MA Experiment ID: 20000234 Result: Down-regulated in Transcription
  misc_feature: MA Experiment 20000234 PARAMETER Experiment Name: At_Siliques_P Parameter: Age (day) Value: 21
  misc_feature: MA Experiment 20000234 PARAMETER Experiment Name: At_Siliques_P Parameter: Organism Value: A. thaliana
  misc_feature: MA Experiment 20000234 PARAMETER Experiment Name: At_Siliques_P Parameter: Plant Line Value: WS
  misc_feature: MA Experiment 20000234 PARAMETER Experiment Name: At_Siliques_P Parameter: Tissue Value: Less Than 5mm Siliques vs. Whole Plant
  misc_feature: MA Experiment ID: 20000235 Result: Down-regulated in Transcription
  misc_feature: MA Experiment 20000235 PARAMETER Experiment Name: At_Siliques_P Parameter: Age (day) Value: 21
  misc_feature: MA Experiment 20000235 PARAMETER Experiment Name: At_Siliques_P Parameter: Organism Value: A. thaliana
  misc_feature: MA Experiment 20000235 PARAMETER Experiment Name: At_Siliques_P Parameter: Plant Line Value: WS
  misc_feature: MA Experiment 20000235 PARAMETER Experiment Name: At_Siliques_P Parameter: Tissue Value: 5-10mm Siliques vs. Whole Plant
  misc_feature: MA Experiment ID: 20000439 Result: Down-regulated in Transcription
  misc_feature: MA Experiment 20000439 PARAMETER Experiment Name: At_Roots__P Parameter: Age (day) Value: 14 vs. 21
  misc_feature: MA Experiment 20000439 PARAMETER Experiment Name: At_Roots__P Parameter: Organism Value: A. thaliana
  misc_feature: MA Experiment 20000439 PARAMETER Experiment Name: At_Roots__P Parameter: Tissue Value: Roots vs. Whole Plant
  misc_feature: MA Experiment ID: 20000495 Result: Down-regulated in Transcription
  misc_feature: MA Experiment 20000495 PARAMETER Experiment Name: At_Guard_Cells_P Parameter: Harvest Date Value: 8/2/2002
  misc_feature: MA Experiment 20000495 PARAMETER Experiment Name: At_Guard_Cells_P Parameter: Organism Value: A. thaliana
  misc_feature: MA Experiment 20000495 PARAMETER Experiment Name: At_Guard_Cells_P Parameter: Tissue Value: Guard Cells vs. Leaves
  misc_feature: MA Experiment ID: 20001248 Result: Down-regulated in Transcription
  misc_feature: MA Experiment 20001248 PARAMETER Experiment Name: At_Far-red-induction_P Parameter: Age (day) Value: 7
  misc_feature: MA Experiment 20001248 PARAMETER Experiment Name: At_Far-red-induction_P Parameter: Light Value: Far-red vs. White
  misc_feature: MA Experiment 20001248 PARAMETER Experiment Name: At_Far-red-induction_P Parameter: Organism Value: A. thaliana
  misc_feature: MA Experiment 20001248 PARAMETER Experiment Name: At_Far-red-induction_P Parameter: Plant Line Value: Columbia
  misc_feature: MA Experiment 20001248 PARAMETER Experiment Name: At_Far-red-induction_P Parameter: Timepoint (hr) Value: 4
  misc_feature: MA Experiment 20001248 PARAMETER Experiment Name: At_Far-red-induction_P Parameter: Tissue Value: Whole Plant
  misc_feature: MA Experiment ID: 20001450 Result: Down-regulated in Transcription
  misc_feature: MA Experiment 20001450 PARAMETER Experiment Name: At_Far-red-induction_P Parameter: Age (day) Value: 7
  misc_feature: MA Experiment 20001450 PARAMETER Experiment Name: At_Far-red-induction_P Parameter: Light Value: Far-red vs. White
  misc_feature: MA Experiment 20001450 PARAMETER Experiment Name: At_Far-red-induction_P Parameter: Organism Value: A. thaliana
  misc_feature: MA Experiment 20001450 PARAMETER Experiment Name: At_Far-red-induction_P Parameter: Plant Line Value: Columbia
  misc_feature: MA Experiment 20001450 PARAMETER Experiment Name: At_Far-red-induction_P Parameter: Timepoint (hr) Value: 8
  misc_feature: MA Experiment 20001450 PARAMETER Experiment Name: At_Far-red-induction_P Parameter: Tissue Value: Whole Plant
  misc_feature: MA Experiment ID: 20001451 Result: Down-regulated in Transcription
  misc_feature: MA Experiment 20001451 PARAMETER Experiment Name: At_Far-red-induction_P Parameter: Age (day) Value: 7
  misc_feature: MA Experiment 20001451 PARAMETER Experiment Name: At_Far-red-induction_P Parameter: Light Value: Far-red vs. White
  misc_feature: MA Experiment 20001451 PARAMETER Experiment Name: At_Far-red-induction_P Parameter: Organism Value: A. thaliana
  misc_feature: MA Experiment 20001451 PARAMETER Experiment Name: At_Far-red-induction_P Parameter: Plant Line Value: Columbia
  misc_feature: MA Experiment 20001451 PARAMETER Experiment Name: At_Far-red-induction_P Parameter: Timepoint (hr) Value: 24
  misc_feature: MA Experiment 20001451 PARAMETER Experiment Name: At_Far-red-induction_P Parameter: Tissue Value: Whole Plant
  misc_feature: MA Experiment ID: 20001558 Result: Up-regulated in Transcription
  misc_feature: MA Experiment 20001558 PARAMETER Experiment Name: At_Drought_Soil_Dry_P Parameter: Age (day) Value: 27
  misc_feature: MA Experiment 20001558 PARAMETER Experiment Name: At_Drought_Soil_Dry_P Parameter: Organism Value: A. thaliana
  misc_feature: MA Experiment 20001558 PARAMETER Experiment Name: At_Drought_Soil_Dry_P Parameter: Plant Line Value: WS
  misc_feature: MA Experiment 20001558 PARAMETER Experiment Name: At_Drought_Soil_Dry_P Parameter: Post Timepoint (hr) Value: 6
  misc_feature: MA Experiment 20001558 PARAMETER Experiment Name: At_Drought_Soil_Dry_P Parameter: Post-Treatment Value: Re-Water vs. No Drought
  misc_feature: MA Experiment 20001558 PARAMETER Experiment Name: At_Drought_Soil_Dry_P Parameter: Timepoint (day) Value: 13
  misc_feature: MA Experiment 20001558 PARAMETER Experiment Name: At_Drought_Soil_Dry_P Parameter: Treatment Value: Drought vs. No Drought
  misc_feature: MA Experiment ID: 20001757 Result: Down-regulated in Transcription
  misc_feature: MA Experiment 20001757 PARAMETER Experiment Name: At_50mM_NH4NO3_L-to-H_P Parameter: Timepoint (hr) Value: 6
  misc_feature: MA Experiment 20001757 PARAMETER Experiment Name: At_50mM_NH4NO3_L-to-H_P Parameter: Tissue Value: Leaf
  misc_feature: MA Experiment 20001757 PARAMETER Experiment Name: At_50mM_NH4NO3_L-to-H_P Parameter: Treatment Value: 50mM NH4NO3 vs 100mM Mannitol
  misc_feature: MA Experiment ID: 20001761 Result: Down-regulated in Transcription
  misc_feature: MA Experiment 20001761 PARAMETER Experiment Name: At_50mM_NH4NO3_L-to-H_P Parameter: Timepoint (hr) Value: 4
  misc_feature: MA Experiment 20001761 PARAMETER Experiment Name: At_50mM_NH4NO3_L-to-H_P Parameter: Tissue Value: Siliques
  misc_feature: MA Experiment 20001761 PARAMETER Experiment Name: At_50mM_NH4NO3_L-to-H_P Parameter: Treatment Value: 50mM NH4NO3 vs 100mM Mannitol
aaaataaaaaaaaataagatagaaactcactcctgacctctcgcatggcgtctctagactctctagtcatctttcttttttctactctttttgtcactatcgtgagctcggaaacgccgtgcccgaatttcaagtcgatcatcagtttcggcgattcgattgcggacacgggaaacttggttggtctctctgatcgtaaccagcttcctgtgactgcgtttccaccgtacggagaaaccttcttccaccacccaaccggtcgttcctgcgatggccgcatcatcatggactttatcgctgaatttgtggggcttccttatgtgcctccgtactttggatctaaaaatagaaactttgataagggtgttaatttcgcggtagccggagcaacggcactgaaaagttcctttcttaagaagagaggaattcaaccacacaccaacgttagtttaggagttcagctaaagagcttcaaaaagagtttaccaaatttatgcggctcaccatcagactgtagagatatgattggaaatgctttgattctcatgggagagattggagggaatgattataatttcccattcttcaaccgcaaacccgttaaggaagttgaagagctggttccatttgtaatcgcttctatttcttctacaataacggagttgattggtatggggggtaaaacctttctagtgcccggagagttccctatcggatgctcagtagtctatttgacattatacaaaacatcaaacaaggacgaatacgatccttcaacaggatgtttgaaatggttgaacaagtttggcgaataccatagcgagaaacttaaggtggaactcaacagacttaggaagctctaccctcatgtcaacatcatatacgctgactactacaactctctcttgcgcatttttaaagaaccagccaaattcgggttcatggaaagacccttccctgcttgttgcggtataggaggaccgtacaacttcaacttcactaggaaatgtgggagtgtaggagtgaaatcttgtaaggatccttcaaagtatgtgggctgggatggcgttcatatgactgaggctgcatacaaatggatagctgatggaatactcaatggaccatatgcgaatcctccttttgatcggtcctgcctcagatctgagattaagaaggagtcattgtacaatcaaagtactctgacacaagcttgtgtgaaactttgacagacaaaagtgatgataagaatattccctctattccttattaatccaaattcaagcaaacaaatttgttgcaaaaaagatatgtttctaggtttctatgtatttttttattacttattgatgatgaattgtagaccttaattttctttttcttttttacttttattggtttaaatttgttaa

SEQ ID NO: 86207 - protein, 393 aa, Arabidopsis thaliana; identical to SEQ ID NO: 23923
  peptide (1)..(393): Ceres Seq. ID no. 12687642
  misc_feature (32)..(356): Pfam Name: GDSL-like Lipase/Acylhydrolase Pfam Description: GDSL-like Lipase/Acylhydrolase
  misc_feature (1)..(393): Homolog of NCBI NO: 15218731 NR Description: lipase, putative; protein id: At1g28600.1, by cDNA: 37307., supported by cDNA: gi_14326569 [Arabidopsis >gi|14326570|gb|AAK60329.1|AF385739_1 At1g28600/F1K23_6
  misc_feature (1)..(393): Homolog of NCBI NO: 21593234 NR Description: lipase, putative [Arabidopsis thaliana]
  misc_feature (1)..(385): Homolog of NCBI NO: 10764858 NR Description: F1K23.17 [Arabidopsis thaliana]
  misc_feature (1)..(380): Homolog of NCBI NO: 25336243 NR Description: pnrotein F1K23.16 [imported] - Arabidopsis >gi|10764857|gb|AAG22835.1|AC007508_11 F1K23.16 [Arabidopsis
  misc_feature (1)..(393): Homolog of NCBI NO: 10764858 NR Description: F1K23.17 [Arabidopsis thaliana]
  misc_feature (1)..(393): Homolog of NCBI NO: 15218728 NR Description: lipase, putative; protein id: At1g28590.1
  misc_feature (1)..(380): Homolog of NCBI NO: 12322540 NR Description: unknown protein [Arabidopsis thaliana]
  misc_feature (1)..(380): Homolog of NCBI NO: 30692564 NR Description: lipase, putative [Arabidopsis thaliana]
  misc_feature (1)..(380): Homolog of NCBI NO: 12597843 NR Description: lipase, putative [Arabidopsis thaliana]
  misc_feature (4)..(376): Homolog of NCBI NO: 15218725 NR Description: lipase, putative; protein id: At1g28580.1, by cDNA: gi_13605564, supported by cDNA: gi_15027914, supported cDNA: gi_18491140, supported by cDNA: gi_19310790 [Arabidopsis

SEQ ID NO: 86208 - protein, 313 aa, Arabidopsis thaliana; identical to SEQ ID NO: 23924
  peptide (1)..(313): Ceres Seq. ID no. 12687643
  misc_feature (1)..(276): Pfam Name: GDSL-like Lipase/Acylhydrolase Pfam Description: GDSL-like Lipase/Acylhydrolase
  misc_feature (1)..(313): Homolog of NCBI NO: 15218731 NR Description: lipase, putative; protein id: At1g28600.1, by cDNA: 37307., supported by cDNA: gi_14326569 [Arabidopsis >gi|14326570|gb|AAK60329.1|AF385739_1 At1g28600/F1K23_6
  misc_feature (1)..(313): Homolog of NCBI NO: 21593234 NR Description: lipase, putative [Arabidopsis thaliana]
  misc_feature (1)..(305): Homolog of NCBI NO: 10764858 NR Description: F1K23.17 [Arabidopsis thaliana]
  misc_feature (1)..(300): Homolog of NCBI NO: 25336243 NR Description: pnrotein F1K23.16 [imported] - Arabidopsis >gi|10764857|gb|AAG22835.1|AC007508_11 F1K23.16 [Arabidopsis
  misc_feature (1)..(313): Homolog of NCBI NO: 10764858 NR Description: F1K23.17 [Arabidopsis thaliana]
  misc_feature (1)..(313): Homolog of NCBI NO: 15218728 NR Description: lipase, putative; protein id: At1g28590.1
  misc_feature (1)..(300): Homolog of NCBI NO: 12322540 NR Description: unknown protein [Arabidopsis thaliana]
  misc_feature (1)..(300): Homolog of NCBI NO: 30692564 NR Description: lipase, putative [Arabidopsis thaliana]
  misc_feature (1)..(300): Homolog of NCBI NO: 12597843 NR Description: lipase, putative [Arabidopsis thaliana]
  misc_feature (1)..(296): Homolog of NCBI NO: 15218725 NR Description: lipase, putative; protein id: At1g28580.1, by cDNA: gi_13605564, supported by cDNA: gi_15027914, supported cDNA: gi_18491140, supported by cDNA: gi_19310790 [Arabidopsis

SEQ ID NO: 86209 - protein, 234 aa, Arabidopsis thaliana; identical to SEQ ID NO: 23925
  peptide (1)..(234): Ceres Seq. ID no. 12687644
  misc_feature (1)..(197): Pfam Name: GDSL-like Lipase/Acylhydrolase Pfam Description: GDSL-like Lipase/Acylhydrolase
  misc_feature (1)..(234): Homolog of NCBI NO: 15218731 NR Description: lipase, putative; protein id: At1g28600.1, by cDNA: 37307., supported by cDNA: gi_14326569 [Arabidopsis >gi|14326570|gb|AAK60329.1|AF385739_1 At1g28600/F1K23_6
  misc_feature (1)..(234): Homolog of NCBI NO: 21593234 NR Description: lipase, putative [Arabidopsis thaliana]
  misc_feature (1)..(226): Homolog of NCBI NO: 10764858 NR Description: F1K23.17 [Arabidopsis thaliana]
  misc_feature (1)..(221): Homolog of NCBI NO: 25336243 NR Description: pnrotein F1K23.16 [imported] - Arabidopsis >gi|10764857|gb|AAG22835.1|AC007508_11 F1K23.16 [Arabidopsis
  misc_feature (1)..(234): Homolog of NCBI NO: 10764858 NR Description: F1K23.17 [Arabidopsis thaliana]
  misc_feature (1)..(234): Homolog of NCBI NO: 15218728 NR Description: lipase, putative; protein id: At1g28590.1
  misc_feature (1)..(221): Homolog of NCBI NO: 12322540 NR Description: unknown protein [Arabidopsis thaliana]
  misc_feature (1)..(221): Homolog of NCBI NO: 30692564 NR Description: lipase, putative [Arabidopsis thaliana]
  misc_feature (1)..(221): Homolog of NCBI NO: 12597843 NR Description: lipase, putative [Arabidopsis thaliana]
  misc_feature (1)..(217): Homolog of NCBI NO: 15218725 NR Description: lipase, putative; protein id: At1g28580.1, by cDNA: gi_13605564, supported by cDNA: gi_15027914, supported cDNA: gi_18491140, supported by cDNA: gi_19310790 [Arabidopsis

SEQ ID NO: 86210 - DNA, 2343 bp, Arabidopsis thaliana
  misc_feature (1)..(2343): Ceres Seq. ID no. 12687655
  misc_feature: MA Experiment ID: 20000440 Result: Up-regulated in Transcription
  misc_feature: MA Experiment 20000440 PARAMETER Experiment Name: At_Closed-Flower__Sub_P Parameter: Tissue Value: Closed Flower vs. Whole Plant
atgccactttgcaataatttctccggcaatctcgtcgtcgccgttgctctcttctttgccggcgccctatatatcttcaactaccaaaactatgtcaacactctgagaacaacacagtatccggtagatgagctagaggcggccttgtatacggcagccgccggaaacaacaagacggtgataataacgatggtgaacaaagcgtacgtgaaggaggttggaagagggagtacgatgcttgatctgtttttggagagtttttgggaaggagaagggactctaccacttttggaccatctaatggtggtggcagtggatcaaacggcctatgatcgctgccgtttcaagaggcttcactgctacaagatggagactgaagatggggttgacttagagggagagaaagtattcatgtcaaaagatttcattgagatgatgtggagaaggactcgcttgatcctagacgttcttcgtcgtggctacaatgttattttcacggacacggacgtgatgtggctaaggagtccattgtctcggttaaacatgagcttggatatgcaaataagcgtggacagaattaacgtgggaggacagttgatcaacacgggattctaccacgtccggtctaacaacaagaccatctcactcttccaaaaatggtacgacatgaggctaaactcgacggggatgaaggaacaagacgttctcaagaatctcctagactccggcttcttcaaccagttaggtctcaacgttggcttccttagtaccaccgaattcagcggtttttgccaagacagtcctcacatgggcgttgtcactaccgtccatgctaactgctgcctccacatccctgccaaagtctttgatctcactcgtgttcttcgtgattggaaacgctacaaagcgtcacatgtcaacagcaaatggagccctcatcttaagtctaatgtaagcatgagaatcttcagattcacgtcaatctcaccgcggattttgccgtcgaatcattactcaacattcccgttgaaacaaaacgtgtcttctctctcaccggcgaaatacattgcgggagctttacaagaacatatcaattctccggccccaaaagctggtaagaagatacacgcagatatcatcaaaactgggtttcaaccagatttgaatatatccatcaaactactcattcttcatttaaaatgcggttgcttgagttatgcacgccaagtgttcgacgaattacccaagccaacattatcggcttacaactacatgattagtgggtacttgaagcatggattggtaaaggaattacttcttctagttcaacggatgtcatactctggggaaaaggcagatgggtacacgctttccatggttctaaaggcttctaatagtcgtggctcgactatgatactgccgcgtagcttatgtaggttggtccatgcccggattataaaatgtgatgttgagctagatgatgtgttgattactgcacttgttgatacttatgtgaagagtgggaagttggagtctgcaaggactgtgtttgaaacaatgaaagatgagaatgttgtgtgttgtacatcaatgatctcaggttacatgaatcaaggttttgtagaggatgcggaagagattttcaatactaccaaagtgaaggatattgtagtttacaatgctatggtggaaggtttcagcagatcaggtgaaactgctaagagatcagttgacatgtatatttcgatgcaacgagctggtttccatccgaatatttcaactttcgctagcgtgattggagcgtgttcggttttgacgtcccatgaagttggtcagcaagtgcacgctcagattatgaagagtggagtttacacgcatatcaaaatggggagctctttgttagacatgtatgccaaatgcggagggatcaatgatgcaagaagagtctttgaccaaatgcaagagaaaaacgtattttcgtggacttcgatgattgatggatatggaaagaatggaaaccctgaggaagcactcgaactcttcactaggatgaaggaattccgtatagaacccaattatgtaacctttcttggtgctctctctgcttgttcacattctggtttagtcgataaaggttatgagatctttgagagcatgcagagagattattccatgaaaccaaagatggaacactatgcttgcatagttgatctcatgggacgagctggagatttgaataaagctttcgaatttgctagggcgatgccggaaaggcctgactcagatatttggctcttctcagttcttgtaatttgcatggtaatgttgaactcgcaagcatag

SEQ ID NO: 86211 - protein, 780 aa, Arabidopsis thaliana
  peptide (1)..(780): Ceres Seq. ID no. 12687656
  misc_feature (659)..(693): Pfam Name: PPR repeat Pfam Description: PPR repeat
  misc_feature (370)..(445): Homolog of NCBI NO: 15218760 NR Description: hypothetical protein; protein id: At1g28690.1
  misc_feature (5)..(321): Homolog of NCBI NO: 25372968 NR Description: protein F1K23.10 [imported] - Arabidopsis >gi|10764853|gb|AAG22833.1|AC007508_6 F1K23.10 [Arabidopsis
  misc_feature (1)..(315): Homolog of NCBI NO: 18396892 NR Description: expressed protein; protein id: At1g28710.1, by cDNA: gi_15027990, supported by cDNA: gi_20259204 [Arabidopsis >gi|10764852|gb|AAG22832.1|AC007508_5 F1K23.9 [Arabidopsis
  misc_feature (5)..(152): Homolog of NCBI NO: 15218762 NR Description: hypothetical protein common family; protein id:
  misc_feature (167)..(321): Homolog of NCBI NO: 15218762 NR Description: hypothetical protein common family; protein id:
  misc_feature (350)..(764): Homolog of NCBI NO: 34896270 NR Description: hypothetical protein [Oryza sativa]
  misc_feature (372)..(764): Homolog of NCBI NO: 9294596 NR Description: gb|AAC35225.1~gene_id:MVC8.5~strong similarity to
  misc_feature (372)..(764): Homolog of NCBI NO: 15233234 NR Description: hypothetical protein; protein id: At3g15930.1
  misc_feature (524)..(779): Homolog of NCBI NO: 38423978 NR Description: PPR-repeat protein-like [Oryza sativa (japonica
  misc_feature (344)..(548): Homolog of NCBI NO: 38423978 NR Description: PPR-repeat protein-like [Oryza sativa (japonica
MPLCNNFSGNLVVAVALFFAGALYIFNYQNYVNTLRTTQYPVDELEAALYTAAAGNNKTVIITMVNKAYVKEVGRGSTMLDLFLESFWEGEGTLPLLDHLMVVAVDQTAYDRCRFKRLHCYKMETEDGVDLEGEKVFMSKDFIEMMWRRTRLILDVLRRGYNVIFTDTDVMWLRSPLSRLNMSLDMQISVDRINVGGQLINTGFYHVRSNNKTISLFQKWYDMRLNSTGMKEQDVLKNLLDSGFFNQLGLNVGFLSTTEFSGFCQDSPHMGVVTTVHANCCLHIPAKVFDLTRVLRDWKRYKASHVNSKWSPHLKSNVSMRIFRFTSISPRILPSNHYSTFPLKQNVSSLSPAKYIAGALQEHINSPAPKAGKKIHADIIKTGFQPDLNISIKLLILHLKCGCLSYARQVFDELPKPTLSAYNYMISGYLKHGLVKELLLLVQRMSYSGEKADGYTLSMVLKASNSRGSTMILPRSLCRLVHARIIKCDVELDDVLITALVDTYVKSGKLESARTVFETMKDENVVCCTSMISGYMNQGFVEDAEEIFNTTKVKDIVVYNAMVEGFSRSGETAKRSVDMYISMQRAGFHPNISTFASVIGACSVLTSHEVGQQVHAQIMKSGVYTHIKMGSSLLDMYAKCGGINDARRVFDQMQEKNVFSWTSMIDGYGKNGNPEEALELFTRMKEFRIEPNYVTFLGALSACSHSGLVDKGYEIFESMQRDYSMKPKMEHYACIVDLMGRAGDLNKAFEFARAMPERPDSDIWLFSVLVICMVMLNSQA

SEQ ID NO: 86212 - protein, 717 aa, Arabidopsis thaliana
  peptide (1)..(717): Ceres Seq. ID no. 12687657
  misc_feature (596)..(630): Pfam Name: PPR repeat Pfam Description: PPR repeat
  misc_feature (307)..(382): Homolog of NCBI NO: 15218760 NR Description: hypothetical protein; protein id: At1g28690.1
  misc_feature (1)..(258): Homolog of NCBI NO: 25372968 NR Description: protein F1K23.10 [imported] - Arabidopsis >gi|10764853|gb|AAG22833.1|AC007508_6 F1K23.10 [Arabidopsis
  misc_feature (1)..(252): Homolog of NCBI NO: 18396892 NR Description: expressed protein; protein id: At1g28710.1, by cDNA: gi_15027990, supported by cDNA: gi_20259204 [Arabidopsis >gi|10764852|gb|AAG22832.1|AC007508_5 F1K23.9 [Arabidopsis
  misc_feature (1)..(89): Homolog of NCBI NO: 15218762 NR Description: hypothetical protein common family; protein id:
  misc_feature (104)..(258): Homolog of NCBI NO: 15218762 NR Description: hypothetical protein common family; protein id:
  misc_feature (287)..(701): Homolog of NCBI NO: 34896270 NR Description: hypothetical protein [Oryza sativa]
  misc_feature (309)..(701): Homolog of NCBI NO: 9294596 NR Description: gb|AAC35225.1~gene_id:MVC8.5~strong similarity to
  misc_feature (309)..(701): Homolog of NCBI NO: 15233234 NR Description: hypothetical protein; protein id: At3g15930.1
  misc_feature (461)..(716): Homolog of NCBI NO: 38423978 NR Description: PPR-repeat protein-like [Oryza sativa (japonica
  misc_feature (281)..(485): Homolog of NCBI NO: 38423978 NR Description: PPR-repeat protein-like [Oryza sativa (japonica
MVNKAYVKEVGRGSTMLDLFLESFWEGEGTLPLLDHLMVVAVDQTAYDRCRFKRLHCYKMETEDGVDLEGEKVFMSKDFIEMMWRRTRLILDVLRRGYNVIFTDTDVMWLRSPLSRLNMSLDMQISVDRINVGGQLINTGFYHVRSNNKTISLFQKWYDMRLNSTGMKEQDVLKNLLDSGFFNQLGLNVGFLSTTEFSGFCQDSPHMGVVTTVHANCCLHIPAKVFDLTRVLRDWKRYKASHVNSKWSPHLKSNVSMRIFRFTSISPRILPSNHYSTFPLKQNVSSLSPAKYIAGALQEHINSPAPKAGKKIHADIIKTGFQPDLNISIKLLILHLKCGCLSYARQVFDELPKPTLSAYNYMISGYLKHGLVKELLLLVQRMSYSGEKADGYTLSMVLKASNSRGSTMILPRSLCRLVHARIIKCDVELDDVLITALVDTYVKSGKLESARTVFETMKDENVVCCTSMISGYMNQGFVEDAEEIFNTTKVKDIVVYNAMVEGFSRSGETAKRSVDMYISMQRAGFHPNISTFASVIGACSVLTSHEVGQQVHAQIMKSGVYTHIKMGSSLLDMYAKCGGINDARRVFDQMQEKNVFSWTSMIDGYGKNGNPEEALELFTRMKEFRIEPNYVTFLGALSACSHSGLVDKGYEIFESMQRDYSMKPKMEHYACIVDLMGRAGDLNKAFEFARAMPERPDSDIWLFSVLVICMVMLNSQA

SEQ ID NO: 86213 - protein, 702 aa, Arabidopsis thaliana
  peptide (1)..(702): Ceres Seq. ID no. 12687658
  misc_feature (581)..(615): Pfam Name: PPR repeat Pfam Description: PPR repeat
  misc_feature (292)..(367): Homolog of NCBI NO: 15218760 NR Description: hypothetical protein; protein id: At1g28690.1
  misc_feature (1)..(243): Homolog of NCBI NO: 25372968 NR Description: protein F1K23.10 [imported] - Arabidopsis >gi|10764853|gb|AAG22833.1|AC007508_6 F1K23.10 [Arabidopsis
  misc_feature (1)..(237): Homolog of NCBI NO: 18396892 NR Description: expressed protein; protein id: At1g28710.1, by cDNA: gi_15027990, supported by cDNA: gi_20259204 [Arabidopsis >gi|10764852|gb|AAG22832.1|AC007508_5 F1K23.9 [Arabidopsis
  misc_feature (1)..(74): Homolog of NCBI NO: 15218762 NR Description: hypothetical protein common family; protein id:
  misc_feature (89)..(243): Homolog of NCBI NO: 15218762 NR Description: hypothetical protein common family; protein id:
  misc_feature (272)..(686): Homolog of NCBI NO: 34896270 NR Description: hypothetical protein [Oryza sativa]
  misc_feature (294)..(686): Homolog of NCBI NO: 9294596 NR Description: gb|AAC35225.1~gene_id:MVC8.5~strong similarity to
  misc_feature (294)..(686): Homolog of NCBI NO: 15233234 NR Description: hypothetical protein; protein id: At3g15930.1
  misc_feature (446)..(701): Homolog of NCBI NO: 38423978 NR Description: PPR-repeat protein-like [Oryza sativa (japonica
  misc_feature (266)..(470): Homolog of NCBI NO: 38423978 NR Description: PPR-repeat protein-like [Oryza sativa (japonica
MLDLFLESFWEGEGTLPLLDHLMVVAVDQTAYDRCRFKRLHCYKMETEDGVDLEGEKVFMSKDFIEMMWRRTRLILDVLRRGYNVIFTDTDVMWLRSPLSRLNMSLDMQISVDRINVGGQLINTGFYHVRSNNKTISLFQKWYDMRLNSTGMKEQDVLKNLLDSGFFNQLGLNVGFLSTTEFSGFCQDSPHMGVVTTVHANCCLHIPAKVFDLTRVLRDWKRYKASHVNSKWSPHLKSNVSMRIFRFTSISPRILPSNHYSTFPLKQNVSSLSPAKYIAGALQEHINSPAPKAGKKIHADIIKTGFQPDLNISIKLLILHLKCGCLSYARQVFDELPKPTLSAYNYMISGYLKHGLVKELLLLVQRMSYSGEKADGYTLSMVLKASNSRGSTMILPRSLCRLVHARIIKCDVELDDVLITALVDTYVKSGKLESARTVFETMKDENVVCCTSMISGYMNQGFVEDAEEIFNTTKVKDIVVYNAMVEGFSRSGETAKRSVDMYISMQRAGFHPNISTFASVIGACSVLTSHEVGQQVHAQIMKSGVYTHIKMGSSLLDMYAKCGGINDARRVFDQMQEKNVFSWTSMIDGYGKNGNPEEALELFTRMKEFRIEPNYVTFLGALSACSHSGLVDKGYEIFESMQRDYSMKPKMEHYACIVDLMGRAGDLNKAFEFARAMPERPDSDIWLFSVLVICMVMLNSQA

SEQ ID NO: 86214 - DNA, 1017 bp, Arabidopsis thaliana
  misc_feature (1)..(1017): Ceres Seq. ID no. 12687659
  misc_feature: MA Experiment ID: 20000440 Result: Up-regulated in Transcription
  misc_feature: MA Experiment 20000440 PARAMETER Experiment Name: At_Closed-Flower__Sub_P Parameter: Tissue Value: Closed Flower vs. Whole Plant
atgacttcctacaataactcctccggcagtctcgccctggccgttgctcttctatttgccggcgccttatatatctacttctcatcacgttcagcttctgatcccatctccggtctcctacaaaatgtcaacactagattgatacagtatccggtggacgagctagagacggtgctggacaaggcgtcgacagggaacaacaagacggtgataatagcaatggtgaacaaagcttacgtggaggaggatggaggagggaggacgatgctggatctgtttttggagagtttttgggaaggagaggggacacgcccgcttcttaaccatctgatggtggttgcagcggatcagacggcctacgatcgctgcctcttcaggaggctccattgctacaagatggatacggaaggggttgacttggagggagagaaagtatacatgtcaaaagatttcatagagatgatgtggaggaggactcgcttgctcctagacgtcctcagccgcggctaccatattattttcacggatacggacgtgatgtggctaaggagtcccttgtcccggctaaacgtgagcttggatatgcatataagcgtggacagaaataacgtgagaggacaattgatcaacacgggattctaccatgcccggtccaacaacaagaccatctccctcttccagaaatggtacgacatgaggctcaagtctttgggcatgaaggaacaagacgtcctcaagaatctcctagactctggcttctttaaccagcttggtctcaacgttggcttcctcagtacggccgaattcagcggtttctgccaagacagccctgacatgggggctgtcacaaccgtccacgccaactgttgcgtccacatccctgctaagatctctgatctcagtcttgctcttcgtgactggaaacgctacaaagcctcccgtgtcaacagcaggtggagcccccatgttgagtgcaggcgttcatggaaggacgttcattatgtccccaagctctga

SEQ ID NO: 86215 - protein, 338 aa, Arabidopsis thaliana
  peptide (1)..(338): Ceres Seq. ID no. 12687660
  misc_feature (1)..(338): Homolog of NCBI NO: 25372968 NR Description: protein F1K23.10 [imported] - Arabidopsis >gi|10764853|gb|AAG22833.1|AC007508_6 F1K23.10 [Arabidopsis
  misc_feature (1)..(172): Homolog of NCBI NO: 15218762 NR Description: hypothetical protein common family; protein id:
  misc_feature (176)..(338): Homolog of NCBI NO: 15218762 NR Description: hypothetical protein common family; protein id:
  misc_feature (1)..(338): Homolog of NCBI NO: 18396892 NR Description: expressed protein; protein id: At1g28710.1, by cDNA: gi_15027990, supported by cDNA: gi_20259204 [Arabidopsis >gi|10764852|gb|AAG22832.1|AC007508_5 F1K23.9 [Arabidopsis
  misc_feature (5)..(325): Homolog of NCBI NO: 6691205 NR Description: F1K23.11 [Arabidopsis thaliana]
  misc_feature (74)..(324): Homolog of NCBI NO: 15218760 NR Description: hypothetical protein; protein id: At1g28690.1
  misc_feature (37)..(325): Homolog of NCBI NO: 21536907 NR Description: regulatory protein [Arabidopsis thaliana]
  misc_feature (10)..(330): Homolog of NCBI NO: 15223826 NR Description: hypothetical protein common family; protein id:
  misc_feature (58)..(325): Homolog of NCBI NO: 15235236 NR Description: hypothetical protein common family; protein id:
  misc_feature (54)..(320): Homolog of NCBI NO: 18395292 NR Description: unknown protein; protein id: At2g02060.1
MTSYNNSSGSLALAVALLFAGALYIYFSSRSASDPISGLLQNVNTRLIQYPVDELETVLDKASTGNNKTVIIAMVNKAYVEEDGGGRTMLDLFLESFWEGEGTRPLLNHLMVVAADQTAYDRCLFRRLHCYKMDTEGVDLEGEKVYMSKDFIEMMWRRTRLLLDVLSRGYHIIFTDTDVMWLRSPLSRLNVSLDMHISVDRNNVRGQLINTGFYHARSNNKTISLFQKWYDMRLKSLGMKEQDVLKNLLDSGFFNQLGLNVGFLSTAEFSGFCQDSPDMGAVTTVHANCCVHIPAKISDLSLALRDWKRYKASRVNSRWSPHVECRRSWKDVHYVPKL

SEQ ID NO: 86216 - protein, 265 aa, Arabidopsis thaliana
  peptide (1)..(265): Ceres Seq. ID no. 12687661
  misc_feature (1)..(265): Homolog of NCBI NO: 25372968 NR Description: protein F1K23.10 [imported] - Arabidopsis >gi|10764853|gb|AAG22833.1|AC007508_6 F1K23.10 [Arabidopsis
  misc_feature (1)..(99): Homolog of NCBI NO: 15218762 NR Description: hypothetical protein common family; protein id:
  misc_feature (103)..(265): Homolog of NCBI NO: 15218762 NR Description: hypothetical protein common family; protein id:
  misc_feature (1)..(265): Homolog of NCBI NO: 18396892 NR Description: expressed protein; protein id: At1g28710.1, by cDNA: gi_15027990, supported by cDNA: gi_20259204 [Arabidopsis >gi|10764852|gb|AAG22832.1|AC007508_5 F1K23.9 [Arabidopsis
  misc_feature (1)..(252): Homolog of NCBI NO: 6691205 NR Description: F1K23.11 [Arabidopsis thaliana]
  misc_feature (1)..(251): Homolog of NCBI NO: 15218760 NR Description: hypothetical protein; protein id: At1g28690.1
  misc_feature (1)..(252): Homolog of NCBI NO: 21536907 NR Description: regulatory protein [Arabidopsis thaliana]
  misc_feature (1)..(257): Homolog of NCBI NO: 15223826 NR Description: hypothetical protein common family; protein id:
  misc_feature (1)..(252): Homolog of NCBI NO: 15235236 NR Description: hypothetical protein common family; protein id:
  misc_feature (1)..(247): Homolog of NCBI NO: 18395292 NR Description: unknown protein; protein id: At2g02060.1
MVNKAYVEEDGGGRTMLDLFLESFWEGEGTRPLLNHLMVVAADQTAYDRCLFRRLHCYKMDTEGVDLEGEKVYMSKDFIEMMWRRTRLLLDVLSRGYHIIFTDTDVMWLRSPLSRLNVSLDMHISVDRNNVRGQLINTGFYHARSNNKTISLFQKWYDMRLKSLGMKEQDVLKNLLDSGFFNQLGLNVGFLSTAEFSGFCQDSPDMGAVTTVHANCCVHIPAKISDLSLALRDWKRYKASRVNSRWSPHVECRRSWKDVHYVPKL

SEQ ID NO: 86217 - protein, 250 aa, Arabidopsis thaliana
  peptide (1)..(250): Ceres Seq. ID no. 12687662
  misc_feature (1)..(250): Homolog of NCBI NO: 25372968 NR Description: protein F1K23.10 [imported] - Arabidopsis >gi|10764853|gb|AAG22833.1|AC007508_6 F1K23.10 [Arabidopsis
  misc_feature (1)..(84): Homolog of NCBI NO: 15218762 NR Description: hypothetical protein common family; protein id:
  misc_feature (88)..(250): Homolog of NCBI NO: 15218762 NR Description: hypothetical protein common family; protein id:
  misc_feature (1)..(250): Homolog of NCBI NO: 18396892 NR Description: expressed protein; protein id: At1g28710.1, by cDNA: gi_15027990, supported by cDNA: gi_20259204 [Arabidopsis >gi|10764852|gb|AAG22832.1|AC007508_5 F1K23.9 [Arabidopsis
  misc_feature (1)..(237): Homolog of NCBI NO: 6691205 NR Description: F1K23.11 [Arabidopsis thaliana]
  misc_feature (1)..(236): Homolog of NCBI NO: 15218760 NR Description: hypothetical protein; protein id: At1g28690.1
  misc_feature (1)..(237): Homolog of NCBI NO: 21536907 NR Description: regulatory protein [Arabidopsis thaliana]
  misc_feature (1)..(242): Homolog of NCBI NO: 15223826 NR Description: hypothetical protein common family; protein id:
  misc_feature (1)..(237): Homolog of NCBI NO: 15235236 NR Description: hypothetical protein common family; protein id:
  misc_feature (1)..(232): Homolog of NCBI NO: 18395292 NR Description: unknown protein; protein id: At2g02060.1
MLDLFLESFWEGEGTRPLLNHLMVVAADQTAYDRCLFRRLHCYKMDTEGVDLEGEKVYMSKDFIEMMWRRTRLLLDVLSRGYHIIFTDTDVMWLRSPLSRLNVSLDMHISVDRNNVRGQLINTGFYHARSNNKTISLFQKWYDMRLKSLGMKEQDVLKNLLDSGFFNQLGLNVGFLSTAEFSGFCQDSPDMGAVTTVHANCCVHIPAKISDLSLALRDWKRYKASRVNSRWSPHVECRRSWKDVHYVPKL

SEQ ID NO: 86218 - DNA, 1818 bp, Arabidopsis thaliana
  misc_feature (1)..(1818): Ceres Seq. ID no. 12687674
  misc_feature: MA Experiment ID: 20000185 Result: Up-regulated in Transcription
  misc_feature: MA Experiment 20000185 PARAMETER Experiment Name: At_Roots__P Parameter: Age (day) Value: 7 vs. 21
  misc_feature: MA Experiment 20000185 PARAMETER Experiment Name: At_Roots__P Parameter: Organism Value: A. thaliana
  misc_feature: MA Experiment 20000185 PARAMETER Experiment Name: At_Roots__P Parameter: Tissue Value: Roots vs. Whole Plant
  misc_feature: MA Experiment ID: 20000439 Result: Up-regulated in Transcription
  misc_feature: MA Experiment 20000439 PARAMETER Experiment Name: At_Roots__P Parameter: Age (day) Value: 14 vs. 21
  misc_feature: MA Experiment 20000439 PARAMETER Experiment Name: At_Roots__P Parameter: Organism Value: A. thaliana
  misc_feature: MA Experiment 20000439 PARAMETER Experiment Name: At_Roots__P Parameter: Tissue Value: Roots vs. Whole Plant
atggcacgtctttctctgtttctgtcttttctctctttgatagctttgatctctgttgtgaactgtcgtgttttaagttctttatctgagaaagactcaatcttggtctccgatggagttcaagacgggtccagctacgagtttctgagtcttgatccgccaaatgacattaccaagaatatgtgcgtacatgtctacgattttcttccatgtgcagacaatgttgcaggatatgtcttccaagttttctcgtttggttgcatcttgatcatcggtgaatacttcttgactaaaggaaggactaagctctttctcatattcgaggtcggtttttatggcggaatcatctttcctctccttactatgttcccacgaatcgcgcttattctctcgactggactggtgggaagccgcgaaatggcaagctcgagggttggtaatatcattggagttactgtgggatactctgtctttgctttgacaatacaatggggagcttgtattctctttggcttgtctggtactaaaccagaacagcccatagatttatctggtactaaaccagaacagcccacagaatcatctggagaaaattcagacgtaaagtgtccaagaatacaattttactggaaaaaactatcagattacgttttcgctagtgtagaagcagatataacgaacaagaaatcggcagggattatgctcttgactatactacctttcatattggtcacattttcagagatatctagttcacaatattggaatgacataatcgttttgatcacactcataatctctgcttctgcaacttttgcctactttttttattcggttttctttgtgaaaaactcgcagtattttgatagagacgaccaagcgaagagtttagatcacgcgaggtttgagctcatgtcagaagttcataagcatttacagattttttcacccaaaagccttataagagatggacaactaaatcaagagagcttgaaaagattgtttcaaaaaatcgatgcaaacggagatggaaagatccaagttgcagagttgaaagatcttacggtggagtttgggatgatagggagagtcaagtgtcacatagataagcttgtccatacattggttgatgatttcgacagggatggagatcgtgagatcgatgaggctgaattcgagattgggatcaaaaaatggctgaatcagtacaaattcagcttcgataccaccgtgccaccaagagaggaccaagctgagggagtaccaattctgaaggtagaaaagccagagcagagtcttgttaagaagctgctctcatggagaaccttgagagcttcccttgaagtcattttagggatgctagttgtcatctatcttgcaagacctttcatgatgaacatccaacttttgtcggaatcagctggagttccttctttctatgttgtctttgtagtcattcctttggcaagaaacctaaagaacaccttgtcagctcacttctgtcgcaagaaagacaaagcgaaaatcacatctgacacattttctgagatctacaaggatgttacaatgaacaatctcatgggaatttcaattatattggcaattgtgtacgcaagagaactagtttgggattacacaacagaagttctcattatagtgatcgttggtctcttaataggcttaccggcttatgtgagaacgacttatccattttggatatgtctcttggcctttgctctctacttcatctctcttgtcgtagtgtatttccatttcatgtctctcgaaaagggcacaactgtcacctttaacaaataa

SEQ ID NO: 86219 - protein, 605 aa, Arabidopsis thaliana
  peptide (1)..(605): Ceres Seq. ID no. 12687675
  misc_feature (460)..(588): Pfam Name: Sodium/calcium exchanger protein Pfam Description: Sodium/calcium exchanger protein
  misc_feature (276)..(605): Homolog of NCBI NO: 15218787 NR Description: unknown protein; protein id: At1g29020.1 thaliana] >gi|10764849|gb|AAF24539.2|AC007508_2 F1K23.2
  misc_feature (13)..(216): Homolog of NCBI NO: 15218787 NR Description: unknown protein; protein id: At1g29020.1 thaliana] >gi|10764849|gb|AAF24539.2|AC007508_2 F1K23.2
  misc_feature (5)..(592): Homolog of NCBI NO: 26449859 NR Description: unknown protein [Arabidopsis thaliana]
  misc_feature (215)..(256): Homolog of NCBI NO: 15218787 NR Description: unknown protein; protein id: At1g29020.1 thaliana] >gi|10764849|gb|AAF24539.2|AC007508_2 F1K23.2
  misc_feature (283)..(517): Homolog of NCBI NO: 15226191 NR Description: unknown protein; protein id: At2g34020.1
  misc_feature (5)..(202): Homolog of NCBI NO: 15226191 NR Description: unknown protein; protein id: At2g34020.1
  misc_feature (283)..(524): Homolog of NCBI NO: 15226193 NR Description: unknown protein; protein id: At2g34030.1
  misc_feature (1)..(181): Homolog of NCBI NO: 15226193 NR Description: unknown protein; protein id: At2g34030.1
  misc_feature (122)..(565): Homolog of NCBI NO: 15218787 NR Description: unknown protein; protein id: At1g29020.1 thaliana] >gi|10764849|gb|AAF24539.2|AC007508_2 F1K23.2
  misc_feature (1)..(351): Homolog of NCBI NO: 15218787 NR Description: unknown protein; protein id: At1g29020.1 thaliana] >gi|10764849|gb|AAF24539.2|AC007508_2 F1K23.2
MARLSLFLSFLSLIALISVVNCRVLSSLSEKDSILVSDGVQDGSSYEFLSLDPPNDITKNMCVHVYDFLPCADNVAGYVFQVFSFGCILIIGEYFLTKGRTKLFLIFEVGFYGGIIFPLLTMFPRIALILSTGLVGSREMASSRVGNIIGVTVGYSVFALTIQWGACILFGLSGTKPEQPIDLSGTKPEQPTESSGENSDVKCPRIQFYWKKLSDYVFASVEADITNKKSAGIMLLTILPFILVTFSEISSSQYWNDIIVLITLIISASATFAYFFYSVFFVKNSQYFDRDDQAKSLDHARFELMSEVHKHLQIFSPKSLIRDGQLNQESLKRLFQKIDANGDGKIQVAELKDLTVEFGMIGRVKCHIDKLVHTLVDDFDRDGDREIDEAEFEIGIKKWLNQYKFSFDTTVPPREDQAEGVPILKVEKPEQSLVKKLLSWRTLRASLEVILGMLVVIYLARPFMMNIQLLSESAGVPSFYVVFVVIPLARNLKNTLSAHFCRKKDKAKITSDTFSEIYKDVTMNNLMGISIILAIVYARELVWDYTTEVLIIVIVGLLIGLPAYVRTTYPFWICLLAFALYFISLVVVYFHFMSLEKGTTVTFNK

SEQ ID NO: 86220 - protein, 545 aa, Arabidopsis thaliana
  peptide (1)..(545): Ceres Seq. ID no. 12687676
  misc_feature (400)..(528): Pfam Name: Sodium/calcium exchanger protein Pfam Description: Sodium/calcium exchanger protein
  misc_feature (216)..(545): Homolog of NCBI NO: 15218787 NR Description: unknown protein; protein id: At1g29020.1 thaliana] >gi|10764849|gb|AAF24539.2|AC007508_2 F1K23.2
  misc_feature (1)..(156): Homolog of NCBI NO: 15218787 NR Description: unknown protein; protein id: At1g29020.1 thaliana] >gi|10764849|gb|AAF24539.2|AC007508_2 F1K23.2
  misc_feature (1)..(532): Homolog of NCBI NO: 26449859 NR Description: unknown protein [Arabidopsis thaliana]
  misc_feature (155)..(196): Homolog of NCBI NO: 15218787 NR Description: unknown protein; protein id: At1g29020.1 thaliana] >gi|10764849|gb|AAF24539.2|AC007508_2 F1K23.2
  misc_feature (223)..(457): Homolog of NCBI NO: 15226191 NR Description: unknown protein; protein id: At2g34020.1
  misc_feature (1)..(142): Homolog of NCBI NO: 15226191 NR Description: unknown protein; protein id: At2g34020.1
  misc_feature (223)..(464): Homolog of NCBI NO: 15226193 NR Description: unknown protein; protein id: At2g34030.1
  misc_feature (1)..(121): Homolog of NCBI NO: 15226193 NR Description: unknown protein; protein id: At2g34030.1
  misc_feature (62)..(505): Homolog of NCBI NO: 15218787 NR Description: unknown protein; protein id: At1g29020.1 thaliana] >gi|10764849|gb|AAF24539.2|AC007508_2 F1K23.2
  misc_feature (1)..(291): Homolog of NCBI NO: 15218787 NR Description: unknown protein; protein id: At1g29020.1 thaliana] >gi|10764849|gb|AAF24539.2|AC007508_2 F1K23.2
MCVHVYDFLPCADNVAGYVFQVFSFGCILIIGEYFLTKGRTKLFLIFEVGFYGGIIFPLLTMFPRIALILSTGLVGSREMASSRVGNIIGVTVGYSVFALTIQWGACILFGLSGTKPEQPIDLSGTKPEQPTESSGENSDVKCPRIQFYWKKLSDYVFASVEADITNKKSAGIMLLTILPFILVTFSEISSSQYWNDIIVLITLIISASATFAYFFYSVFFVKNSQYFDRDDQAKSLDHARFELMSEVHKHLQIFSPKSLIRDGQLNQESLKRLFQKIDANGDGKIQVAELKDLTVEFGMIGRVKCHIDKLVHTLVDDFDRDGDREIDEAEFEIGIKKWLNQYKFSFDTTVPPREDQAEGVPILKVEKPEQSLVKKLLSWRTLRASLEVILGMLVVIYLARPFMMNIQLLSESAGVPSFYVVFVVIPLARNLKNTLSAHFCRKKDKAKITSDTFSEIYKDVTMNNLMGISIILAIVYARELVWDYTTEVLIIVIVGLLIGLPAYVRTTYPFWICLLAFALYFISLVVVYFHFMSLEKGTTVTFNK

SEQ ID NO: 86221 - protein, 484 aa, Arabidopsis thaliana
  peptide (1)..(484): Ceres Seq. ID no. 12687677
  misc_feature (339)..(467): Pfam Name: Sodium/calcium exchanger protein Pfam Description: Sodium/calcium exchanger protein
  misc_feature (155)..(484): Homolog of NCBI NO: 15218787 NR Description: unknown protein; protein id: At1g29020.1 thaliana] >gi|10764849|gb|AAF24539.2|AC007508_2 F1K23.2
  misc_feature (1)..(95): Homolog of NCBI NO: 15218787 NR Description: unknown protein; protein id: At1g29020.1 thaliana] >gi|10764849|gb|AAF24539.2|AC007508_2 F1K23.2
  misc_feature (1)..(471): Homolog of NCBI NO: 26449859 NR Description: unknown protein [Arabidopsis thaliana]
  misc_feature (94)..(135): Homolog of NCBI NO: 15218787 NR Description: unknown protein; protein id: At1g29020.1 thaliana] >gi|10764849|gb|AAF24539.2|AC007508_2 F1K23.2
  misc_feature (162)..(396): Homolog of NCBI NO: 15226191 NR Description: unknown protein; protein id: At2g34020.1
  misc_feature (1)..(81): Homolog of NCBI NO: 15226191 NR Description: unknown protein; protein id: At2g34020.1
  misc_feature (162)..(403): Homolog of NCBI NO: 15226193 NR Description: unknown protein; protein id: At2g34030.1
  misc_feature (1)..(60): Homolog of NCBI NO: 15226193 NR Description: unknown protein; protein id: At2g34030.1
  misc_feature (1)..(444): Homolog of NCBI NO: 15218787 NR Description: unknown protein; protein id: At1g29020.1 thaliana] >gi|10764849|gb|AAF24539.2|AC007508_2 F1K23.2
  misc_feature (1)..(230): Homolog of NCBI NO: 15218787 NR Description: unknown protein; protein id: At1g29020.1 thaliana] >gi|10764849|gb|AAF24539.2|AC007508_2 F1K23.2
MFPRIALILSTGLVGSREMASSRVGNIIGVTVGYSVFALTIQWGACILFGLSGTKPEQPIDLSGTKPEQPTESSGENSDVKCPRIQFYWKKLSDYVFASVEADITNKKSAGIMLLTILPFILVTFSEISSSQYWNDIIVLITLIISASATFAYFFYSVFFVKNSQYFDRDDQAKSLDHARFELMSEVHKHLQIFSPKSLIRDGQLNQESLKRLFQKIDANGDGKIQVAELKDLTVEFGMIGRVKCHIDKLVHTLVDDFDRDGDREIDEAEFEIGIKKWLNQYKFSFDTTVPPREDQAEGVPILKVEKPEQSLVKKLLSWRTLRASLEVILGMLVVIYLARPFMMNIQLLSESAGVPSFYVVFVVIPLARNLKNTLSAHFCRKKDKAKITSDTFSEIYKDVTMNNLMGISIILAIVYARELVWDYTTEVLIIVIVGLLIGLPAYVRTTYPFWICLLAFALYFISLVVVYFHFMSLEKGTTVTFNK

SEQ ID NO: 86222 - DNA, 1260 bp, Arabidopsis thaliana
  misc_feature (1)..(1260): Ceres Seq. ID no. 12687697
  misc_feature: MA Experiment ID: 108434 Result: Up-regulated in Transcription
  misc_feature: MA Experiment 108434 PARAMETER Experiment Name: At_Root_Tips_cDNA_P Parameter: Tissue Value: Root Tips
  misc_feature: MA Experiment ID: 108462 Result: Down-regulated in Transcription
  misc_feature: MA Experiment 108462 PARAMETER Experiment Name: At_Germinating_Seeds_cDNA_P Parameter: Age (day) Value: 2 vs. 0
  misc_feature: MA Experiment 108462 PARAMETER Experiment Name: At_Germinating_Seeds_cDNA_P Parameter: Tissue Value: Germinating Seeds
  misc_feature: MA Experiment ID: 108463 Result: Down-regulated in Transcription
  misc_feature: MA Experiment 108463 PARAMETER Experiment Name: At_Germinating_Seeds_cDNA_P Parameter: Age (day) Value: 3 vs. 0
  misc_feature: MA Experiment 108463 PARAMETER Experiment Name: At_Germinating_Seeds_cDNA_P Parameter: Tissue Value: Germinating Seeds
  misc_feature: MA Experiment ID: 108573 Result: Up-regulated in Transcription
  misc_feature: MA Experiment 108573 PARAMETER Experiment Name: At_Drought_cDNA_P Parameter: Timepoint (hr) Value: 6
  misc_feature: MA Experiment 108573 PARAMETER Experiment Name: At_Drought_cDNA_P Parameter: Tissue Value: Aerial
  misc_feature: MA Experiment 108573 PARAMETER Experiment Name: At_Drought_cDNA_P Parameter: Treatment Value: Drought vs. No Drought
  misc_feature: MA Experiment ID: 108576 Result: Up-regulated in Transcription
  misc_feature: MA Experiment 108576 PARAMETER Experiment Name: At_42deg_Heat_cDNA_P Parameter: Temperature (deg C) Value: 42 vs. 22
  misc_feature: MA Experiment 108576 PARAMETER Experiment Name: At_42deg_Heat_cDNA_P Parameter: Timepoint (hr) Value: 1
  misc_feature: MA Experiment 108576 PARAMETER Experiment Name: At_42deg_Heat_cDNA_P Parameter: Tissue Value: Aerial
  misc_feature: MA Experiment ID: 108577 Result: Up-regulated in Transcription
  misc_feature: MA Experiment 108577 PARAMETER Experiment Name: At_42deg_Heat_cDNA_P Parameter: Temperature (deg C) Value: 42 vs. 22
  misc_feature: MA Experiment 108577 PARAMETER Experiment Name: At_42deg_Heat_cDNA_P Parameter: Timepoint (hr) Value: 6
  misc_feature: MA Experiment 108577 PARAMETER Experiment Name: At_42deg_Heat_cDNA_P Parameter: Tissue Value: Aerial
  misc_feature: MA Experiment ID: 108585 Result: Up-regulated in Transcription
  misc_feature: MA Experiment 108585 PARAMETER Experiment Name: At_5mM_NaNP_cDNA_P Parameter: Timepoint (hr) Value: 6
  misc_feature: MA Experiment 108585 PARAMETER Experiment Name: At_5mM_NaNP_cDNA_P Parameter: Tissue Value: Aerial
  misc_feature: MA Experiment 108585 PARAMETER Experiment Name: At_5mM_NaNP_cDNA_P Parameter: Treatment Value: null
  misc_feature: MA Experiment ID: 20000093 Result: Up-regulated in Transcription
  misc_feature: MA Experiment 20000093 PARAMETER Experiment Name: At_42deg_Heat_cDNA_P Parameter: Temperature (deg C) Value: 42 vs. 22
  misc_feature: MA Experiment 20000093 PARAMETER Experiment Name: At_42deg_Heat_cDNA_P Parameter: Timepoint (hr) Value: 0.5
  misc_feature: MA Experiment 20000093 PARAMETER Experiment Name: At_42deg_Heat_cDNA_P Parameter: Tissue Value: Aerial
  misc_feature: MA Experiment ID: 20000111 Result: Up-regulated in Transcription
  misc_feature: MA Experiment 20000111 PARAMETER Experiment Name: At_42deg_Heat_cDNA_P Parameter: Temperature (deg C) Value: 42 vs. 22
  misc_feature: MA Experiment 20000111 PARAMETER Experiment Name: At_42deg_Heat_cDNA_P Parameter: Timepoint (hr) Value: 6
  misc_feature: MA Experiment 20000111 PARAMETER Experiment Name: At_42deg_Heat_cDNA_P Parameter: Tissue Value: Aerial
  misc_feature: MA Experiment ID: 20000112 Result: Up-regulated in Transcription
  misc_feature: MA Experiment 20000112 PARAMETER Experiment Name: At_42deg_Heat_cDNA_P Parameter: Temperature (deg C) Value: 42 vs. 22
  misc_feature: MA Experiment 20000112 PARAMETER Experiment Name: At_42deg_Heat_cDNA_P Parameter: Timepoint (hr) Value: 2
  misc_feature: MA Experiment 20000112 PARAMETER Experiment Name: At_42deg_Heat_cDNA_P Parameter: Tissue Value: Aerial
  misc_feature: MA Experiment ID: 20000144 Result: Up-regulated in Transcription
  misc_feature: MA Experiment 20000144 PARAMETER Experiment Name: At_42deg_Heat_cDNA_P Parameter: Temperature (deg C) Value: 42 vs. 22
  misc_feature: MA Experiment 20000144 PARAMETER Experiment Name: At_42deg_Heat_cDNA_P Parameter: Timepoint (hr) Value: 1
  misc_feature: MA Experiment 20000144 PARAMETER Experiment Name: At_42deg_Heat_cDNA_P Parameter: Tissue Value: Aerial
  misc_feature: MA Experiment ID: 20000224 Result: Down-regulated in Transcription
atggtttcctatcgtgctaccacagagacgatttccctggctttagaagccaacagctcggaggctattacgatactgtaccaggttttggaagacccttcttcatctcctgaggctatacggatcaaggagcaagcgattacaaacctttgtgatcgattgactgaagagaagagaggtgaggatctccggaaactgttgaccaagttgaggcctttcttttccttaatccccaaggcgaaaactgcgaaaatcgtcagaggaatcattgatgctgtggcaaagattcctggaacaactgatctccagatcactctctgcaaagagatggtcgaatggacccgcgctgagaagcgtactttcctcaggcagcgagtagaggctaggcttgcagctcttttgatggagaacaaggagtatgttgaagctttggcgttgttgagtactttggtaaaagaggttaggagattagatgataagctccttctggtcgacatagacttgctggagagcaaacttcacttctcattgagaaacttacccaaggcaaaagctgcactcactgcagctaggacagctgctaacgctatatatgtcccaccagctcaacaaggcacgatagatctgcagagtgggattcttcatgctgaagagaaagactacaaaaccggatacagttacttctttgaagcctttgagtccttcaacgctctcggagatccgagagcggttttcagtttgaagtacatgttactgtgcaagatcatggttagccaagctgatgatgttgcaggaataatctcctcaaaggctggactacagtacgttggccctgacctggatgccatgaaagcagtcgctgatgctcactcgaagaggtccttgaagttgtttgagaacgcactccgtgactacaaagcacagcttgaagatgacccaattgtccacaggcatctctcttctctctatgacacgcttctggagcaaaatctgtgtcgtttgatcgagcccttctcaagagttgagatagctcacattgctgagctcattggattgccgctcgaccatgtggaaaagaagctatctcagatgatactcgacaagaaatttgcaggtaccttggatcaaggagctggatgcctcatcatcttcgaagacccaaaggcagatgctatctactcggctaccctcgaaaccattgcaaacatggggaaggtcgtcgacagcctttatgtccggtctgccaaaatcatgtcctga

SEQ ID NO: 86223 - protein, 419 aa, Arabidopsis thaliana; identical to SEQ ID NO: 84568
  peptide (1)..(419): Ceres Seq. ID no. 12687698
  misc_feature (281)..(385): Pfam Name: PCI domain Pfam Description: PCI domain
  misc_feature (1)..(419): Homolog of NCBI NO: 15218845 NR Description: 26S proteasome regulatory subunit (RPN6), protein id: At1g29150.1, supported by cDNA: 39755., supported by gi_15810544, supported by cDNA: gi_3450888 [Arabidopsis thaliana]
  misc_feature (1)..(412): Homolog of NCBI NO: 25332510 NR Description: 19S proteosome subunit 9 [imported] - Arabidopsis >gi|3450889|gb|AAC34120.1| 19S proteosome subunit 9 [Arabidopsis
  misc_feature (6)..(419): Homolog of NCBI NO: 38344536 NR Description: OSJNBa0027P08.4 [Oryza sativa (japonica
  misc_feature (110)..(419): Homolog of NCBI NO: 38093742 NR Description: putative proteosome subunit [Oryza sativa
  misc_feature (12)..(417): Homolog of NCBI NO: 17137740 NR Description: Proteasome p44.5 subunit CG10149-PB [Drosophila
  misc_feature (15)..(417): Homolog of NCBI NO: 26342168 NR Description: unnamed protein product [Mus musculus]
  misc_feature (15)..(417): Homolog of NCBI NO: 33585718 NR Description: Unknown (protein for IMAGE:3964625) [Mus musculus]
  misc_feature (15)..(417): Homolog of NCBI NO: 2150046 NR Description: 26S proteasome subunit 9 [Homo sapiens]
  misc_feature (15)..(417): Homolog of NCBI NO: 28872725 NR Description: proteasome 26S non-ATPase subunit 11; 26S regulatory subunit 9 [Homo sapiens]
  misc_feature (15)..(417): Homolog of NCBI NO: 34872897 NR Description: similar to 26S proteasome non-ATPase regulatory

SEQ ID NO: 86224 - protein, 310 aa, Arabidopsis thaliana; identical to SEQ ID NO: 84569
  peptide (1)..(310): Ceres Seq. ID no. 12687699
  misc_feature (172)..(276): Pfam Name: PCI domain Pfam Description: PCI domain
  misc_feature (1)..(310): Homolog of NCBI NO: 15218845 NR Description: 26S proteasome regulatory subunit (RPN6), protein id: At1g29150.1, supported by cDNA: 39755., supported by gi_15810544, supported by cDNA: gi_3450888 [Arabidopsis thaliana]
  misc_feature (1)..(303): Homolog of NCBI NO: 25332510 NR Description: 19S proteosome subunit 9 [imported] - Arabidopsis >gi|3450889|gb|AAC34120.1| 19S proteosome subunit 9 [Arabidopsis
  misc_feature (1)..(310): Homolog of NCBI NO: 38344536 NR Description: OSJNBa0027P08.4 [Oryza sativa (japonica
  misc_feature (1)..(310): Homolog of NCBI NO: 38093742 NR Description: putative proteosome subunit [Oryza sativa
  misc_feature (1)..(308): Homolog of NCBI NO: 17137740 NR Description: Proteasome p44.5 subunit CG10149-PB [Drosophila
  misc_feature (1)..(308): Homolog of NCBI NO: 26342168 NR Description: unnamed protein product [Mus musculus]
  misc_feature (1)..(308): Homolog of NCBI NO: 33585718 NR Description: Unknown (protein for IMAGE:3964625) [Mus musculus]
  misc_feature (1)..(308): Homolog of NCBI NO: 2150046 NR Description: 26S proteasome subunit 9 [Homo sapiens]
  misc_feature (1)..(308): Homolog of NCBI NO: 28872725 NR Description: proteasome 26S non-ATPase subunit 11; 26S regulatory subunit 9 [Homo sapiens]
  misc_feature (1)..(308): Homolog of NCBI NO: 34872897 NR Description: similar to 26S proteasome non-ATPase regulatory

SEQ ID NO: 86225 - protein, 285 aa, Arabidopsis thaliana; identical to SEQ ID NO: 84570
  peptide (1)..(285): Ceres Seq. ID no. 12687700
  misc_feature (147)..(251): Pfam Name: PCI domain Pfam Description: PCI domain
  misc_feature (1)..(285): Homolog of NCBI NO: 15218845 NR Description: 26S proteasome regulatory subunit (RPN6), protein id: At1g29150.1, supported by cDNA: 39755., supported by gi_15810544, supported by cDNA: gi_3450888 [Arabidopsis thaliana]
  misc_feature (1)..(278): Homolog of NCBI NO: 25332510 NR Description: 19S proteosome subunit 9 [imported] - Arabidopsis >gi|3450889|gb|AAC34120.1| 19S proteosome subunit 9 [Arabidopsis
  misc_feature (1)..(285): Homolog of NCBI NO: 38344536 NR Description: OSJNBa0027P08.4 [Oryza sativa (japonica
  misc_feature (1)..(285): Homolog of NCBI NO: 38093742 NR Description: putative proteosome subunit [Oryza sativa
  misc_feature (1)..(283): Homolog of NCBI NO: 17137740 NR Description: Proteasome p44.5 subunit CG10149-PB [Drosophila
  misc_feature (1)..(283): Homolog of NCBI NO: 26342168 NR Description: unnamed protein product [Mus musculus]
  misc_feature (1)..(283): Homolog of NCBI NO: 33585718 NR Description: Unknown (protein for IMAGE:3964625) [Mus musculus]
  misc_feature (1)..(283): Homolog of NCBI NO: 2150046 NR Description: 26S proteasome subunit 9 [Homo sapiens]
  misc_feature (1)..(283): Homolog of NCBI NO: 28872725 NR Description: proteasome 26S non-ATPase subunit 11; 26S regulatory subunit 9 [Homo sapiens]
  misc_feature (1)..(283): Homolog of NCBI NO: 34872897 NR Description: similar to 26S proteasome non-ATPase regulatory

SEQ ID NO: 86226 - DNA, 1782 bp, Arabidopsis thaliana
  misc_feature (1)..(1782): Ceres Seq. ID no. 12687723
  misc_feature: MA Experiment ID: 20000185 Result: Up-regulated in Transcription
  misc_feature: MA Experiment 20000185 PARAMETER Experiment Name: At_Roots__P Parameter: Age (day) Value: 7 vs. 21
  misc_feature: MA Experiment 20000185 PARAMETER Experiment Name: At_Roots__P Parameter: Organism Value: A. thaliana
  misc_feature: MA Experiment 20000185 PARAMETER Experiment Name: At_Roots__P Parameter: Tissue Value: Roots vs. Whole Plant
  misc_feature: MA Experiment ID: 20000235 Result: Up-regulated in Transcription
  misc_feature: MA Experiment 20000235 PARAMETER Experiment Name: At_Siliques_P Parameter: Age (day) Value: 21
  misc_feature: MA Experiment 20000235 PARAMETER Experiment Name: At_Siliques_P Parameter: Organism Value: A. thaliana
  misc_feature: MA Experiment 20000235 PARAMETER Experiment Name: At_Siliques_P Parameter: Plant Line Value: WS
  misc_feature: MA Experiment 20000235 PARAMETER Experiment Name: At_Siliques_P Parameter: Tissue Value: 5-10mm Siliques vs. Whole Plant
  misc_feature: MA Experiment ID: 20000439 Result: Up-regulated in Transcription
  misc_feature: MA Experiment 20000439 PARAMETER Experiment Name: At_Roots__P Parameter: Age (day) Value: 14 vs. 21
  misc_feature: MA Experiment 20000439 PARAMETER Experiment Name: At_Roots__P Parameter: Organism Value: A. thaliana
  misc_feature: MA Experiment 20000439 PARAMETER Experiment Name: At_Roots__P Parameter: Tissue Value: Roots vs. Whole Plant
  misc_feature: MA Experiment ID: 20001773 Result: Up-regulated in Transcription
  misc_feature: MA Experiment 20001773 PARAMETER Experiment Name: At_Far-red-enriched-adult_P Parameter: Age (day) Value: 30
  misc_feature: MA Experiment 20001773 PARAMETER Experiment Name: At_Far-red-enriched-adult_P Parameter: Light Value: Far-red enriched vs. White
  misc_feature: MA Experiment 20001773 PARAMETER Experiment Name: At_Far-red-enriched-adult_P Parameter: Organism Value: A. thaliana
  misc_feature: MA Experiment 20001773 PARAMETER Experiment Name: At_Far-red-enriched-adult_P Parameter: Plant Line Value: Columbia
  misc_feature: MA Experiment 20001773 PARAMETER Experiment Name: At_Far-red-enriched-adult_P Parameter: Timepoint (hr) Value: 48
  misc_feature: MA Experiment 20001773 PARAMETER Experiment Name: At_Far-red-enriched-adult_P Parameter: Tissue Value: Aerial
atggggaaacagggatcaccgagaagtcctcgacctgaaaccatagataaagaagagaaatttgggaggagaagtttggattctttatctggtaatgatctcttactcggtagaagaatatatgcaagtgaagtttccaaggctcaaggatctaagcatgatcaaagcagtggtagtagcaacaaattttggaagaagcaacattcatggcttcgtaggaactttaagtcgatagttttgatgatctcagtcaccggtttcattttctgtatggattccattatggtttcgatctttcattccgatagtagagccgtggtgcaagacatttcaaggttgagcaatatgactttgcataagaatggagcagtagatgcttcaccagttcaaatgtatagccgtcttctaaacttagcttcggattctcttgcaaagaatgaattcaaacccgatacaccaaacttccgggaggaaagatcttcaaagtcatcacagtggaagccttgtgcagataataacaaagcagctgtggcattagagaggtctagagaattaagcaatggttacatcatggttagtgcaaatggaggccttaatcaacagcgcgtggctatctgtaacgctgttgcggttgctgctctgctcaacgcgactctagttcttcctcggtttctttacagcaatgtatggaaagatcctagccaatttggtgatatataccaagaggatcattttatcgagtatctgaaagatgaggtgaatatagtgaagaatcttcctcaacatctaaaatctactgataacaagaatctcagcttggttactgatacggagcttgtaaaagaggcaacaccagtcgattacatcgaacatgttcttcctttgttaaagaagtatggaatggttcatcttttcggatacgggaatcgcctcgggtttgatccattgccttttgacgttcagagattacgatgtaaatgcaactttcacgcgctgaaattcgcgcccaagattcaagaagcgggatctctgttggtgaaacggataagaagattcaaaacatcgcgtagagaagaagaaccgttgaagtatcttgctttgcatctaaggtttgaagaagacatggttgcttattctctatgcgattttggaggaggagaagccgagcgcaaagagcttcaagcttaccgtgaagatcatttccctcttctactcaaacgtttgaagaaatcaaagccagtgtccccagaagagttaagaaaaacgggcaagtgtccactaacaccagaggaagcaactctggttcttgctggtcttggattcaagagaaaaacatatatttacttagctggatctcaaatctatggaggctcttctcgtatgcttcctttaacaagactgtacccgaatatcgcgaccaaagaaactctccttacacctcaagaacttgcgccattcaagaacttctcttctcagctagctgcactagatttcatagcttgtatagcatcagatgtctttgcaatgactgattctgggagtcaactatcatccttagtgtctggatttagaaactactacggaaacggtcaggcaccaacattgagacctaacaagaagaggcttgcagcaatcttatcagacagtgaaacaataaagtggaagatttttgaagatcgtgtgagaaaaatggtagaggaaggccaaaagcttcgtactaggccttatggacgcagcatttatagacaaccgagatgtcctgagtgtatgtgtaaattttga

SEQ ID NO: 86227 - protein, 593 aa, Arabidopsis thaliana
  peptide (1)..(593): Ceres Seq. ID no. 12687724
  misc_feature (234)..(362): Pfam Name: Plant protein family Pfam Description: Plant protein family
  misc_feature (4)..(362): Homolog of NCBI NO: 15218850 NR Description: hypothetical protein; protein id: At1g29200.1
  misc_feature (337)..(593): Homolog of NCBI NO: 15218850 NR Description: hypothetical protein; protein id: At1g29200.1
  misc_feature (1)..(593): Homolog of NCBI NO: 25518128 NR Description: hypothetical protein F12P21.7 - Arabidopsis >gi|9502419|gb|AAF88118.1|AC021043_11 Hypothetical protein
  misc_feature (363)..(591): Homolog of NCBI NO: 30696687 NR Description: expressed protein [Arabidopsis thaliana]
  misc_feature (132)..(350): Homolog of NCBI NO: 30696687 NR Description: expressed protein [Arabidopsis thaliana]
  misc_feature (72)..(350): Homolog of NCBI NO: 15221155 NR Description: putative growth regulator protein; protein id: [Arabidopsis thaliana] >gi|25402697|pir||H86254 hypothetical
  misc_feature (363)..(591): Homolog of NCBI NO: 15221155 NR Description: putative growth regulator protein; protein id: [Arabidopsis thaliana] >gi|25402697|pir||H86254 hypothetical
  misc_feature (363)..(591): Homolog of NCBI NO: 7486106 NR Description: hypothetical protein F24O1.4 - Arabidopsis >gi|7940275|gb|AAF70834.1|AC003113_1 F24O1.5 [Arabidopsis
  misc_feature (187)..(350): Homolog of NCBI NO: 7486106 NR Description: hypothetical protein F24O1.4 - Arabidopsis >gi|7940275|gb|AAF70834.1|AC003113_1 F24O1.5 [Arabidopsis
  misc_feature (122)..(592): Homolog of NCBI NO: 34908166 NR Description: axi 1-like protein [Oryza sativa (japonica
MGKQGSPRSPRPETIDKEEKFGRRSLDSLSGNDLLLGRRIYASEVSKAQGSKHDQSSGSSNKFWKKQHSWLRRNFKSIVLMISVTGFIFCMDSIMVSIFHSDSRAVVQDISRLSNMTLHKNGAVDASPVQMYSRLLNLASDSLAKNEFKPDTPNFREERSSKSSQWKPCADNNKAAVALERSRELSNGYIMVSANGGLNQQRVAICNAVAVAALLNATLVLPRFLYSNVWKDPSQFGDIYQEDHFIEYLKDEVNIVKNLPQHLKSTDNKNLSLVTDTELVKEATPVDYIEHVLPLLKKYGMVHLFGYGNRLGFDPLPFDVQRLRCKCNFHALKFAPKIQEAGSLLVKRIRRFKTSRREEEPLKYLALHLRFEEDMVAYSLCDFGGGEAERKELQAYREDHFPLLLKRLKKSKPVSPEELRKTGKCPLTPEEATLVLAGLGFKRKTYIYLAGSQIYGGSSRMLPLTRLYPNIATKETLLTPQELAPFKNFSSQLAALDFIACIASDVFAMTDSGSQLSSLVSGFRNYYGNGQAPTLRPNKKRLAAILSDSETIKWKIFEDRVRKMVEEGQKLRTRPYGRSIYRQPRCPECMCKF

SEQ ID NO: 86228 - protein, 513 aa, Arabidopsis thaliana
  peptide (1)..(513): Ceres Seq. ID no. 12687725
  misc_feature (154)..(282): Pfam Name: Plant protein family Pfam Description: Plant protein family
  misc_feature (1)..(282): Homolog of NCBI NO: 15218850 NR Description: hypothetical protein; protein id: At1g29200.1
  misc_feature (257)..(513): Homolog of NCBI NO: 15218850 NR Description: hypothetical protein; protein id: At1g29200.1
  misc_feature (1)..(513): Homolog of NCBI NO: 25518128 NR Description: hypothetical protein F12P21.7 - Arabidopsis >gi|9502419|gb|AAF88118.1|AC021043_11 Hypothetical protein
  misc_feature (283)..(511): Homolog of NCBI NO: 30696687 NR Description: expressed protein [Arabidopsis thaliana]
  misc_feature (52)..(270): Homolog of NCBI NO: 30696687 NR Description: expressed protein [Arabidopsis thaliana]
  misc_feature (1)..(270): Homolog of NCBI NO: 15221155 NR Description: putative growth regulator protein; protein id: [Arabidopsis thaliana] >gi|25402697|pir||H86254 hypothetical
  misc_feature (283)..(511): Homolog of NCBI NO: 15221155 NR Description: putative growth regulator protein; protein id: [Arabidopsis thaliana] >gi|25402697|pir||H86254 hypothetical
  misc_feature (283)..(511): Homolog of NCBI NO: 7486106 NR Description: hypothetical protein F24O1.4 - Arabidopsis >gi|7940275|gb|AAF70834.1|AC003113_1 F24O1.5 [Arabidopsis
  misc_feature (107)..(270): Homolog of NCBI NO: 7486106 NR Description: hypothetical protein F24O1.4 - Arabidopsis >gi|7940275|gb|AAF70834.1|AC003113_1 F24O1.5 [Arabidopsis
  misc_feature (42)..(512): Homolog of NCBI NO: 34908166 NR Description: axi 1-like protein [Oryza sativa (japonica
MISVTGFIFCMDSIMVSIFHSDSRAVVQDISRLSNMTLHKNGAVDASPVQMYSRLLNLASDSLAKNEFKPDTPNFREERSSKSSQWKPCADNNKAAVALERSRELSNGYIMVSANGGLNQQRVAICNAVAVAALLNATLVLPRFLYSNVWKDPSQFGDIYQEDHFIEYLKDEVNIVKNLPQHLKSTDNKNLSLVTDTELVKEATPVDYIEHVLPLLKKYGMVHLFGYGNRLGFDPLPFDVQRLRCKCNFHALKFAPKIQEAGSLLVKRIRRFKTSRREEEPLKYLALHLRFEEDMVAYSLCDFGGGEAERKELQAYREDHFPLLLKRLKKSKPVSPEELRKTGKCPLTPEEATLVLAGLGFKRKTYIYLAGSQIYGGSSRMLPLTRLYPNIATKETLLTPQELAPFKNFSSQLAALDFIACIASDVFAMTDSGSQLSSLVSGFRNYYGNGQAPTLRPNKKRLAAILSDSETIKWKIFEDRVRKMVEEGQKLRTRPYGRSIYRQPRCPECMCKF

SEQ ID NO: 86229 - protein, 503 aa, Arabidopsis thaliana
  peptide (1)..(503): Ceres Seq. ID no. 12687726
  misc_feature (144)..(272): Pfam Name: Plant protein family Pfam Description: Plant protein family
  misc_feature (1)..(272): Homolog of NCBI NO: 15218850 NR Description: hypothetical protein; protein id: At1g29200.1
  misc_feature (247)..(503): Homolog of NCBI NO: 15218850 NR Description: hypothetical protein; protein id: At1g29200.1
  misc_feature (1)..(503): Homolog of NCBI NO: 25518128 NR Description: hypothetical protein F12P21.7 - Arabidopsis >gi|9502419|gb|AAF88118.1|AC021043_11 Hypothetical protein
  misc_feature (273)..(501): Homolog of NCBI NO: 30696687 NR Description: expressed protein [Arabidopsis thaliana]
  misc_feature (42)..(260): Homolog of NCBI NO: 30696687 NR Description: expressed protein [Arabidopsis thaliana]
  misc_feature (1)..(260): Homolog of NCBI NO: 15221155 NR Description: putative growth regulator protein; protein id: [Arabidopsis thaliana] >gi|25402697|pir||H86254 hypothetical
  misc_feature (273)..(501): Homolog of NCBI NO: 15221155 NR Description: putative growth regulator protein; protein id: [Arabidopsis thaliana] >gi|25402697|pir||H86254 hypothetical
  misc_feature (273)..(501): Homolog of NCBI NO: 7486106 NR Description: hypothetical protein F24O1.4 - Arabidopsis >gi|7940275|gb|AAF70834.1|AC003113_1 F24O1.5 [Arabidopsis
  misc_feature (97)..(260): Homolog of NCBI NO: 7486106 NR Description: hypothetical protein F24O1.4 - Arabidopsis >gi|7940275|gb|AAF70834.1|AC003113_1 F24O1.5 [Arabidopsis
  misc_feature (32)..(502): Homolog of NCBI NO: 34908166 NR Description: axi 1-like protein [Oryza sativa (japonica
MDSIMVSIFHSDSRAVVQDISRLSNMTLHKNGAVDASPVQMYSRLLNLASDSLAKNEFKPDTPNFREERSSKSSQWKPCADNNKAAVALERSRELSNGYIMVSANGGLNQQRVAICNAVAVAALLNATLVLPRFLYSNVWKDPSQFGDIYQEDHFIEYLKDEVNIVKNLPQHLKSTDNKNLSLVTDTELVKEATPVDYIEHVLPLLKKYGMVHLFGYGNRLGFDPLPFDVQRLRCKCNFHALKFAPKIQEAGSLLVKRIRRFKTSRREEEPLKYLALHLRFEEDMVAYSLCDFGGGEAERKELQAYREDHFPLLLKRLKKSKPVSPEELRKTGKCPLTPEEATLVLAGLGFKRKTYIYLAGSQIYGGSSRMLPLTRLYPNIATKETLLTPQELAPFKNFSSQLAALDFIACIASDVFAMTDSGSQLSSLVSGFRNYYGNGQAPTLRPNKKRLAAILSDSETIKWKIFEDRVRKMVEEGQKLRTRPYGRSIYRQPRCPECMCKF

SEQ ID NO: 86230 - DNA, 1140 bp, Arabidopsis thaliana
  misc_feature (1)..(1140): Ceres Seq. ID no. 12687769
  misc_feature: MA Experiment ID: 20000347 Result: Up-regulated in Transcription
  misc_feature: MA Experiment 20000347 PARAMETER Experiment Name: At_2mM_SA_Sub_P Parameter: Age (day) Value: 14
  misc_feature: MA Experiment 20000347 PARAMETER Experiment Name: At_2mM_SA_Sub_P Parameter: Organism Value: A. thaliana
  misc_feature: MA Experiment 20000347 PARAMETER Experiment Name: At_2mM_SA_Sub_P Parameter: Plant Line Value: WS
  misc_feature: MA Experiment 20000347 PARAMETER Experiment Name: At_2mM_SA_Sub_P Parameter: Timepoint (hr) Value: 6
  misc_feature: MA Experiment 20000347 PARAMETER Experiment Name: At_2mM_SA_Sub_P Parameter: Tissue Value: Aerial
  misc_feature: MA Experiment 20000347 PARAMETER Experiment Name: At_2mM_SA_Sub_P Parameter: Treatment Value: 2mM SA vs. No Treatment
atgaaggtggattttttagtcataaaggttgaaaaactatcttctttgagagttttttatttttttttatttttttttgagagcaaatatgtcgaagatcagaagattaaagatgcaaaattattgcaacttgactttgataccataagattagcaactaatgacttctctccttacaaccatcttggtgaaggtggtttcggtgcagtttataagggcgtccttgattccggggaagagatagctgtgaaaagattgtcaatgaaatcaggacaaggagacaatgagttcgtaaacgaagtctcattggttgcgaaacttcaacatcgtaatcttgttaggcttttaggtttctgttttaaaggagaagaacgacttctcatctatgagttctttaagaacacaagcctcgaaaagttcatatttgattctgatagaagaatgatcttagattgggaaaaacgttataggataatctcaggtgttgctcgaggtcttctctatctccatgaagattctcatttcaaaattattcatagagatatgaaagctagcaatgttctattggacgatgcaatgaatccgaaaatcgcagattttgggatggtaaaattgtttaatactgaccaaacaagtcagaccatgtttacaagcaaagttgcaggaacttacggttacatggctcctgagtatgcaatgagtgggcaattctcggtgaaaaccgacgtatttagtttcggtgtactagtccttgagatcattaaaggtaagaaaaacaattggtctccggaagaacaaagctcattattcctccttagctatgtgtggaaatgctggagagaaggagaagtgttgaacattgtggatccaagtttgattgaaacaagaggtctaagtgatgagatcaggaaatgcattcacattggtttgttgtgtgttcaggagaatccagggagtagaccaacaatggcttctattgttagaatgctcaatgcaaattctttcactttaccgagacccttgcaacccgctttttactcaggagttgtagactcatcgtcaagagacaacaatcatacaagaaacccgcgtattgcgtctttgaatgatgttacaattacggagttagatcctcgttga

SEQ ID NO: 86231 - protein, 379 aa, Arabidopsis thaliana
  peptide (1)..(379): Ceres Seq. ID no. 12687770
  misc_feature (1)..(379): Homolog of NCBI NO: 18411492 NR Description: Similar to receptor kinase; protein id: [Arabidopsis thaliana] >gi|7488290|pir||T01551 receptor kinase
  misc_feature (2)..(379): Homolog of NCBI NO: 30678781 NR Description: Similar to receptor kinase [Arabidopsis thaliana]
  misc_feature (29)..(379): Homolog of NCBI NO: 7488289 NR Description: receptor kinase homolog A_TM018A10.18 - thaliana >gi|2252862|gb|AAB62860.1| Similar to receptor kinase thaliana] >gi|7267594|emb|CAB80906.1| Similar to receptor
  misc_feature (141)..(379): Homolog of NCBI NO: 15234434 NR Description: serine threonine protein kinase - like protein; id: At4g21400.1 [Arabidopsis thaliana] >gi|7488245|pir||T05148
  misc_feature (34)..(142): Homolog of NCBI NO: 15234434 NR Description: serine threonine protein kinase - like protein; id: At4g21400.1 [Arabidopsis thaliana] >gi|7488245|pir||T05148
  misc_feature (31)..(379): Homolog of NCBI NO: 22328852 NR Description: serine threonine kinase - like protein; protein At4g21410.1, supported by cDNA: gi_18650593 [Arabidopsis >gi|18650594|gb|AAL75897.1| AT4g21410/T6K22_140 [Arabidopsis
  misc_feature (18)..(379): Homolog of NCBI NO: 7488246 NR Description: protein kinase homolog F18E5.30 - Arabidopsis >gi|3080385|emb|CAA18705.1| serine/threonine protein kinase
  misc_feature (18)..(379): Homolog of NCBI NO: 7488195 NR Description: probable serine/threonine-specific protein kinase
  misc_feature (24)..(379): Homolog of NCBI NO: 24417476 NR Description: unknown [Arabidopsis thaliana]
  misc_feature (24)..(379): Homolog of NCBI NO: 30686087 NR Description: serine/threonine kinase -related protein
MKVDFLVIKVEKLSSLRVFYFFLFFFESKYVEDQKIKDAKLLQLDFDTIRLATNDFSPYNHLGEGGFGAVYKGVLDSGEEIAVKRLSMKSGQGDNEFVNEVSLVAKLQHRNLVRLLGFCFKGEERLLIYEFFKNTSLEKFIFDSDRRMILDWEKRYRIISGVARGLLYLHEDSHFKIIHRDMKASNVLLDDAMNPKIADFGMVKLFNTDQTSQTMFTSKVAGTYGYMAPEYAMSGQFSVKTDVFSFGVLVLEIIKGKKNNWSPEEQSSLFLLSYVWKCWREGEVLNIVDPSLIETRGLSDEIRKCIHIGLLCVQENPGSRPTMASIVRMLNANSFTLPRPLQPAFYSGVVDSSSRDNNHTRNPRIASLNDVTITELDPR

SEQ ID NO: 86232 - protein, 292 aa, Arabidopsis thaliana
  peptide (1)..(292): Ceres Seq. ID no. 12687771
  misc_feature (1)..(292): Homolog of NCBI NO: 18411492 NR Description: Similar to receptor kinase; protein id: [Arabidopsis thaliana] >gi|7488290|pir||T01551 receptor kinase
  misc_feature (1)..(292): Homolog of NCBI NO: 30678781 NR Description: Similar to receptor kinase [Arabidopsis thaliana]
  misc_feature (1)..(292): Homolog of NCBI NO: 7488289 NR Description: receptor kinase homolog A_TM018A10.18 - thaliana >gi|2252862|gb|AAB62860.1| Similar to receptor kinase thaliana] >gi|7267594|emb|CAB80906.1| Similar to receptor
  misc_feature (54)..(292): Homolog of NCBI NO: 15234434 NR Description: serine threonine protein kinase - like protein; id: At4g21400.1 [Arabidopsis thaliana] >gi|7488245|pir||T05148
  misc_feature (1)..(55): Homolog of NCBI NO: 15234434 NR Description: serine threonine protein kinase - like protein; id: At4g21400.1 [Arabidopsis thaliana] >gi|7488245|pir||T05148
  misc_feature (1)..(292): Homolog of NCBI NO: 22328852 NR Description: serine threonine kinase - like protein; protein At4g21410.1, supported by cDNA: gi_18650593 [Arabidopsis >gi|18650594|gb|AAL75897.1| AT4g21410/T6K22_140 [Arabidopsis
  misc_feature (1)..(292): Homolog of NCBI NO: 7488246 NR Description: protein kinase homolog F18E5.30 - Arabidopsis >gi|3080385|emb|CAA18705.1| serine/threonine protein kinase
  misc_feature (1)..(292): Homolog of NCBI NO: 7488195 NR Description: probable serine/threonine-specific protein kinase
  misc_feature (1)..(292): Homolog of NCBI NO: 24417476 NR Description: unknown [Arabidopsis thaliana]
  misc_feature (1)..(292): Homolog of NCBI NO: 30686087 NR Description: serine/threonine kinase -related protein
MKSGQGDNEFVNEVSLVAKLQHRNLVRLLGFCFKGEERLLIYEFFKNTSLEKFIFDSDRRMILDWEKRYRIISGVARGLLYLHEDSHFKIIHRDMKASNVLLDDAMNPKIADFGMVKLFNTDQTSQTMFTSKVAGTYGYMAPEYAMSGQFSVKTDVFSFGVLVLEIIKGKKNNWSPEEQSSLFLLSYVWKCWREGEVLNIVDPSLIETRGLSDEIRKCIHIGLLCVQENPGSRPTMASIVRMLNANSFTLPRPLQPAFYSGVVDSSSRDNNHTRNPRIASLNDVTITELDPR

SEQ ID NO: 86233 - protein, 232 aa, Arabidopsis thaliana; identical to SEQ ID NO: 69398
  peptide (1)..(232): Ceres Seq. ID no. 12687772
  misc_feature (1)..(232): Homolog of NCBI NO: 18411492 NR Description: Similar to receptor kinase; protein id: [Arabidopsis thaliana] >gi|7488290|pir||T01551 receptor kinase
  misc_feature (1)..(232): Homolog of NCBI NO: 30678781 NR Description: Similar to receptor kinase [Arabidopsis thaliana]
  misc_feature (1)..(232): Homolog of NCBI NO: 7488289 NR Description: receptor kinase homolog A_TM018A10.18 - thaliana >gi|2252862|gb|AAB62860.1| Similar to receptor kinase thaliana] >gi|7267594|emb|CAB80906.1| Similar to receptor
  misc_feature (1)..(232): Homolog of NCBI NO: 15234434 NR Description: serine threonine protein kinase - like protein; id: At4g21400.1 [Arabidopsis thaliana] >gi|7488245|pir||T05148
  misc_feature (1)..(232): Homolog of NCBI NO: 22328852 NR Description: serine threonine kinase - like protein; protein At4g21410.1, supported by cDNA: gi_18650593 [Arabidopsis >gi|18650594|gb|AAL75897.1| AT4g21410/T6K22_140 [Arabidopsis
  misc_feature (1)..(232): Homolog of NCBI NO: 7488246 NR Description: protein kinase homolog F18E5.30 - Arabidopsis >gi|3080385|emb|CAA18705.1| serine/threonine protein kinase
  misc_feature (1)..(232): Homolog of NCBI NO: 7488195 NR Description: probable serine/threonine-specific protein kinase
  misc_feature (1)..(232): Homolog of NCBI NO: 24417476 NR Description: unknown [Arabidopsis thaliana]
  misc_feature (1)..(232): Homolog of NCBI NO: 30686087 NR Description: serine/threonine kinase -related protein
  misc_feature (1)..(232): Homolog of NCBI NO: 18076589 NR Description: putative receptor-like serine-threonine protein

SEQ ID NO: 86234 - DNA, 2028 bp, Arabidopsis thaliana
  misc_feature (1)..(2028): Ceres Seq. ID no. 12687773
  misc_feature: MA Experiment ID: 20000169 Result: Up-regulated in Transcription
  misc_feature: MA Experiment 20000169 PARAMETER Experiment Name: At_100uM_ABA_P Parameter: Age (day) Value: 14
  misc_feature: MA Experiment 20000169 PARAMETER Experiment Name: At_100uM_ABA_P Parameter: Organism Value: A. thaliana
  misc_feature: MA Experiment 20000169 PARAMETER Experiment Name: At_100uM_ABA_P Parameter: Plant Line Value: WS
  misc_feature: MA Experiment 20000169 PARAMETER Experiment Name: At_100uM_ABA_P Parameter: Timepoint (hr) Value: 6
  misc_feature: MA Experiment 20000169 PARAMETER Experiment Name: At_100uM_ABA_P Parameter: Tissue Value: Aerial
  misc_feature: MA Experiment 20000169 PARAMETER Experiment Name: At_100uM_ABA_P Parameter: Treatment Value: 100uM ABA vs. No Treatment
  misc_feature: MA Experiment ID: 20000171 Result: Down-regulated in Transcription
  misc_feature: MA Experiment 20000171 PARAMETER Experiment Name: At_42deg_Heat_P Parameter: Age (day) Value: 14
  misc_feature: MA Experiment 20000171 PARAMETER Experiment Name: At_42deg_Heat_P Parameter: Organism Value: A. thaliana
  misc_feature: MA Experiment 20000171 PARAMETER Experiment Name: At_42deg_Heat_P Parameter: Plant Line Value: WS
  misc_feature: MA Experiment 20000171 PARAMETER Experiment Name: At_42deg_Heat_P Parameter: Temperature (deg C) Value: 42 vs. 22
  misc_feature: MA Experiment 20000171 PARAMETER Experiment Name: At_42deg_Heat_P Parameter: Timepoint (hr) Value: 1
  misc_feature: MA Experiment 20000171 PARAMETER Experiment Name: At_42deg_Heat_P Parameter: Tissue Value: Aerial
  misc_feature: MA Experiment ID: 20000184 Result: Down-regulated in Transcription
  misc_feature: MA Experiment 20000184 PARAMETER Experiment Name: At_Shoots__P Parameter: Age (day) Value: 7
  misc_feature: MA Experiment 20000184 PARAMETER Experiment Name: At_Shoots__P Parameter: Tissue Value: Shoots vs. Whole Plant
  misc_feature: MA Experiment ID: 20000211 Result: Down-regulated in Transcription
  misc_feature: MA Experiment 20000211 PARAMETER Experiment Name: At_0.001percent_MeJA__P Parameter: Age (day) Value: 14
  misc_feature: MA Experiment 20000211 PARAMETER Experiment Name: At_0.001percent_MeJA__P Parameter: Organism Value: A. thaliana
  misc_feature: MA Experiment 20000211 PARAMETER Experiment Name: At_0.001percent_MeJA__P Parameter: Plant Line Value: WS
  misc_feature: MA Experiment 20000211 PARAMETER Experiment Name: At_0.001percent_MeJA__P Parameter: Timepoint (hr) Value: 1
  misc_feature: MA Experiment 20000211 PARAMETER Experiment Name: At_0.001percent_MeJA__P Parameter: Tissue Value: Aerial
  misc_feature: MA Experiment 20000211 PARAMETER Experiment Name: At_0.001percent_MeJA__P Parameter: Treatment Value: 0.001percent MeJA vs. No Treatment
  misc_feature: MA Experiment ID: 20000234 Result: Down-regulated in Transcription
  misc_feature: MA Experiment 20000234 PARAMETER Experiment Name: At_Siliques_P Parameter: Age (day) Value: 21
  misc_feature: MA Experiment 20000234 PARAMETER Experiment Name: At_Siliques_P Parameter: Organism Value: A. thaliana
  misc_feature: MA Experiment 20000234 PARAMETER Experiment Name: At_Siliques_P Parameter: Plant Line Value: WS
  misc_feature: MA Experiment 20000234 PARAMETER Experiment Name: At_Siliques_P Parameter: Tissue Value: Less Than 5mm Siliques vs. Whole Plant
  misc_feature: MA Experiment ID: 20000286 Result: Down-regulated in Transcription
  misc_feature: MA Experiment 20000286 PARAMETER Experiment Name: At_Open_Flower_P Parameter: Age (day) Value: 21
  misc_feature: MA Experiment 20000286 PARAMETER Experiment Name: At_Open_Flower_P Parameter: Plant Line Value: WS
  misc_feature: MA Experiment 20000286 PARAMETER Experiment Name: At_Open_Flower_P Parameter: Tissue Value: Half Open vs. Whole Plant
  misc_feature: MA Experiment ID: 20000438 Result: Down-regulated in Transcription
  misc_feature: MA Experiment 20000438 PARAMETER Experiment Name: At_Shoots__P Parameter: Age (day) Value: 14
  misc_feature: MA Experiment 20000438 PARAMETER Experiment Name: At_Shoots__P Parameter: Tissue Value: Shoots vs. Whole Plant
  misc_feature: MA Experiment ID: 20000439 Result: Down-regulated in Transcription
  misc_feature: MA Experiment 20000439 PARAMETER Experiment Name: At_Roots__P Parameter: Age (day) Value: 14 vs. 21
  misc_feature: MA Experiment 20000439 PARAMETER Experiment Name: At_Roots__P Parameter: Organism Value: A. thaliana
  misc_feature: MA Experiment 20000439 PARAMETER Experiment Name: At_Roots__P Parameter: Tissue Value: Roots vs. Whole Plant
  misc_feature: MA Experiment ID: 20000709 Result: Down-regulated in Transcription
  misc_feature: MA Experiment 20000709 PARAMETER Experiment Name: At_15mM_NH4NO3_L-to-H_P Parameter: Age (hr) Value: 14
  misc_feature: MA Experiment 20000709 PARAMETER Experiment Name: At_15mM_NH4NO3_L-to-H_P Parameter: Organism Value: A. thaliana
  misc_feature: MA Experiment 20000709 PARAMETER Experiment Name: At_15mM_NH4NO3_L-to-H_P Parameter: Plant Line Value: WS
  misc_feature: MA Experiment 20000709 PARAMETER Experiment Name: At_15mM_NH4NO3_L-to-H_P Parameter: Timepoint (hr) Value: 4
  misc_feature: MA Experiment 20000709 PARAMETER Experiment Name: At_15mM_NH4NO3_L-to-H_P Parameter: Tissue Value: Aerial
  misc_feature: MA Experiment 20000709 PARAMETER Experiment Name: At_15mM_NH4NO3_L-to-H_P Parameter: Treatment Value: 15mM NH4NO3 vs. 30mM Mannitol
  misc_feature: MA Experiment ID: 20001560 Result: Down-regulated in Transcription
  misc_feature: MA Experiment 20001560 PARAMETER Experiment Name: At_Drought_Soil_Dry_P Parameter: Age (day) Value: 28
  misc_feature: MA Experiment 20001560 PARAMETER Experiment Name: At_Drought_Soil_Dry_P Parameter: Organism Value: A. thaliana
  misc_feature: MA Experiment 20001560 PARAMETER Experiment Name: At_Drought_Soil_Dry_P Parameter: Plant Line Value: WS
  misc_feature: MA Experiment 20001560 PARAMETER Experiment Name: At_Drought_Soil_Dry_P Parameter: Post Timepoint (hr) Value: None
  misc_feature: MA Experiment 20001560 PARAMETER Experiment Name: At_Drought_Soil_Dry_P Parameter: Post-Treatment Value: None
  misc_feature: MA Experiment 20001560 PARAMETER Experiment Name: At_Drought_Soil_Dry_P Parameter: Timepoint (day) Value: 14
  misc_feature: MA Experiment 20001560 PARAMETER Experiment Name: At_Drought_Soil_Dry_P Parameter: Treatment Value: Drought vs. No Drought
  misc_feature: MA Experiment ID: 20001773 Result: Down-regulated in Transcription
  misc_feature: MA Experiment 20001773 PARAMETER Experiment Name: At_Far-red-enriched-adult_P Parameter: Age (day) Value: 30
  misc_feature: MA Experiment 20001773 PARAMETER Experiment Name: At_Far-red-enriched-adult_P Parameter: Light Value: Far-red enriched vs. White
  misc_feature: MA Experiment 20001773 PARAMETER Experiment Name: At_Far-red-enriched-adult_P Parameter: Organism Value: A. thaliana
  misc_feature: MA Experiment 20001773 PARAMETER Experiment Name: At_Far-red-enriched-adult_P Parameter: Plant Line Value: Columbia
  misc_feature: MA Experiment 20001773 PARAMETER Experiment Name: At_Far-red-enriched-adult_P Parameter: Timepoint (hr) Value: 48
  misc_feature: MA Experiment 20001773 PARAMETER Experiment Name: At_Far-red-enriched-adult_P Parameter: Tissue Value: Aerial
  misc_feature: MA Experiment ID: 20001904 Result: Down-regulated in Transcription
  misc_feature: MA Experiment 20001904 PARAMETER Experiment Name: At_Drought_Reproduction_P Parameter: Age (day) Value: 37
  misc_feature: MA Experiment 20001904 PARAMETER Experiment Name: At_Drought_Reproduction_P Parameter: Organism Value: A. thaliana
  misc_feature: MA Experiment 20001904 PARAMETER Experiment Name: At_Drought_Reproduction_P Parameter: Plant Line Value: WS
  misc_feature: MA Experiment 20001904 PARAMETER Experiment Name: At_Drought_Reproduction_P Parameter: Timepoint (day) Value: 7
  misc_feature: MA Experiment 20001904 PARAMETER Experiment Name: At_Drought_Reproduction_P Parameter: Tissue Value: Rosettes
  misc_feature: MA Experiment 20001904 PARAMETER Experiment Name: At_Drought_Reproduction_P Parameter: Treatment Value: Drought vs. No Drought
atgactagttcttgttctttgtctcgaccacaacacttgttctttttcttcttcttgttcgtcccatttcttagcttaggacaacaaatctccgtcgacataaacagtgctatatgggaatttccctcgaatccattatgtttatcccaacaaagcaactttgccaaatcatcccaattctccaaaaacctagacagtcttgtctcttcgatcccttctctcaagtccaacacttacaacttctacagtctctctgtcggaagtatctcggatcaagaacgagtcgaggccatcgggatctgcaacagagtagtcaatcgagtagattgccttaactgtattgctcaagccgcagtgaatctaaccacaatgtactgcccacaacataggggagcttacgtgcgagccacgaaatgtatgtttcgttactcagacaaacccattttcgggaaactcgaaacgagtcctgttctggaagcaccaaatccgagcaatgctacgggagatagaaacgagtttattcggttgcagagcgagttacttaaccgactcagatccatggctgcatcaggtggctctaagaggaagtatgctcaaggaactgatcctggctctccaccttacaccacattctttggtgccgtgcagtgcacgccggatttatctgagaaagactgcaacgactgtctctcttatggtttcagtaacgcgaccaaaggaagagttggtatcaggtggttttgtccaagctgtaattttcagatagagagtgacttgagattcttccttctcgactccgagtatgagcctgatccaaaaccagtgtatgtcttgacaaatttaatcttagcaggaaatgacaaagtaaaaatcattattgccaccgtttgctctgttattggttttgctataatcgcagtctttctttacttctttatgacaaggaacagaagaacggcaaaacagagacatgaaggcaaagatcttgaagagcttatgattaaagatgcacaattattgcaacttgactttgataccataagattagcaactaatgacttctctcgtgacaatcaacttggagaaggtggcttcggtgcagtttataagggtgttcttgattatggggaagagatagctgtgaaaagattgtcaatgaaatcaggacaaggagacaatgagttcataaacgaagtctcattggttgcaaaactccaacatcgtaaccttgttaggctcttaggtttctgcttacaaggagaagaacgaattctcatctatgagttcttcaagaacacaagcctagaccattacatatttgattctaataggagaatgatcttagattgggaaacacgttataggattatctcaggtgttgctagaggtcttctctatctccatgaagattctcgtttcaagattgttcatagagatatgaaagccagcaatgttctattggacgatgcaatgaatccgaaaatcgcggattttggaatggcaaagttgtttgatactgaccaaacaagtcagaccaggtttacaagcaaagttgcaggaacctacggttacatggctccagagtatgcaatgagtggcgaattctcggtaaaaaccgatgtatttagcttcggtgtactagtccttgagattattaaaggtaagaaaaacaattggtctccagaagaagacagctcattattcctccttagctatgtatggaagagctggagagaaggggaagtgttaaacattgtggatccaagtttggttgaaacaataggtgtcagtgatgaaatcatgaaatgcattcacattggtttgttgtgtgttcaggagaatgcagagagtagaccaacaatggcttctgttgttgtaatgctcaatgcaaattctttcactttaccgagaccctcgcaacccgcattttactcgggagatggagaatcattgtcaagagacaaaaatcagataaatcatattgcatctttgaatgatgttacaattaccgagttcgatgctcgttaa

SEQ ID NO: 86235 - protein, 675 aa, Arabidopsis thaliana
  peptide (1)..(675): Ceres Seq. ID no. 12687774
  misc_feature (187)..(675): Homolog of NCBI NO: 30678781 NR Description: Similar to receptor kinase [Arabidopsis thaliana]
  misc_feature (288)..(675): Homolog of NCBI NO: 7488289 NR Description: receptor kinase homolog A_TM018A10.18 - thaliana >gi|2252862|gb|AAB62860.1| Similar to receptor kinase thaliana] >gi|7267594|emb|CAB80906.1| Similar to receptor
  misc_feature (325)..(675): Homolog of NCBI NO: 18411492 NR Description: Similar to receptor kinase; protein id: [Arabidopsis thaliana] >gi|7488290|pir||T01551 receptor kinase
  misc_feature (47)..(645): Homolog of NCBI NO: 4530126 NR Description: receptor-like protein kinase homolog RK20-1
  misc_feature (19)..(666): Homolog of NCBI NO: 15234824 NR Description: receptor-like protein kinase - like protein; id: At4g38830.1 [Arabidopsis thaliana] >gi|7488277|pir||T06082
  misc_feature (13)..(343): Homolog of NCBI NO: 15234434 NR Description: serine threonine protein kinase - like protein; id: At4g21400.1 [Arabidopsis thaliana] >gi|7488245|pir||T05148
  misc_feature (435)..(675): Homolog of NCBI NO: 15234434 NR Description: serine threonine protein kinase - like protein; id: At4g21400.1 [Arabidopsis thaliana] >gi|7488245|pir||T05148
  misc_feature (53)..(644): Homolog of NCBI NO: 18076585 NR Description: putative receptor-like serine-threonine protein
  misc_feature (53)..(644): Homolog of NCBI NO: 18076589 NR Description: putative receptor-like serine-threonine protein
  misc_feature (11)..(573): Homolog of NCBI NO: 7488246 NR Description: protein kinase homolog F18E5.30 - Arabidopsis >gi|3080385|emb|CAA18705.1| serine/threonine protein kinase
MTSSCSLSRPQHLFFFFFLFVPFLSLGQQISVDINSAIWEFPSNPLCLSQQSNFAKSSQFSKNLDSLVSSIPSLKSNTYNFYSLSVGSISDQERVEAIGICNRVVNRVDCLNCIAQAAVNLTTMYCPQHRGAYVRATKCMFRYSDKPIFGKLETSPVLEAPNPSNATGDRNEFIRLQSELLNRLRSMAASGGSKRKYAQGTDPGSPPYTTFFGAVQCTPDLSEKDCNDCLSYGFSNATKGRVGIRWFCPSCNFQIESDLRFFLLDSEYEPDPKPVYVLTNLILAGNDKVKIIIATVCSVIGFAIIAVFLYFFMTRNRRTAKQRHEGKDLEELMIKDAQLLQLDFDTIRLATNDFSRDNQLGEGGFGAVYKGVLDYGEEIAVKRLSMKSGQGDNEFINEVSLVAKLQHRNLVRLLGFCLQGEERILIYEFFKNTSLDHYIFDSNRRMILDWETRYRIISGVARGLLYLHEDSRFKIVHRDMKASNVLLDDAMNPKIADFGMAKLFDTDQTSQTRFTSKVAGTYGYMAPEYAMSGEFSVKTDVFSFGVLVLEIIKGKKNNWSPEEDSSLFLLSYVWKSWREGEVLNIVDPSLVETIGVSDEIMKCIHIGLLCVQENAESRPTMASVVVMLNANSFTLPRPSQPAFYSGDGESLSRDKNQINHIASLNDVTITEFDAR

SEQ ID NO: 86236 - protein, 552 aa, Arabidopsis thaliana
  peptide (1)..(552): Ceres Seq. ID no. 12687775
  misc_feature (64)..(552): Homolog of NCBI NO: 30678781 NR Description: Similar to receptor kinase [Arabidopsis thaliana]
  misc_feature (165)..(552): Homolog of NCBI NO: 7488289 NR Description: receptor kinase homolog A_TM018A10.18 - thaliana >gi|2252862|gb|AAB62860.1| Similar to receptor kinase thaliana] >gi|7267594|emb|CAB80906.1| Similar to receptor
  misc_feature (202)..(552): Homolog of NCBI NO: 18411492 NR Description: Similar to receptor kinase; protein id: [Arabidopsis thaliana] >gi|7488290|pir||T01551 receptor kinase
  misc_feature (1)..(522): Homolog of NCBI NO: 4530126 NR Description: receptor-like protein kinase homolog RK20-1
  misc_feature (1)..(543): Homolog of NCBI NO: 15234824 NR Description: receptor-like protein kinase - like protein; id: At4g38830.1 [Arabidopsis thaliana] >gi|7488277|pir||T06082
  misc_feature (1)..(220): Homolog of NCBI NO: 15234434 NR Description: serine threonine protein kinase - like protein; id: At4g21400.1 [Arabidopsis thaliana] >gi|7488245|pir||T05148
  misc_feature (312)..(552): Homolog of NCBI NO: 15234434 NR Description: serine threonine protein kinase - like protein; id: At4g21400.1 [Arabidopsis thaliana] >gi|7488245|pir||T05148
  misc_feature (1)..(521): Homolog of NCBI NO: 18076585 NR Description: putative receptor-like serine-threonine protein
  misc_feature (1)..(521): Homolog of NCBI NO: 18076589 NR Description: putative receptor-like serine-threonine protein
  misc_feature (1)..(450): Homolog of NCBI NO: 7488246 NR Description: protein kinase homolog F18E5.30 - Arabidopsis >gi|3080385|emb|CAA18705.1| serine/threonine protein kinase
MYCPQHRGAYVRATKCMFRYSDKPIFGKLETSPVLEAPNPSNATGDRNEFIRLQSELLNRLRSMAASGGSKRKYAQGTDPGSPPYTTFFGAVQCTPDLSEKDCNDCLSYGFSNATKGRVGIRWFCPSCNFQIESDLRFFLLDSEYEPDPKPVYVLTNLILAGNDKVKIIIATVCSVIGFAIIAVFLYFFMTRNRRTAKQRHEGKDLEELMIKDAQLLQLDFDTIRLATNDFSRDNQLGEGGFGAVYKGVLDYGEEIAVKRLSMKSGQGDNEFINEVSLVAKLQHRNLVRLLGFCLQGEERILIYEFFKNTSLDHYIFDSNRRMILDWETRYRIISGVARGLLYLHEDSRFKIVHRDMKASNVLLDDAMNPKIADFGMAKLFDTDQTSQTRFTSKVAGTYGYMAPEYAMSGEFSVKTDVFSFGVLVLEIIKGKKNNWSPEEDSSLFLLSYVWKSWREGEVLNIVDPSLVETIGVSDEIMKCIHIGLLCVQENAESRPTMASVVVMLNANSFTLPRPSQPAFYSGDGESLSRDKNQINHIASLNDVTITEFDAR

SEQ ID NO: 86237 - protein, 536 aa, Arabidopsis thaliana
  peptide (1)..(536): Ceres Seq. ID no. 12687776
  misc_feature (48)..(536): Homolog of NCBI NO: 30678781 NR Description: Similar to receptor kinase [Arabidopsis thaliana]
  misc_feature (149)..(536): Homolog of NCBI NO: 7488289 NR Description: receptor kinase homolog A_TM018A10.18 - thaliana >gi|2252862|gb|AAB62860.1| Similar to receptor kinase thaliana] >gi|7267594|emb|CAB80906.1| Similar to receptor
  misc_feature (186)..(536): Homolog of NCBI NO: 18411492 NR Description: Similar to receptor kinase; protein id: [Arabidopsis thaliana] >gi|7488290|pir||T01551 receptor kinase
  misc_feature (1)..(506): Homolog of NCBI NO: 4530126 NR Description: receptor-like protein kinase homolog RK20-1
  misc_feature (1)..(527): Homolog of NCBI NO: 15234824 NR Description: receptor-like protein kinase - like protein; id: At4g38830.1 [Arabidopsis thaliana] >gi|7488277|pir||T06082
  misc_feature (1)..(204): Homolog of NCBI NO: 15234434 NR Description: serine threonine protein kinase - like protein; id: At4g21400.1 [Arabidopsis thaliana] >gi|7488245|pir||T05148
  misc_feature (296)..(536): Homolog of NCBI NO: 15234434 NR Description: serine threonine protein kinase - like protein; id: At4g21400.1 [Arabidopsis thaliana] >gi|7488245|pir||T05148
  misc_feature (1)..(505): Homolog of NCBI NO: 18076585 NR Description: putative receptor-like serine-threonine protein
  misc_feature (1)..(505): Homolog of NCBI NO: 18076589 NR Description: putative receptor-like serine-threonine protein
  misc_feature (1)..(434): Homolog of NCBI NO: 7488246 NR Description: protein kinase homolog F18E5.30 - Arabidopsis >gi|3080385|emb|CAA18705.1| serine/threonine protein kinase
MFRYSDKPIFGKLETSPVLEAPNPSNATGDRNEFIRLQSELLNRLRSMAASGGSKRKYAQGTDPGSPPYTTFFGAVQCTPDLSEKDCNDCLSYGFSNATKGRVGIRWFCPSCNFQIESDLRFFLLDSEYEPDPKPVYVLTNLILAGNDKVKIIIATVCSVIGFAIIAVFLYFFMTRNRRTAKQRHEGKDLEELMIKDAQLLQLDFDTIRLATNDFSRDNQLGEGGFGAVYKGVLDYGEEIAVKRLSMKSGQGDNEFINEVSLVAKLQHRNLVRLLGFCLQGEERILIYEFFKNTSLDHYIFDSNRRMILDWETRYRIISGVARGLLYLHEDSRFKIVHRDMKASNVLLDDAMNPKIADFGMAKLFDTDQTSQTRFTSKVAGTYGYMAPEYAMSGEFSVKTDVFSFGVLVLEIIKGKKNNWSPEEDSSLFLLSYVWKSWREGEVLNIVDPSLVETIGVSDEIMKCIHIGLLCVQENAESRPTMASVVVMLNANSFTLPRPSQPAFYSGDGESLSRDKNQINHIASLNDVTITEFDAR

SEQ ID NO: 86238 - DNA, 1626 bp, Arabidopsis thaliana
  misc_feature (1)..(1626): Ceres Seq. ID no. 12687825
  misc_feature: MA Experiment ID: 20000307 Result: Up-regulated in Transcription
  misc_feature: MA Experiment 20000307 PARAMETER Experiment Name: At_Germinating_Seeds_Sub_P Parameter: Age (hr) Value: 24 vs. 0
  misc_feature: MA Experiment 20000307 PARAMETER Experiment Name: At_Germinating_Seeds_Sub_P Parameter: Organism Value: A. thaliana
  misc_feature: MA Experiment 20000307 PARAMETER Experiment Name: At_Germinating_Seeds_Sub_P Parameter: Plant Line Value: WS
  misc_feature: MA Experiment 20000307 PARAMETER Experiment Name: At_Germinating_Seeds_Sub_P Parameter: Tissue Value: Germinating Seeds
  misc_feature: MA Experiment ID: 20000327 Result: Down-regulated in Transcription
  misc_feature: MA Experiment 20000327 PARAMETER Experiment Name: At_42deg_Heat_Sub_P Parameter: Age (day) Value: 14
  misc_feature: MA Experiment 20000327 PARAMETER Experiment Name: At_42deg_Heat_Sub_P Parameter: Organism Value: A. thaliana
  misc_feature: MA Experiment 20000327 PARAMETER Experiment Name: At_42deg_Heat_Sub_P Parameter: Plant Line Value: WS
  misc_feature: MA Experiment 20000327 PARAMETER Experiment Name: At_42deg_Heat_Sub_P Parameter: Temperature (deg C) Value: 42 vs. 22
  misc_feature: MA Experiment 20000327 PARAMETER Experiment Name: At_42deg_Heat_Sub_P Parameter: Timepoint (hr) Value: 1
  misc_feature: MA Experiment 20000327 PARAMETER Experiment Name: At_42deg_Heat_Sub_P Parameter: Tissue Value: Aerial
  misc_feature: MA Experiment ID: 20000328 Result: Down-regulated in Transcription
  misc_feature: MA Experiment 20000328 PARAMETER Experiment Name: At_42deg_Heat_Sub_P Parameter: Age (day) Value: 14
  misc_feature: MA Experiment 20000328 PARAMETER Experiment Name: At_42deg_Heat_Sub_P Parameter: Organism Value: A. thaliana
  misc_feature: MA Experiment 20000328 PARAMETER Experiment Name: At_42deg_Heat_Sub_P Parameter: Plant Line Value: WS
  misc_feature: MA Experiment 20000328 PARAMETER Experiment Name: At_42deg_Heat_Sub_P Parameter: Temperature (deg C) Value: 42 vs. 22
  misc_feature: MA Experiment 20000328 PARAMETER Experiment Name: At_42deg_Heat_Sub_P Parameter: Timepoint (hr) Value: 6
  misc_feature: MA Experiment 20000328 PARAMETER Experiment Name: At_42deg_Heat_Sub_P Parameter: Tissue Value: Aerial
  misc_feature: MA Experiment ID: 20000329 Result: Down-regulated in Transcription
  misc_feature: MA Experiment 20000329 PARAMETER Experiment Name: At_4deg_Cold_Sub_P Parameter: Age (day) Value: 14
  misc_feature: MA Experiment 20000329 PARAMETER Experiment Name: At_4deg_Cold_Sub_P Parameter: Organism Value: A. thaliana
  misc_feature: MA Experiment 20000329 PARAMETER Experiment Name: At_4deg_Cold_Sub_P Parameter: Plant Line Value: WS
  misc_feature: MA Experiment 20000329 PARAMETER Experiment Name: At_4deg_Cold_Sub_P Parameter: Temperature (deg C) Value: 4 vs. 22
  misc_feature: MA Experiment 20000329 PARAMETER Experiment Name: At_4deg_Cold_Sub_P Parameter: Timepoint (hr) Value: 6
  misc_feature: MA Experiment 20000329 PARAMETER Experiment Name: At_4deg_Cold_Sub_P Parameter: Tissue Value: Aerial
  misc_feature: MA Experiment ID: 20000332 Result: Down-regulated in Transcription
  misc_feature: MA Experiment 20000332 PARAMETER Experiment Name: At_4deg_Cold_Sub_P Parameter: Age (day) Value: 14
  misc_feature: MA Experiment 20000332 PARAMETER Experiment Name: At_4deg_Cold_Sub_P Parameter: Organism Value: A. thaliana
  misc_feature: MA Experiment 20000332 PARAMETER Experiment Name: At_4deg_Cold_Sub_P Parameter: Plant Line Value: WS
  misc_feature: MA Experiment 20000332 PARAMETER Experiment Name: At_4deg_Cold_Sub_P Parameter: Temperature (deg C) Value: 4 vs. 22
  misc_feature: MA Experiment 20000332 PARAMETER Experiment Name: At_4deg_Cold_Sub_P Parameter: Timepoint (hr) Value: 2
  misc_feature: MA Experiment 20000332 PARAMETER Experiment Name: At_4deg_Cold_Sub_P Parameter: Tissue Value: Aerial
  misc_feature: MA Experiment ID: 20000347 Result: Down-regulated in Transcription
  misc_feature: MA Experiment 20000347 PARAMETER Experiment Name: At_2mM_SA_Sub_P Parameter: Age (day) Value: 14
  misc_feature: MA Experiment 20000347 PARAMETER Experiment Name: At_2mM_SA_Sub_P Parameter: Organism Value: A. thaliana
  misc_feature: MA Experiment 20000347 PARAMETER Experiment Name: At_2mM_SA_Sub_P Parameter: Plant Line Value: WS
  misc_feature: MA Experiment 20000347 PARAMETER Experiment Name: At_2mM_SA_Sub_P Parameter: Timepoint (hr) Value: 6
  misc_feature: MA Experiment 20000347 PARAMETER Experiment Name: At_2mM_SA_Sub_P Parameter: Tissue Value: Aerial
  misc_feature: MA Experiment 20000347 PARAMETER Experiment Name: At_2mM_SA_Sub_P Parameter: Treatment Value: 2mM SA vs. No Treatment
atgtctatattcaatcctgattcaatcaacaacgagctatcgaaaccaacatcgatctttggtctaaagctttgggtcgtcatcggaattttactaggatctcttatagtcatcgctctcttctttctctccctctgtttaacctctcgccggagaaaccgtaagccacgtcacgccgatttcgcatccgcagccgtagcaacgccgccgatttcaaaggagattcaggagatcgttagacctcctgcgcaagaccattgccatccgacgcagcccgttgcggcggagattcaagtggatatagggaagaccgagcaccgtgttgtgttctcggatcgagtctcgagtggtgaaagcagaggaacggttagtgaaacggcgtcgtattcagggagtggttgtgttggacctgaggtttcgcatcttggttggggaagatggtatactcttagagagcttgaagcagctactaatggattgtgtgaagagaatgtgatcggagaaggaggttatgggattgtttatagtgggattttaactgatggaactaaagtcgctgtcaagaatctgcttaacaacaggggtcaagctgagaaggagtttagagtggaagtggaagctatcgggcgtgtaaggcataagaatctcgttaggctattaggatactgcgtcgaaggagcatacaggatgctcgtgtatgactacgtcgataatggcaacttggagcaatggattcatggggatgttggtgataaaagtccgttgacttgggatattcgtatgaacataatactttgcatggcgaaaggattggcctatctgcatgagggtcttgaaccgaaagtcgttcatcgggacataaaatctagtaatattttgcttgatcgtcaatggaatgctaaggtatcagattttggacttgctaagctcttgttctccgagagcagctacgtgacaacccgagtaatgggaacttttggatatgttgcgcctgagtatgcttgcaccggaatgttgacagaaaagagtgatatctatagttttgggatattaatcatggagataatcaccggaagaaatcctgtcgattatagtcgacctcaaggagaggtgaatttggttgagtggctgaaaacaatggttggaaaccgaaggtctgaggaagtagtcgatccaaaaatacccgaaccgcccacttcaaaagctcttaaacgcgtgttgctcgtcgcgctgcgttgtgtggatccggacgcgaataagagacctaaaatgggtcatattatacacatgcttgaagctgaagacttgttctatcgtgacaatatgaaaaggatcttttgttcatatttattgcatggggaaaacgacatctttgctggcttagaagaagcttcagctgatgacacatacactgataatctgtggaatagttacatgaaagacgagggatttgaacggtttgggattccatccaagaggggaagagactgggaagacaatgatttatcacttaaccaactgttcatgaagccttgtagcagtcgttcaagaaaaaattgtgatgaaccatctttggaagctgttgcatcaccagataatcatgatcacggagagaatatgcattag

SEQ ID NO: 86239 - protein, 541 aa, Arabidopsis thaliana
  peptide (1)..(541): Ceres Seq. ID no. 12687826
  misc_feature (160)..(431): Pfam Name: Protein kinase domain Pfam Description: Protein kinase domain
  misc_feature (1)..(440): Homolog of NCBI NO: 15234142 NR Description: putative protein kinase; protein id: At4g01330.1
  misc_feature (1)..(443): Homolog of NCBI NO: 14194119 NR Description: At1g01540/F22L4_6 [Arabidopsis thaliana]
  misc_feature (1)..(443): Homolog of NCBI NO: 15223428 NR Description: protein serine/threonine kinase, putative; id: At1g01540.1, supported by cDNA: gi_12083265, supported by gi_14194118, supported by cDNA: gi_20334727 [Arabidopsis
  misc_feature (1)..(371): Homolog of NCBI NO: 30678150 NR Description: protein kinase family [Arabidopsis thaliana]
  misc_feature (8)..(443): Homolog of NCBI NO: 15235432 NR Description: putative serine/threonine protein kinase; protein At4g02630.1 [Arabidopsis thaliana] >gi|7488204|pir||T01086
  misc_feature (63)..(443): Homolog of NCBI NO: 34897534 NR Description: OSJNBa0042L16.4 [Oryza sativa (japonica
  misc_feature (10)..(92): Homolog of NCBI NO: 34897534 NR Description: OSJNBa0042L16.4 [Oryza sativa (japonica
  misc_feature (73)..(444): Homolog of NCBI NO: 37535714 NR Description: putative kinase [Oryza sativa (japonica
  misc_feature (7)..(75): Homolog of NCBI NO: 37535714 NR Description: putative kinase [Oryza sativa (japonica
  misc_feature (1)..(443): Homolog of NCBI NO: 37536398 NR Description: putative receptor-like protein kinase [Oryza
MSIFNPDSINNELSKPTSIFGLKLWVVIGILLGSLIVIALFFLSLCLTSRRRNRKPRHADFASAAVATPPISKEIQEIVRPPAQDHCHPTQPVAAEIQVDIGKTEHRVVFSDRVSSGESRGTVSETASYSGSGCVGPEVSHLGWGRWYTLRELEAATNGLCEENVIGEGGYGIVYSGILTDGTKVAVKNLLNNRGQAEKEFRVEVEAIGRVRHKNLVRLLGYCVEGAYRMLVYDYVDNGNLEQWIHGDVGDKSPLTWDIRMNIILCMAKGLAYLHEGLEPKVVHRDIKSSNILLDRQWNAKVSDFGLAKLLFSESSYVTTRVMGTFGYVAPEYACTGMLTEKSDIYSFGILIMEIITGRNPVDYSRPQGEVNLVEWLKTMVGNRRSEEVVDPKIPEPPTSKALKRVLLVALRCVDPDANKRPKMGHIIHMLEAEDLFYRDNMKRIFCSYLLHGENDIFAGLEEASADDTYTDNLWNSYMKDEGFERFGIPSKRGRDWEDNDLSLNQLFMKPCSSRSRKNCDEPSLEAVASPDNHDHGENMH

SEQ ID NO: 86240 - protein, 312 aa, Arabidopsis thaliana
  peptide (1)..(312): Ceres Seq. ID no. 12687827
  misc_feature (1)..(202): Pfam Name: Protein kinase domain Pfam Description: Protein kinase domain
  misc_feature (1)..(211): Homolog of NCBI NO: 15234142 NR Description: putative protein kinase; protein id: At4g01330.1
  misc_feature (1)..(214): Homolog of NCBI NO: 14194119 NR Description: At1g01540/F22L4_6 [Arabidopsis thaliana]
  misc_feature (1)..(214): Homolog of NCBI NO: 15223428 NR Description: protein serine/threonine kinase, putative; id: At1g01540.1, supported by cDNA: gi_12083265, supported by gi_14194118, supported by cDNA: gi_20334727 [Arabidopsis
  misc_feature (1)..(142): Homolog of NCBI NO: 30678150 NR Description: protein kinase family [Arabidopsis thaliana]
  misc_feature (1)..(214): Homolog of NCBI NO: 15235432 NR Description: putative serine/threonine protein kinase; protein At4g02630.1 [Arabidopsis thaliana] >gi|7488204|pir||T01086
  misc_feature (1)..(214): Homolog of NCBI NO: 34897534 NR Description: OSJNBa0042L16.4 [Oryza sativa (japonica
  misc_feature (1)..(215): Homolog of NCBI NO: 37535714 NR Description: putative kinase [Oryza sativa (japonica
  misc_feature (1)..(214): Homolog of NCBI NO: 37536398 NR Description: putative receptor-like protein kinase [Oryza
  misc_feature (1)..(210): Homolog of NCBI NO: 7488207 NR Description: probable serine/threonine-specific protein kinase
  misc_feature (1)..(210): Homolog of NCBI NO: 30690058 NR Description: protein kinase family [Arabidopsis thaliana]
MLVYDYVDNGNLEQWIHGDVGDKSPLTWDIRMNIILCMAKGLAYLHEGLEPKVVHRDIKSSNILLDRQWNAKVSDFGLAKLLFSESSYVTTRVMGTFGYVAPEYACTGMLTEKSDIYSFGILIMEIITGRNPVDYSRPQGEVNLVEWLKTMVGNRRSEEVVDPKIPEPPTSKALKRVLLVALRCVDPDANKRPKMGHIIHMLEAEDLFYRDNMKRIFCSYLLHGENDIFAGLEEASADDTYTDNLWNSYMKDEGFERFGIPSKRGRDWEDNDLSLNQLFMKPCSSRSRKNCDEPSLEAVASPDNHDHGENMH

SEQ ID NO: 86241 - protein, 281 aa, Arabidopsis thaliana
  peptide (1)..(281): Ceres Seq. ID no. 12687828
  misc_feature (1)..(171): Pfam Name: Protein kinase domain Pfam Description: Protein kinase domain
  misc_feature (1)..(180): Homolog of NCBI NO: 15234142 NR Description: putative protein kinase; protein id: At4g01330.1
  misc_feature (1)..(183): Homolog of NCBI NO: 14194119 NR Description: At1g01540/F22L4_6 [Arabidopsis thaliana]
  misc_feature (1)..(183): Homolog of NCBI NO: 15223428 NR Description: protein serine/threonine kinase, putative; id: At1g01540.1, supported by cDNA: gi_12083265, supported by gi_14194118, supported by cDNA: gi_20334727 [Arabidopsis
  misc_feature (1)..(111): Homolog of NCBI NO: 30678150 NR Description: protein kinase family [Arabidopsis thaliana]
  misc_feature (1)..(183): Homolog of NCBI NO: 15235432 NR Description: putative serine/threonine protein kinase; protein At4g02630.1 [Arabidopsis thaliana] >gi|7488204|pir||T01086
  misc_feature (1)..(183): Homolog of NCBI NO: 34897534 NR Description: OSJNBa0042L16.4 [Oryza sativa (japonica
  misc_feature (1)..(184): Homolog of NCBI NO: 37535714 NR Description: putative kinase [Oryza sativa (japonica
  misc_feature (1)..(183): Homolog of NCBI NO: 37536398 NR Description: putative receptor-like protein kinase [Oryza
  misc_feature (1)..(179): Homolog of NCBI NO: 7488207 NR Description: probable serine/threonine-specific protein kinase
  misc_feature (1)..(179): Homolog of NCBI NO: 30690058 NR Description: protein kinase family [Arabidopsis thaliana]
MNIILCMAKGLAYLHEGLEPKVVHRDIKSSNILLDRQWNAKVSDFGLAKLLFSESSYVTTRVMGTFGYVAPEYACTGMLTEKSDIYSFGILIMEIITGRNPVDYSRPQGEVNLVEWLKTMVGNRRSEEVVDPKIPEPPTSKALKRVLLVALRCVDPDANKRPKMGHIIHMLEAEDLFYRDNMKRIFCSYLLHGENDIFAGLEEASADDTYTDNLWNSYMKDEGFERFGIPSKRGRDWEDNDLSLNQLFMKPCSSRSRKNCDEPSLEAVASPDNHDHGENMH

SEQ ID NO: 86242 - DNA, 5229 bp, Arabidopsis thaliana
  misc_feature (1)..(5229): Ceres Seq. ID no. 12687851
  misc_feature: MA Experiment ID: 20000307 Result: Up-regulated in Transcription
  misc_feature: MA Experiment 20000307 PARAMETER Experiment Name: At_Germinating_Seeds_Sub_P Parameter: Age (hr) Value: 24 vs. 0
  misc_feature: MA Experiment 20000307 PARAMETER Experiment Name: At_Germinating_Seeds_Sub_P Parameter: Organism Value: A. thaliana
  misc_feature: MA Experiment 20000307 PARAMETER Experiment Name: At_Germinating_Seeds_Sub_P Parameter: Plant Line Value: WS
  misc_feature: MA Experiment 20000307 PARAMETER Experiment Name: At_Germinating_Seeds_Sub_P Parameter: Tissue Value: Germinating Seeds
atgtcacaagactctgccctagacgccttcgttagaataaccattggattacgtgtgatcttgctgagttcccaggacctaagtatagaccaaagaatcccttactctgcaaaaggaaaagacatagctcacagtcaaaaatcttactcaaattatgccagtcaaaaccgctcaagggactctggggaaagagctatgtcagtttatgaaaatgataggaggtcagaaagaagcttctcacctccacctaagaagcgaataagagcacccaccctagacaactcggagctgatccaagagaactcgcttacccttatgggaatactcacaaatccctcagcccagcgtttgtggtccctcatacctttcctatcaaacagatggaatcttaagggcaaagctactggatctgacctaggcagaggttgtttccagttcagatttgaatatgaagaggacctccagaaagtccttgataatagaccctaccactttggtcagtggatggtcattctccagaggtggaaaccagtgatctcaccttccttcccctcagaaatccctttttggattgaactgcagggccttccaatgcactactggataaaagaaatgctttatgccataggcaaggaagctggggaggtagtggaccatgaaatttcaccagctgcagcaaagataaaagtcctcattaacgggctccaacctattacaaaagaaacagtggtggaattccctgatggtagtgaagcattggtttacctggaatacaaaaatctgaagagccattgtcatcattgtcaacgcctctctcatgctgaagctgattgtcctggcctaaagaaagtagaggcggtaagcaaaacatcaaagctcactccccctgagcagcctccccaaaattatgcagagagaaacaaaggtagtaaacaaaatcccagggcatcccacgacaagttactttcctctcactcgggtttatctagacccctcggtgattacaatctctacaagagaaaatcagatggcaggaatgggagaagtgattacaggctaagaccaggagtacaaggctatgtttccccaaatagcagagcatcctctcctagacacactccttccctcagaagagaaccatcaagaagttacagtagggaccattataacaggcccaacccaaactttcaatggcgagaaaaacaagttccacgagaacttacctggcaggagatgtctgaaacttcgagaacaagacgcccttcactggagagagaagtggttactgaatcctcaaaccccctgccagtacctatccctacaaaagaagcaatcatgggtgaactgcgggaagtaactgttcagtacataagctgcgcagaccccactgaaagtatggccaggaaacagagagtgttacaaggtgaagccagaggtttgatgttggagactgcctatcagatactcaccgcggctacttctgctaatcaactactcctccaaaacaccactgcaaatgatcctgaaccacccttaagcccttcccaggacttaccaatccatccagctgagctcccacctgcgcctgagccaagccagaaaaagaaaagaggaagacccccaattaacaaaccatcaaacaaaccagggaataaaagtcctttaagactggcaggtgcgaaatccagcaagagaaacatgttgggagtccaaaactctcctaaagggaggacagtcacagatactgcaggaccttctactggtgatgctagagaaataatcaaaaagaaacaatctaaacagcagaaccctccaagatccaacaactctctgcttgcgtcgagttctacacctcctactcataccatcatccctgcaatggtcaaaaagaaggtggattttcaaattcacagaatcaaggagatgcagaagaccatctccccggatataattttcctcatggagacaaaaaactcaaatgattttgttctcaaggcgcttaaatgtttaaattacacggaatctctgctagttgctccccatagtcctggtggtggggggctagctcttccctggaacacaaacatagccatcaaagttctatcagagagtcagaactttattgatactaccattgaagcggaagggcgtaccttctttgcaactttcatttatggtgaacctgataaaaccaaaaggaaagccatctgggacaagctaacggagcgtgggaaagatagaattgatccctatcaggtggtcctacacgccctgaaggatcctttgtggacctcagaacctttatgtccacttgtgacctctttgatcttcgccactcaggaggttacagagctagtggaaaagaactggatgaaagatgtctatgaagaggttgagaaaaaaataagtagatgtagacacgctattattacctggagccgggaaaagcaccttaatagccaaaaacagattcaaaattgccgtgctaagcttgaggaagccatgtcaagcctagattctgaaccaacccttattaactccatcaatgaagagctagcagctgcttacaaagaggaagaagaacactggaaacagcgaagtagacagttatggctcactctgggtgacaaaaacactggattttttcacgcttgcactaaaggacgattagcagtcaataaattttctgttattgaaaatgaagaagggactaccttttatgaagaacaccaaatcttgaaggttatttctgagtattatcagaaaattttcactacaaaaccaggagaaagaaggtcagtcatagctgcaaccctacaaccttgcatctcagatgaaaccaataggaaacttacgagaatgccaactgcaaaagagataaaaactgcttgcttctccatccatgctgacaaagcccctggtcctgatggcttctctgcaagtttttttcagactaactggcgcacagtaggagctcaaatcattctggaaatacagaacttcttctcctccggaatcctgccaaggaacattaacactacccatgtcagactgatcccaaaaatcacgagttcaaaaactatgaaagattataggcctattgccctatgctctatctactacaaaatcatagcaaaggtactcaccaagagactccagccaattcttcacttcctgatctcagaaaaccaatctgcttttgttcctcaacgggcgattgctgacaatgtattgattacccatgaagttctacactacctacataattcaaaggcaaaagaaagatgctttatggccgtgaagactgatatgagtaaggcatatgatagagttgagtgggatttcattgaactagttatggagaggatgggcttccacagtacttggatcaattggatcatgcaatgtataacaacggtctcttactcttacctccttaatggatcggctcaaggttcagtgataccacaaaggggcattcgccaaggtgatcccctatcacccttaatttttatcctctgcagtgaagttctctctggtctctgcaacaaagcccaagaaagaggtgatcttactggcattaaagtggggaagaacaatccaagaattaaccacttactatttgcagatgatacgatgttcttctgcaaatctgaccctcaagactgtgaaactcttatgctcatcctgcagcactatgaacaagcttcgggccagtttattaaccctcaaaagtcagcagttactttctctgcaaaaacatgtgtagagacaagagatagagttaagctattactcggaatccaaaaagaggggggcttgggcaaatacctaggtttacctgagctctttggtagaaagaagaaggatttattcaccctgattgtcgacaggattcgccaaaaggcttgcagctggtcatctagattcctatcttcagctgggaagttgatcatgctgaagtctgttctagcagcaatgccaacctatacgatgtcctgctttaaactaccctgctctctatataagcgcatccaatctgctttgacacggttctggtgggattctagtatggacaagaagaaaatgtgttggatctcctggctaaacttaacaaaatctaaaggagagggaggacttggtttcagggacttacaatgctttaatgatgctttgttggcaaaacagagctggagaatactcacaaagccgcagtgccttcttgctagaacccttcttgggaaatactgccattctacgccattcttagattgtaaaccacctgcgaccatttcacatggatggagaagcatatgtattggtagagatctactaaaacggaagcttggtaaagtcattgggtgtggcaaacaaacctctctgtggcaagaaccgtggctatccctacaatctcctatcacccctatgggccctcctcctgcatcatcacacaagtggacagtatcgcagctcatttctcctacaacacttgagtgggacagagaaatctggcaaaacgcgccttttaaacagcccttggatcccaataccactgtgtcctttagggatctaattaagaaagttaatctgagcgtttgcctcccaccaattggcgtaggaacgggacctctcctaccgtggattctctggtcgatctggctttctaggaaccacttaatcttcaaggatcgcctcagctccccctctgaaactctggctcgagcaatcagtctagcacgagagtggcttttagctcagaatacaacccatatccgacctctgcagcaaaccctagggaaaatcatttcaatctcaaacaacactagtatctgccaaaccgacgctgcctggaacaaagaacataaattggttggtttaggatggattttcaatcccaccatcactgaaacaagtaggattggatctaattcaagaaggaatgttcgatcacctcttttagcggaagctctcgccatccacgaagctctctgccatgcatcgactttgggtatccaaaacattgtaatagcgtccgattccaagcagttgatcaacgcaatcaatttgggggatcctccattggaactccacgggattctacacgatatcctgagtttatcttctacttttctgcaatctagtttttctttcatctctcggaaacacaatggcgaagctgatgagattgctaagtgttctcttaaaacgattgtactggacccggtttag

SEQ ID NO: 86243 - protein, 1742 aa, Arabidopsis thaliana
  peptide (1)..(1742): Ceres Seq. ID no. 12687852
  misc_feature (1011)..(1269): Pfam Name: Reverse transcriptase (RNA-dependent DNA polymerase) Pfam Description: Reverse transcriptase (RNA-dependent DNA
  misc_feature (66)..(635): Homolog of NCBI NO: 15234205 NR Description: putative transposon protein; protein id:
  misc_feature (781)..(1742): Homolog of NCBI NO: 15227423 NR Description: putative non-LTR retroelement reverse protein id: At2g11240.1 [Arabidopsis thaliana]
  misc_feature (782)..(1500): Homolog of NCBI NO: 15224487 NR Description: putative non-LTR retroelement reverse protein id: At2g05200.1 [Arabidopsis thaliana]
  misc_feature (1479)..(1733): Homolog of NCBI NO: 15224487 NR Description: putative non-LTR retroelement reverse protein id: At2g05200.1 [Arabidopsis thaliana]
  misc_feature (718)..(1502): Homolog of NCBI NO: 7485606 NR Description: hypothetical protein F17A8.60 - Arabidopsis
  misc_feature (1501)..(1742): Homolog of NCBI NO: 7485606 NR Description: hypothetical protein F17A8.60 - Arabidopsis
  misc_feature (76)..(578): Homolog of NCBI NO: 15226504 NR Description: putative non-LTR retroelement reverse protein id: At2g15380.1 [Arabidopsis thaliana]
  misc_feature (781)..(973): Homolog of NCBI NO: 15226504 NR Description: putative non-LTR retroelement reverse protein id: At2g15380.1 [Arabidopsis thaliana]
  misc_feature (1607)..(1734): Homolog of NCBI NO: 15226504 NR Description: putative non-LTR retroelement reverse protein id: At2g15380.1 [Arabidopsis thaliana]
  misc_feature (1474)..(1576): Homolog of NCBI NO: 15226504 NR Description: putative non-LTR retroelement reverse protein id: At2g15380.1 [Arabidopsis thaliana]
MSQDSALDAFVRITIGLRVILLSSQDLSIDQRIPYSAKGKDIAHSQKSYSNYASQNRSRDSGERAMSVYENDRRSERSFSPPPKKRIRAPTLDNSELIQENSLTLMGILTNPSAQRLWSLIPFLSNRWNLKGKATGSDLGRGCFQFRFEYEEDLQKVLDNRPYHFGQWMVILQRWKPVISPSFPSEIPFWIELQGLPMHYWIKEMLYAIGKEAGEVVDHEISPAAAKIKVLINGLQPITKETVVEFPDGSEALVYLEYKNLKSHCHHCQRLSHAEADCPGLKKVEAVSKTSKLTPPEQPPQNYAERNKGSKQNPRASHDKLLSSHSGLSRPLGDYNLYKRKSDGRNGRSDYRLRPGVQGYVSPNSRASSPRHTPSLRREPSRSYSRDHYNRPNPNFQWREKQVPRELTWQEMSETSRTRRPSLEREVVTESSNPLPVPIPTKEAIMGELREVTVQYISCADPTESMARKQRVLQGEARGLMLETAYQILTAATSANQLLLQNTTANDPEPPLSPSQDLPIHPAELPPAPEPSQKKKRGRPPINKPSNKPGNKSPLRLAGAKSSKRNMLGVQNSPKGRTVTDTAGPSTGDAREIIKKKQSKQQNPPRSNNSLLASSSTPPTHTIIPAMVKKKVDFQIHRIKEMQKTISPDIIFLMETKNSNDFVLKALKCLNYTESLLVAPHSPGGGGLALPWNTNIAIKVLSESQNFIDTTIEAEGRTFFATFIYGEPDKTKRKAIWDKLTERGKDRIDPYQVVLHALKDPLWTSEPLCPLVTSLIFATQEVTELVEKNWMKDVYEEVEKKISRCRHAIITWSREKHLNSQKQIQNCRAKLEEAMSSLDSEPTLINSINEELAAAYKEEEEHWKQRSRQLWLTLGDKNTGFFHACTKGRLAVNKFSVIENEEGTTFYEEHQILKVISEYYQKIFTTKPGERRSVIAATLQPCISDETNRKLTRMPTAKEIKTACFSIHADKAPGPDGFSASFFQTNWRTVGAQIILEIQNFFSSGILPRNINTTHVRLIPKITSSKTMKDYRPIALCSIYYKIIAKVLTKRLQPILHFLISENQSAFVPQRAIADNVLITHEVLHYLHNSKAKERCFMAVKTDMSKAYDRVEWDFIELVMERMGFHSTWINWIMQCITTVSYSYLLNGSAQGSVIPQRGIRQGDPLSPLIFILCSEVLSGLCNKAQERGDLTGIKVGKNNPRINHLLFADDTMFFCKSDPQDCETLMLILQHYEQASGQFINPQKSAVTFSAKTCVETRDRVKLLLGIQKEGGLGKYLGLPELFGRKKKDLFTLIVDRIRQKACSWSSRFLSSAGKLIMLKSVLAAMPTYTMSCFKLPCSLYKRIQSALTRFWWDSSMDKKKMCWISWLNLTKSKGEGGLGFRDLQCFNDALLAKQSWRILTKPQCLLARTLLGKYCHSTPFLDCKPPATISHGWRSICIGRDLLKRKLGKVIGCGKQTSLWQEPWLSLQSPITPMGPPPASSHKWTVSQLISPTTLEWDREIWQNAPFKQPLDPNTTVSFRDLIKKVNLSVCLPPIGVGTGPLLPWILWSIWLSRNHLIFKDRLSSPSETLARAISLAREWLLAQNTTHIRPLQQTLGKIISISNNTSICQTDAAWNKEHKLVGLGWIFNPTITETSRIGSNSRRNVRSPLLAEALAIHEALCHASTLGIQNIVIASDSKQLINAINLGDPPLELHGILHDILSLSSTFLQSSFSFISRKHNGEADEIAKCSLKTIVLDPV

SEQ ID NO: 86244 - protein, 1677 aa, Arabidopsis thaliana
  peptide (1)..(1677): Ceres Seq. ID no. 12687853
  misc_feature (946)..(1204): Pfam Name: Reverse transcriptase (RNA-dependent DNA polymerase) Pfam Description: Reverse transcriptase (RNA-dependent DNA
  misc_feature (1)..(570): Homolog of NCBI NO: 15234205 NR Description: putative transposon protein; protein id:
  misc_feature (716)..(1677): Homolog of NCBI NO: 15227423 NR Description: putative non-LTR retroelement reverse protein id: At2g11240.1 [Arabidopsis thaliana]
  misc_feature (717)..(1435): Homolog of NCBI NO: 15224487 NR Description: putative non-LTR retroelement reverse protein id: At2g05200.1 [Arabidopsis thaliana]
  misc_feature (1414)..(1668): Homolog of NCBI NO: 15224487 NR Description: putative non-LTR retroelement reverse protein id: At2g05200.1 [Arabidopsis thaliana]
  misc_feature (653)..(1437): Homolog of NCBI NO: 7485606 NR Description: hypothetical protein F17A8.60 - Arabidopsis
  misc_feature (1436)..(1677): Homolog of NCBI NO: 7485606 NR Description: hypothetical protein F17A8.60 - Arabidopsis
  misc_feature (11)..(513): Homolog of NCBI NO: 15226504 NR Description: putative non-LTR retroelement reverse protein id: At2g15380.1 [Arabidopsis thaliana]
  misc_feature (716)..(908): Homolog of NCBI NO: 15226504 NR Description: putative non-LTR retroelement reverse protein id: At2g15380.1 [Arabidopsis thaliana]
  misc_feature (1542)..(1669): Homolog of NCBI NO: 15226504 NR Description: putative non-LTR retroelement reverse protein id: At2g15380.1 [Arabidopsis thaliana]
  misc_feature (1409)..(1511): Homolog of NCBI NO: 15226504 NR Description: putative non-LTR retroelement reverse protein id: At2g15380.1 [Arabidopsis thaliana]
MSVYENDRRSERSFSPPPKKRIRAPTLDNSELIQENSLTLMGILTNPSAQRLWSLIPFLSNRWNLKGKATGSDLGRGCFQFRFEYEEDLQKVLDNRPYHFGQWMVILQRWKPVISPSFPSEIPFWIELQGLPMHYWIKEMLYAIGKEAGEVVDHEISPAAAKIKVLINGLQPITKETVVEFPDGSEALVYLEYKNLKSHCHHCQRLSHAEADCPGLKKVEAVSKTSKLTPPEQPPQNYAERNKGSKQNPRASHDKLLSSHSGLSRPLGDYNLYKRKSDGRNGRSDYRLRPGVQGYVSPNSRASSPRHTPSLRREPSRSYSRDHYNRPNPNFQWREKQVPRELTWQEMSETSRTRRPSLEREVVTESSNPLPVPIPTKEAIMGELREVTVQYISCADPTESMARKQRVLQGEARGLMLETAYQILTAATSANQLLLQNTTANDPEPPLSPSQDLPIHPAELPPAPEPSQKKKRGRPPINKPSNKPGNKSPLRLAGAKSSKRNMLGVQNSPKGRTVTDTAGPSTGDAREIIKKKQSKQQNPPRSNNSLLASSSTPPTHTIIPAMVKKKVDFQIHRIKEMQKTISPDIIFLMETKNSNDFVLKALKCLNYTESLLVAPHSPGGGGLALPWNTNIAIKVLSESQNFIDTTIEAEGRTFFATFIYGEPDKTKRKAIWDKLTERGKDRIDPYQVVLHALKDPLWTSEPLCPLVTSLIFATQEVTELVEKNWMKDVYEEVEKKISRCRHAIITWSREKHLNSQKQIQNCRAKLEEAMSSLDSEPTLINSINEELAAAYKEEEEHWKQRSRQLWLTLGDKNTGFFHACTKGRLAVNKFSVIENEEGTTFYEEHQILKVISEYYQKIFTTKPGERRSVIAATLQPCISDETNRKLTRMPTAKEIKTACFSIHADKAPGPDGFSASFFQTNWRTVGAQIILEIQNFFSSGILPRNINTTHVRLIPKITSSKTMKDYRPIALCSIYYKIIAKVLTKRLQPILHFLISENQSAFVPQRAIADNVLITHEVLHYLHNSKAKERCFMAVKTDMSKAYDRVEWDFIELVMERMGFHSTWINWIMQCITTVSYSYLLNGSAQGSVIPQRGIRQGDPLSPLIFILCSEVLSGLCNKAQERGDLTGIKVGKNNPRINHLLFADDTMFFCKSDPQDCETLMLILQHYEQASGQFINPQKSAVTFSAKTCVETRDRVKLLLGIQKEGGLGKYLGLPELFGRKKKDLFTLIVDRIRQKACSWSSRFLSSAGKLIMLKSVLAAMPTYTMSCFKLPCSLYKRIQSALTRFWWDSSMDKKKMCWISWLNLTKSKGEGGLGFRDLQCFNDALLAKQSWRILTKPQCLLARTLLGKYCHSTPFLDCKPPATISHGWRSICIGRDLLKRKLGKVIGCGKQTSLWQEPWLSLQSPITPMGPPPASSHKWTVSQLISPTTLEWDREIWQNAPFKQPLDPNTTVSFRDLIKKVNLSVCLPPIGVGTGPLLPWILWSIWLSRNHLIFKDRLSSPSETLARAISLAREWLLAQNTTHIRPLQQTLGKIISISNNTSICQTDAAWNKEHKLVGLGWIFNPTITETSRIGSNSRRNVRSPLLAEALAIHEALCHASTLGIQNIVIASDSKQLINAINLGDPPLELHGILHDILSLSSTFLQSSFSFISRKHNGEADEIAKCSLKTIVLDPV

SEQ ID NO: 86245 - protein, 1637 aa, Arabidopsis thaliana
  peptide (1)..(1637): Ceres Seq. ID no. 12687854
  misc_feature (906)..(1164): Pfam Name: Reverse transcriptase (RNA-dependent DNA polymerase) Pfam Description: Reverse transcriptase (RNA-dependent DNA
  misc_feature (1)..(530): Homolog of NCBI NO: 15234205 NR Description: putative transposon protein; protein id:
  misc_feature (676)..(1637): Homolog of NCBI NO: 15227423 NR Description: putative non-LTR retroelement reverse protein id: At2g11240.1 [Arabidopsis thaliana]
  misc_feature (677)..(1395): Homolog of NCBI NO: 15224487 NR Description: putative non-LTR retroelement reverse protein id: At2g05200.1 [Arabidopsis thaliana]
  misc_feature (1374)..(1628): Homolog of NCBI NO: 15224487 NR Description: putative non-LTR retroelement reverse protein id: At2g05200.1 [Arabidopsis thaliana]
  misc_feature (613)..(1397): Homolog of NCBI NO: 7485606 NR Description: hypothetical protein F17A8.60 - Arabidopsis
  misc_feature (1396)..(1637): Homolog of NCBI NO: 7485606 NR Description: hypothetical protein F17A8.60 - Arabidopsis
  misc_feature (1)..(473): Homolog of NCBI NO: 15226504 NR Description: putative non-LTR retroelement reverse protein id: At2g15380.1 [Arabidopsis thaliana]
  misc_feature (676)..(868): Homolog of NCBI NO: 15226504 NR Description: putative non-LTR retroelement reverse protein id: At2g15380.1 [Arabidopsis thaliana]
  misc_feature (1502)..(1629): Homolog of NCBI NO: 15226504 NR Description: putative non-LTR retroelement reverse protein id: At2g15380.1 [Arabidopsis thaliana]
  misc_feature (1369)..(1471): Homolog of NCBI NO: 15226504 NR Description: putative non-LTR retroelement reverse protein id: At2g15380.1 [Arabidopsis thaliana]
MGILTNPSAQRLWSLIPFLSNRWNLKGKATGSDLGRGCFQFRFEYEEDLQKVLDNRPYHFGQWMVILQRWKPVISPSFPSEIPFWIELQGLPMHYWIKEMLYAIGKEAGEVVDHEISPAAAKIKVLINGLQPITKETVVEFPDGSEALVYLEYKNLKSHCHHCQRLSHAEADCPGLKKVEAVSKTSKLTPPEQPPQNYAERNKGSKQNPRASHDKLLSSHSGLSRPLGDYNLYKRKSDGRNGRSDYRLRPGVQGYVSPNSRASSPRHTPSLRREPSRSYSRDHYNRPNPNFQWREKQVPRELTWQEMSETSRTRRPSLEREVVTESSNPLPVPIPTKEAIMGELREVTVQYISCADPTESMARKQRVLQGEARGLMLETAYQILTAATSANQLLLQNTTANDPEPPLSPSQDLPIHPAELPPAPEPSQKKKRGRPPINKPSNKPGNKSPLRLAGAKSSKRNMLGVQNSPKGRTVTDTAGPSTGDAREIIKKKQSKQQNPPRSNNSLLASSSTPPTHTIIPAMVKKKVDFQIHRIKEMQKTISPDIIFLMETKNSNDFVLKALKCLNYTESLLVAPHSPGGGGLALPWNTNIAIKVLSESQNFIDTTIEAEGRTFFATFIYGEPDKTKRKAIWDKLTERGKDRIDPYQVVLHALKDPLWTSEPLCPLVTSLIFATQEVTELVEKNWMKDVYEEVEKKISRCRHAIITWSREKHLNSQKQIQNCRAKLEEAMSSLDSEPTLINSINEELAAAYKEEEEHWKQRSRQLWLTLGDKNTGFFHACTKGRLAVNKFSVIENEEGTTFYEEHQILKVISEYYQKIFTTKPGERRSVIAATLQPCISDETNRKLTRMPTAKEIKTACFSIHADKAPGPDGFSASFFQTNWRTVGAQIILEIQNFFSSGILPRNINTTHVRLIPKITSSKTMKDYRPIALCSIYYKIIAKVLTKRLQPILHFLISENQSAFVPQRAIADNVLITHEVLHYLHNSKAKERCFMAVKTDMSKAYDRVEWDFIELVMERMGFHSTWINWIMQCITTVSYSYLLNGSAQGSVIPQRGIRQGDPLSPLIFILCSEVLSGLCNKAQERGDLTGIKVGKNNPRINHLLFADDTMFFCKSDPQDCETLMLILQHYEQASGQFINPQKSAVTFSAKTCVETRDRVKLLLGIQKEGGLGKYLGLPELFGRKKKDLFTLIVDRIRQKACSWSSRFLSSAGKLIMLKSVLAAMPTYTMSCFKLPCSLYKRIQSALTRFWWDSSMDKKKMCWISWLNLTKSKGEGGLGFRDLQCFNDALLAKQSWRILTKPQCLLARTLLGKYCHSTPFLDCKPPATISHGWRSICIGRDLLKRKLGKVIGCGKQTSLWQEPWLSLQSPITPMGPPPASSHKWTVSQLISPTTLEWDREIWQNAPFKQPLDPNTTVSFRDLIKKVNLSVCLPPIGVGTGPLLPWILWSIWLSRNHLIFKDRLSSPSETLARAISLAREWLLAQNTTHIRPLQQTLGKIISISNNTSICQTDAAWNKEHKLVGLGWIFNPTITETSRIGSNSRRNVRSPLLAEALAIHEALCHASTLGIQNIVIASDSKQLINAINLGDPPLELHGILHDILSLSSTFLQSSFSFISRKHNGEADEIAKCSLKTIVLDPV

SEQ ID NO: 86246 - DNA, 1422 bp, Arabidopsis thaliana
  misc_feature (1)..(1422): Ceres Seq. ID no. 12687983
  misc_feature: MA Experiment ID: 20001909 Result: Up-regulated in Transcription
  misc_feature: MA Experiment 20001909 PARAMETER Experiment Name: At_Drought_Reproduction_P Parameter: Age (day) Value: 35
  misc_feature: MA Experiment 20001909 PARAMETER Experiment Name: At_Drought_Reproduction_P Parameter: Organism Value: A. thaliana
  misc_feature: MA Experiment 20001909 PARAMETER Experiment Name: At_Drought_Reproduction_P Parameter: Plant Line Value: WS
  misc_feature: MA Experiment 20001909 PARAMETER Experiment Name: At_Drought_Reproduction_P Parameter: Timepoint (day) Value: 5
  misc_feature: MA Experiment 20001909 PARAMETER Experiment Name: At_Drought_Reproduction_P Parameter: Tissue Value: Flowers
  misc_feature: MA Experiment 20001909 PARAMETER Experiment Name: At_Drought_Reproduction_P Parameter: Treatment Value: Drought vs. No Drought
atggaagtcttccgatcatcggaaacttgcaccaagcttggaagattgcttcatagttcttttcacaagctctctttagaacatggaccagtgatgcttctccgtttcggggtcgtcccgatggttgttatctcttccaaggaagcagctaaacaagttctaaagtctcgcgatctagagacatgctcccgacctaagctggttgcgaacgggttgtttactcgcaacttcaaagacattgctttcgctcagtatggtgaggactggcgagagatgaaaaagctcgtggggcttgagctcttcaatccaaagaagcacaaatttttcaggtatatcagagaggaagagggtgacttgctggtcaagaaactatccaaatcttctcaaacacaaactttagtggatttgagaaaagcctttttctccttcaccgcgggtatcatatttagagtctcctttggacagaacttccgcgagtgcgatttcatcgatatggacagacttgaagagttggtgcaagagtcagagaccaacgtattcagcttcgcattcactgacttcttcccaacgggtctcggttggcttgtagaccggatctccggtcaacattcgaggatcgagaaagccttttcaaaactcaccaagttctttcaacatgtaatcgatgaggagttgaagattggacaatcccaagatcactcaaacctcgtcagttccatgttggatatgatcaatagatccactgaatacggttctttcaagatcacttctgatcatctcatagcaatgatgacggacatagttttggggggagtgaacgcaggaacaatcacaatgatatggacgatgacagagctaaccagacatccaagagtgatgaagaaactccgagaagagattcgagcaacacttggacccaacaaagagagaatcacagaagaagatctagagaaagttgagtacttgaagttggtgatcaaagaaactttcagattacatccaccaggtcctttcttgctcccaagacaagtaatgtccgacatagagattcaaggctaccacattcccaagaacgcacatatcaagatcagcacttacgccataggacgtgatcccaaatgttggactaatcctgaagaattcaatcctgagaggtttgcaaatacctcaatcaactacaaaggtcagcattacgagcttttaccctttggagccggtcgtaggagctgtcctggtatgactttgggaatcaccattcttgagctaggccttcttaacattctttactacttcgattggagtttacccaatggaatgaccattaaagacattgacatggaagaagatggagctttgaccatcgccaagaaagtccctcttgagctcatacctacgctcccagcatcactatgcattaaataa

SEQ ID NO: 86247 - protein, 473 aa, Arabidopsis thaliana
  peptide (1)..(473): Ceres Seq. ID no. 12687984
  misc_feature (12)..(462): Pfam Name: Cytochrome P450 Pfam Description: Cytochrome P450
  misc_feature (12)..(473): Homolog of NCBI NO: 13878369 NR Description: CYTOCHROME P450 71B8
  misc_feature (41)..(473): Homolog of NCBI NO: 22327366 NR Description: similar to cytochrome p450 family; protein id:
  misc_feature (12)..(467): Homolog of NCBI NO: 15231786 NR Description: cytochrome p450 family; protein id: At3g53300.1, by cDNA: gi_15810490 [Arabidopsis thaliana] Cytochrome P450 71B31 >gi|11249493|pir||T46176 probable
  misc_feature (12)..(467): Homolog of NCBI NO: 15810491 NR Description: putative cytochrome P450 protein [Arabidopsis
  misc_feature (12)..(466): Homolog of NCBI NO: 15231524 NR Description: cytochrome p450 family; protein id: At3g26190.1 thaliana] >gi|13878385|sp|Q9LTM2|C72L_ARATH Cytochrome P450 71B21
  misc_feature (12)..(465): Homolog of NCBI NO: 15231525 NR Description: cytochrome p450 family; protein id: At3g26200.1, by cDNA: gi_13430717 [Arabidopsis thaliana] Cytochrome P450 71B22 >gi|11994439|dbj|BAB02441.1| cytochrome
  misc_feature (12)..(465): Homolog of NCBI NO: 15229913 NR Description: cytochrome p450 family; protein id: At3g44250.1
  misc_feature (12)..(466): Homolog of NCBI NO: 15231782 NR Description: cytochrome P450 monooxygenase; protein id: supported by cDNA: gi_3164131 [Arabidopsis thaliana]
  misc_feature (32)..(466): Homolog of NCBI NO: 15724230 NR Description: AT3g53280/T4D2_200 [Arabidopsis thaliana]
  misc_feature (32)..(466): Homolog of NCBI NO: 22655216 NR Description: cytochrome P450 71B5 [Arabidopsis thaliana]
MEVFRSSETCTKLGRLLHSSFHKLSLEHGPVMLLRFGVVPMVVISSKEAAKQVLKSRDLETCSRPKLVANGLFTRNFKDIAFAQYGEDWREMKKLVGLELFNPKKHKFFRYIREEEGDLLVKKLSKSSQTQTLVDLRKAFFSFTAGIIFRVSFGQNFRECDFIDMDRLEELVQESETNVFSFAFTDFFPTGLGWLVDRISGQHSRIEKAFSKLTKFFQHVIDEELKIGQSQDHSNLVSSMLDMINRSTEYGSFKITSDHLIAMMTDIVLGGVNAGTITMIWTMTELTRHPRVMKKLREEIRATLGPNKERITEEDLEKVEYLKLVIKETFRLHPPGPFLLPRQVMSDIEIQGYHIPKNAHIKISTYAIGRDPKCWTNPEEFNPERFANTSINYKGQHYELLPFGAGRRSCPGMTLGITILELGLLNILYYFDWSLPNGMTIKDIDMEEDGALTIAKKVPLELIPTLPASLCIK

SEQ ID NO: 86248 - protein, 442 aa, Arabidopsis thaliana
  peptide (1)..(442): Ceres Seq. ID no. 12687985
  misc_feature (1)..(431): Pfam Name: Cytochrome P450 Pfam Description: Cytochrome P450
  misc_feature (1)..(442): Homolog of NCBI NO: 13878369 NR Description: CYTOCHROME P450 71B8
  misc_feature (10)..(442): Homolog of NCBI NO: 22327366 NR Description: similar to cytochrome p450 family; protein id:
  misc_feature (1)..(436): Homolog of NCBI NO: 15231786 NR Description: cytochrome p450 family; protein id: At3g53300.1, by cDNA: gi_15810490 [Arabidopsis thaliana] Cytochrome P450 71B31 >gi|11249493|pir||T46176 probable
  misc_feature (1)..(436): Homolog of NCBI NO: 15810491 NR Description: putative cytochrome P450 protein [Arabidopsis
  misc_feature (1)..(435): Homolog of NCBI NO: 15231524 NR Description: cytochrome p450 family; protein id: At3g26190.1 thaliana] >gi|13878385|sp|Q9LTM2|C72L_ARATH Cytochrome P450 71B21
  misc_feature (1)..(434): Homolog of NCBI NO: 15231525 NR Description: cytochrome p450 family; protein id: At3g26200.1, by cDNA: gi_13430717 [Arabidopsis thaliana] Cytochrome P450 71B22 >gi|11994439|dbj|BAB02441.1| cytochrome
  misc_feature (1)..(434): Homolog of NCBI NO: 15229913 NR Description: cytochrome p450 family; protein id: At3g44250.1
  misc_feature (1)..(435): Homolog of NCBI NO: 15231782 NR Description: cytochrome P450 monooxygenase; protein id: supported by cDNA: gi_3164131 [Arabidopsis thaliana]
  misc_feature (1)..(435): Homolog of NCBI NO: 15724230 NR Description: AT3g53280/T4D2_200 [Arabidopsis thaliana]
  misc_feature (1)..(435): Homolog of NCBI NO: 22655216 NR Description: cytochrome P450 71B5 [Arabidopsis thaliana]
MLLRFGVVPMVVISSKEAAKQVLKSRDLETCSRPKLVANGLFTRNFKDIAFAQYGEDWREMKKLVGLELFNPKKHKFFRYIREEEGDLLVKKLSKSSQTQTLVDLRKAFFSFTAGIIFRVSFGQNFRECDFIDMDRLEELVQESETNVFSFAFTDFFPTGLGWLVDRISGQHSRIEKAFSKLTKFFQHVIDEELKIGQSQDHSNLVSSMLDMINRSTEYGSFKITSDHLIAMMTDIVLGGVNAGTITMIWTMTELTRHPRVMKKLREEIRATLGPNKERITEEDLEKVEYLKLVIKETFRLHPPGPFLLPRQVMSDIEIQGYHIPKNAHIKISTYAIGRDPKCWTNPEEFNPERFANTSINYKGQHYELLPFGAGRRSCPGMTLGITILELGLLNILYYFDWSLPNGMTIKDIDMEEDGALTIAKKVPLELIPTLPASLCIK

SEQ ID NO: 86249 - protein, 433 aa, Arabidopsis thaliana; identical to SEQ ID NO: 81942
  peptide (1)..(433): Ceres Seq. ID no. 12687986
  misc_feature (1)..(422): Pfam Name: Cytochrome P450 Pfam Description: Cytochrome P450
  misc_feature (1)..(433): Homolog of NCBI NO: 13878369 NR Description: CYTOCHROME P450 71B8
  misc_feature (1)..(433): Homolog of NCBI NO: 22327366 NR Description: similar to cytochrome p450 family; protein id:
  misc_feature (1)..(427): Homolog of NCBI NO: 15231786 NR Description: cytochrome p450 family; protein id: At3g53300.1, by cDNA: gi_15810490 [Arabidopsis thaliana] Cytochrome P450 71B31 >gi|11249493|pir||T46176 probable
  misc_feature (1)..(427): Homolog of NCBI NO: 15810491 NR Description: putative cytochrome P450 protein [Arabidopsis
  misc_feature (1)..(426): Homolog of NCBI NO: 15231524 NR Description: cytochrome p450 family; protein id: At3g26190.1 thaliana] >gi|13878385|sp|Q9LTM2|C72L_ARATH Cytochrome P450 71B21
  misc_feature (1)..(425): Homolog of NCBI NO: 15231525 NR Description: cytochrome p450 family; protein id: At3g26200.1, by cDNA: gi_13430717 [Arabidopsis thaliana] Cytochrome P450 71B22 >gi|11994439|dbj|BAB02441.1| cytochrome
  misc_feature (1)..(425): Homolog of NCBI NO: 15229913 NR Description: cytochrome p450 family; protein id: At3g44250.1
  misc_feature (1)..(426): Homolog of NCBI NO: 15231782 NR Description: cytochrome P450 monooxygenase; protein id: supported by cDNA: gi_3164131 [Arabidopsis thaliana]
  misc_feature (1)..(426): Homolog of NCBI NO: 15724230 NR Description: AT3g53280/T4D2_200 [Arabidopsis thaliana]
  misc_feature (1)..(426): Homolog of NCBI NO: 22655216 NR Description: cytochrome P450 71B5 [Arabidopsis thaliana]

SEQ ID NO: 86250 - DNA, 1545 bp, Arabidopsis thaliana
  misc_feature (1)..(1545): Ceres Seq. ID no. 12688276
  misc_feature: MA Experiment ID: 20000180 Result: Down-regulated in Transcription
  misc_feature: MA Experiment 20000180 PARAMETER Experiment Name: At_Germinating_Seeds_P Parameter: Age (hr) Value: 24 vs. 0
  misc_feature: MA Experiment 20000180 PARAMETER Experiment Name: At_Germinating_Seeds_P Parameter: Tissue Value: Germinating Seeds
  misc_feature: MA Experiment ID: 20001248 Result: Up-regulated in Transcription
  misc_feature: MA Experiment 20001248 PARAMETER Experiment Name: At_Far-red-induction_P Parameter: Age (day) Value: 7
  misc_feature: MA Experiment 20001248 PARAMETER Experiment Name: At_Far-red-induction_P Parameter: Light Value: Far-red vs. White
  misc_feature: MA Experiment 20001248 PARAMETER Experiment Name: At_Far-red-induction_P Parameter: Organism Value: A. thaliana
  misc_feature: MA Experiment 20001248 PARAMETER Experiment Name: At_Far-red-induction_P Parameter: Plant Line Value: Columbia
  misc_feature: MA Experiment 20001248 PARAMETER Experiment Name: At_Far-red-induction_P Parameter: Timepoint (hr) Value: 4
  misc_feature: MA Experiment 20001248 PARAMETER Experiment Name: At_Far-red-induction_P Parameter: Tissue Value: Whole Plant
atggccacaagcgaagctctcaacctcgtcgacgacgaaaacgatggtgtctctgtgagagcattctgcgatttgaaggaaggagatgttgttgccaatatctcaaaaactgcttgtctcactatcaaaaccagtggagctcgtgagatgatcgaatctgctgatttagatggaagtttaggtctctctgtggctctcatgtacgagagaagcttaggtgaagaatctccttgggctggttatcttcagattcttcctattcaagaagatttgcctcttgtttggtctcttgaagacttagattctctcttatctggaactgagcttcataagttggtgaaggaagatcatgttcttatatatgaggattggaaagaaaacattttgccgcttacctcttcactgcctcagaatgttgattctgattcgtttggaatcaaagagtatcttgctgctaagagtttaattgcttcacggtctttcgaaatcgatgattaccatggatccgggatggttcctcttgcagacctctttaatcataaaactggggcagaagacgttcacttcactcatgaatccgattctgaagctgatgaatctgacaacgatgatgctgcaaatgagaccactgatgaagacgagccttccagtaaaatttcttcctcgcctgagcagtcttttgaggaagttcctggtgaaaacactgatgacgaagccaaagaagaagaagaagaagaagaagaagaagaagaaggagaagaagaagaagaaggagaagaggaagaagaaaactcttcaatgctgcaaaatgatcaatccggtctaaaaatgattatggtgaaggatgtctcagctggagctgaggtattcaatacatacggtttgatgggtaatgctgcattactccacaggtacggatttacagagctcgataatccatatgacatagtaaacatagatctagaattagtaaccgaatggagcacatcctcattcacaagccggtacactcgagctagactggccttgtggagaaaactaggttacacaggatgcgagagtcaaaactcagaatactttgaggtatcttcaaccggagaaccccaaaccgagctcctgatcctactctatatactgctcttaccagacgacacatacaataaactggatctagctgaatcaacaacaggagcttctccctcgaaagaaggaaaaagatcttcttcttacgagataacaattgggaaacacaagtttgtgtatggagaaagcggaaatgatattcttctgacagatggtgtttgtgaagctcttctaactattgtggataagcgagagagtttatatggatcattgagctcattggaagatgacattgttagggtgaagacttgttgtcttccgagagacaggagactatatcattcgcttgtgttgcgtgtgagtgagaggaagattctaaagaagcttaggagctacatccatacccagaccaatgagtcttccagcggaaagcgccggaagaagatggttccaaaatcctag

SEQ ID NO: 86251 - protein, 514 aa, Arabidopsis thaliana
  peptide (1)..(514): Ceres Seq. ID no. 12688277
  misc_feature (65)..(300): Pfam Name: SET domain Pfam Description: SET domain
  misc_feature (4)..(514): Homolog of NCBI NO: 15228958 NR Description: putative protein; protein id: At3g56570.1
  misc_feature (243)..(510): Homolog of NCBI NO: 34907380 NR Description: P0471B04.24 [Oryza sativa (japonica
  misc_feature (4)..(254): Homolog of NCBI NO: 34907380 NR Description: P0471B04.24 [Oryza sativa (japonica
  misc_feature (3)..(386): Homolog of NCBI NO: 28829640 NR Description: similar to Arabidopsis thaliana (Mouse-ear
  misc_feature (137)..(319): Homolog of NCBI NO: 6319504 NR Description: Hypothetical ORF; Ybr030wp [Saccharomyces
  misc_feature (16)..(112): Homolog of NCBI NO: 6319504 NR Description: Hypothetical ORF; Ybr030wp [Saccharomyces
  misc_feature (3)..(322): Homolog of NCBI NO: 19114984 NR Description: hypothetical coiled-coil protein pombe] >gi|7768489|emb|CAB90780.1| putative transcriptional SET domain; putative histone lysine methyltransferase; similar to
  misc_feature (229)..(386): Homolog of NCBI NO: 40738718 NR Description: hypothetical protein AN6568.2 [Aspergillus
  misc_feature (16)..(115): Homolog of NCBI NO: 40738718 NR Description: hypothetical protein AN6568.2 [Aspergillus
  misc_feature (181)..(269): Homolog of NCBI NO: 39586319 NR Description: Hypothetical protein CBG12079 [Caenorhabditis
MATSEALNLVDDENDGVSVRAFCDLKEGDVVANISKTACLTIKTSGAREMIESADLDGSLGLSVALMYERSLGEESPWAGYLQILPIQEDLPLVWSLEDLDSLLSGTELHKLVKEDHVLIYEDWKENILPLTSSLPQNVDSDSFGIKEYLAAKSLIASRSFEIDDYHGSGMVPLADLFNHKTGAEDVHFTHESDSEADESDNDDAANETTDEDEPSSKISSSPEQSFEEVPGENTDDEAKEEEEEEEEEEEGEEEEEGEEEEENSSMLQNDQSGLKMIMVKDVSAGAEVFNTYGLMGNAALLHRYGFTELDNPYDIVNIDLELVTEWSTSSFTSRYTRARLALWRKLGYTGCESQNSEYFEVSSTGEPQTELLILLYILLLPDDTYNKLDLAESTTGASPSKEGKRSSSYEITIGKHKFVYGESGNDILLTDGVCEALLTIVDKRESLYGSLSSLEDDIVRVKTCCLPRDRRLYHSLVLRVSERKILKKLRSYIHTQTNESSSGKRRKKMVPKS

SEQ ID NO: 86252 - protein, 465 aa, Arabidopsis thaliana; identical to SEQ ID NO: 71280
  peptide (1)..(465): Ceres Seq. ID no. 12688278
  misc_feature (16)..(251): Pfam Name: SET domain Pfam Description: SET domain
  misc_feature (1)..(465): Homolog of NCBI NO: 15228958 NR Description: putative protein; protein id: At3g56570.1
  misc_feature (194)..(461): Homolog of NCBI NO: 34907380 NR Description: P0471B04.24 [Oryza sativa (japonica
  misc_feature (1)..(205): Homolog of NCBI NO: 34907380 NR Description: P0471B04.24 [Oryza sativa (japonica
  misc_feature (1)..(337): Homolog of NCBI NO: 28829640 NR Description: similar to Arabidopsis thaliana (Mouse-ear
  misc_feature (88)..(270): Homolog of NCBI NO: 6319504 NR Description: Hypothetical ORF; Ybr030wp [Saccharomyces
  misc_feature (1)..(63): Homolog of NCBI NO: 6319504 NR Description: Hypothetical ORF; Ybr030wp [Saccharomyces
  misc_feature (1)..(273): Homolog of NCBI NO: 19114984 NR Description: hypothetical coiled-coil protein pombe] >gi|7768489|emb|CAB90780.1| putative transcriptional SET domain; putative histone lysine methyltransferase; similar to
  misc_feature (180)..(337): Homolog of NCBI NO: 40738718 NR Description: hypothetical protein AN6568.2 [Aspergillus
  misc_feature (1)..(66): Homolog of NCBI NO: 40738718 NR Description: hypothetical protein AN6568.2 [Aspergillus
  misc_feature (132)..(220): Homolog of NCBI NO: 39586319 NR Description: Hypothetical protein CBG12079 [Caenorhabditis

SEQ ID NO: 86253 - protein, 448 aa, Arabidopsis thaliana
  peptide (1)..(448): Ceres Seq. ID no. 12688279
  misc_feature (1)..(234): Pfam Name: SET domain Pfam Description: SET domain
  misc_feature (1)..(448): Homolog of NCBI NO: 15228958 NR Description: putative protein; protein id: At3g56570.1
  misc_feature (177)..(444): Homolog of NCBI NO: 34907380 NR Description: P0471B04.24 [Oryza sativa (japonica
  misc_feature (1)..(188): Homolog of NCBI NO: 34907380 NR Description: P0471B04.24 [Oryza sativa (japonica
  misc_feature (1)..(320): Homolog of NCBI NO: 28829640 NR Description: similar to Arabidopsis thaliana (Mouse-ear
  misc_feature (71)..(253): Homolog of NCBI NO: 6319504 NR Description: Hypothetical ORF; Ybr030wp [Saccharomyces
  misc_feature (1)..(46): Homolog of NCBI NO: 6319504 NR Description: Hypothetical ORF; Ybr030wp [Saccharomyces
  misc_feature (1)..(256): Homolog of NCBI NO: 19114984 NR Description: hypothetical coiled-coil protein pombe] >gi|7768489|emb|CAB90780.1| putative transcriptional SET domain; putative histone lysine methyltransferase; similar to
  misc_feature (163)..(320): Homolog of NCBI NO: 40738718 NR Description: hypothetical protein AN6568.2 [Aspergillus
  misc_feature (1)..(49): Homolog of NCBI NO: 40738718 NR Description: hypothetical protein AN6568.2 [Aspergillus
  misc_feature (115)..(203): Homolog of NCBI NO: 39586319 NR Description: Hypothetical protein CBG12079 [Caenorhabditis
MYERSLGEESPWAGYLQILPIQEDLPLVWSLEDLDSLLSGTELHKLVKEDHVLIYEDWKENILPLTSSLPQNVDSDSFGIKEYLAAKSLIASRSFEIDDYHGSGMVPLADLFNHKTGAEDVHFTHESDSEADESDNDDAANETTDEDEPSSKISSSPEQSFEEVPGENTDDEAKEEEEEEEEEEEGEEEEEGEEEEENSSMLQNDQSGLKMIMVKDVSAGAEVFNTYGLMGNAALLHRYGFTELDNPYDIVNIDLELVTEWSTSSFTSRYTRARLALWRKLGYTGCESQNSEYFEVSSTGEPQTELLILLYILLLPDDTYNKLDLAESTTGASPSKEGKRSSSYEITIGKHKFVYGESGNDILLTDGVCEALLTIVDKRESLYGSLSSLEDDIVRVKTCCLPRDRRLYHSLVLRVSERKILKKLRSYIHTQTNESSSGKRRKKMVPKS

SEQ ID NO: 86254 - DNA, 1305 bp, Arabidopsis thaliana
  misc_feature (1)..(1305): Ceres Seq. ID no. 12688345
  misc_feature: MA Experiment ID: 20000182 Result: Up-regulated in Transcription
  misc_feature: MA Experiment 20000182 PARAMETER Experiment Name: At_2mM_SA_P Parameter: Age (day) Value: 14
  misc_feature: MA Experiment 20000182 PARAMETER Experiment Name: At_2mM_SA_P Parameter: Organism Value: A. thaliana
  misc_feature: MA Experiment 20000182 PARAMETER Experiment Name: At_2mM_SA_P Parameter: Plant Line Value: WS
  misc_feature: MA Experiment 20000182 PARAMETER Experiment Name: At_2mM_SA_P Parameter: Timepoint (hr) Value: 6
  misc_feature: MA Experiment 20000182 PARAMETER Experiment Name: At_2mM_SA_P Parameter: Tissue Value: Aerial
  misc_feature: MA Experiment 20000182 PARAMETER Experiment Name: At_2mM_SA_P Parameter: Treatment Value: 2mM SA vs. No Treatment
  misc_feature: MA Experiment ID: 20000438 Result: Down-regulated in Transcription
  misc_feature: MA Experiment 20000438 PARAMETER Experiment Name: At_Shoots__P Parameter: Age (day) Value: 14
  misc_feature: MA Experiment 20000438 PARAMETER Experiment Name: At_Shoots__P Parameter: Tissue Value: Shoots vs. Whole Plant
  misc_feature: MA Experiment ID: 20001247 Result: Up-regulated in Transcription
  misc_feature: MA Experiment 20001247 PARAMETER Experiment Name: At_Far-red-induction_P Parameter: Age (day) Value: 7
  misc_feature: MA Experiment 20001247 PARAMETER Experiment Name: At_Far-red-induction_P Parameter: Light Value: Far-red vs. White
  misc_feature: MA Experiment 20001247 PARAMETER Experiment Name: At_Far-red-induction_P Parameter: Organism Value: A. thaliana
  misc_feature: MA Experiment 20001247 PARAMETER Experiment Name: At_Far-red-induction_P Parameter: Plant Line Value: Columbia
  misc_feature: MA Experiment 20001247 PARAMETER Experiment Name: At_Far-red-induction_P Parameter: Timepoint (hr) Value: 1
  misc_feature: MA Experiment 20001247 PARAMETER Experiment Name: At_Far-red-induction_P Parameter: Tissue Value: Whole Plant
  misc_feature: MA Experiment ID: 20001911 Result: Up-regulated in Transcription
  misc_feature: MA Experiment 20001911 PARAMETER Experiment Name: At_Drought_Reproduction_P Parameter: Age (day) Value: 40
  misc_feature: MA Experiment 20001911 PARAMETER Experiment Name: At_Drought_Reproduction_P Parameter: Organism Value: A. thaliana
  misc_feature: MA Experiment 20001911 PARAMETER Experiment Name: At_Drought_Reproduction_P Parameter: Plant Line Value: WS
  misc_feature: MA Experiment 20001911 PARAMETER Experiment Name: At_Drought_Reproduction_P Parameter: Timepoint (day) Value: 10
  misc_feature: MA Experiment 20001911 PARAMETER Experiment Name: At_Drought_Reproduction_P Parameter: Tissue Value: Flowers
  misc_feature: MA Experiment 20001911 PARAMETER Experiment Name: At_Drought_Reproduction_P Parameter: Treatment Value: Drought vs. No Drought
atgggagtcaatgcttcagagccaaaacgaacacgatcgcgaccaagtcaatcgcaggggaggcatccgtcgacgagacgatctccgtcaacgagcaacaccggcacaacaacaaccacgacgacatcgaattctaacaaaactggtgcctcctcttcctcctccggtgcggcttcttcctcagtcgctagtcgaacatctctcgctagtctccgagaatccttaccggaaaatcctcacatatacaacgtctccgagattcgtgccgctaccaacaatttcctcgctaatcgcttatcttcctcttcctctaaagcctcctggcgttgcaatttaagagggaaagaagtcgttgtgtttcagagaaagtttaggcgaaggatcgacacggatgagcttagagatcgtctttcagatatttgccggagccaccacggaagcatcattaatctactcggcgcttctgtttccggcggtggaagagtaggaggaggaggaggaggaggaggtgatcacatctacttggtctacgaatacgtcaacggagcatctctagctgattgcttgagaaaccctaagaaccctaaatttacagttctatcgaattggacttcacggattcaaattgcaacagatctagctcatggactcgattacatccacaacaaaaccggattaaagatcgaaaacctagttcacaatcacatcaagagctcggcggtgatcgtgacggagccagatttcaacgctaagatctgtcacttcggaactgcgcagctttgcggcgaaacagatgaaatgtcactggagagagacgaatcgagaaattcaaggcgatctgatagcagagcgatcagattcgaaggagttagaggttacatgtcgccggaatttcaaaatttgggaatcgctactcagaaatcggatgtttacgctttcggagttatgatgttggagcttctctcaggcgaggagccgttgaagtacaggtatgataaagccacaggagatttcgagcggacgtcggtgattgaaacggcgagagcggcgatcgaagatggagatggtgatagagatggaagactgaggaggtggatggatcggagattggaggattcgtttcctgtgacggtggtggagaagttaacgaggctagcgttggattgtgttcaggatgatccagtgaataggccggagatgggaagagtcgccggaaaaatatcacaactgtatttagaatcggaaaaatggtcggcgaatatgaaacggccaacggatatcaccgtctctttcgctcccagatga

SEQ ID NO: 86255 - protein, 434 aa, Arabidopsis thaliana
  peptide (1)..(434): Ceres Seq. ID no. 12688346
  misc_feature (1)..(434): Homolog of NCBI NO: 11357615 NR Description: hypothetical protein F24I3.200 - Arabidopsis >gi|6911882|emb|CAB72182.1| putative protein [Arabidopsis
  misc_feature (1)..(434): Homolog of NCBI NO: 22331831 NR Description: putative protein; protein id: At3g57120.1, by cDNA: gi_18175682 [Arabidopsis thaliana] unknown protein [Arabidopsis thaliana]
  misc_feature (77)..(266): Homolog of NCBI NO: 34913770 NR Description: protein kinase-like [Oryza sativa (japonica
  misc_feature (275)..(421): Homolog of NCBI NO: 34913770 NR Description: protein kinase-like [Oryza sativa (japonica
  misc_feature (170)..(418): Homolog of NCBI NO: 5441881 NR Description: Similar to putative receptor kinase. (AC002332)
  misc_feature (49)..(409): Homolog of NCBI NO: 39545656 NR Description: OJ000114_01.11 [Oryza sativa (japonica
  misc_feature (286)..(420): Homolog of NCBI NO: 38175551 NR Description: receptor protein kinase PERK1-like protein [Oryza
  misc_feature (173)..(260): Homolog of NCBI NO: 38175551 NR Description: receptor protein kinase PERK1-like protein [Oryza
  misc_feature (173)..(414): Homolog of NCBI NO: 34485514 NR Description: LysM domain-containing receptor-like kinase 1
  misc_feature (82)..(259): Homolog of NCBI NO: 15233387 NR Description: serine/threonine kinase-like protein; protein id:
MGVNASEPKRTRSRPSQSQGRHPSTRRSPSTSNTGTTTTTTTSNSNKTGASSSSSGAASSSVASRTSLASLRESLPENPHIYNVSEIRAATNNFLANRLSSSSSKASWRCNLRGKEVVVFQRKFRRRIDTDELRDRLSDICRSHHGSIINLLGASVSGGGRVGGGGGGGGDHIYLVYEYVNGASLADCLRNPKNPKFTVLSNWTSRIQIATDLAHGLDYIHNKTGLKIENLVHNHIKSSAVIVTEPDFNAKICHFGTAQLCGETDEMSLERDESRNSRRSDSRAIRFEGVRGYMSPEFQNLGIATQKSDVYAFGVMMLELLSGEEPLKYRYDKATGDFERTSVIETARAAIEDGDGDRDGRLRRWMDRRLEDSFPVTVVEKLTRLALDCVQDDPVNRPEMGRVAGKISQLYLESEKWSANMKRPTDITVSFAPR

SEQ ID NO: 86256 - DNA, 1070 bp, Arabidopsis thaliana
  misc_feature (1)..(1070): Ceres Seq. ID no. 12688414
  misc_feature: MA Experiment ID: 20000234 Result: Down-regulated in Transcription
  misc_feature: MA Experiment 20000234 PARAMETER Experiment Name: At_Siliques_P Parameter: Age (day) Value: 21
  misc_feature: MA Experiment 20000234 PARAMETER Experiment Name: At_Siliques_P Parameter: Organism Value: A. thaliana
  misc_feature: MA Experiment 20000234 PARAMETER Experiment Name: At_Siliques_P Parameter: Plant Line Value: WS
  misc_feature: MA Experiment 20000234 PARAMETER Experiment Name: At_Siliques_P Parameter: Tissue Value: Less Than 5mm Siliques vs. Whole Plant
  misc_feature: MA Experiment ID: 20001450 Result: Up-regulated in Transcription
  misc_feature: MA Experiment 20001450 PARAMETER Experiment Name: At_Far-red-induction_P Parameter: Age (day) Value: 7
  misc_feature: MA Experiment 20001450 PARAMETER Experiment Name: At_Far-red-induction_P Parameter: Light Value: Far-red vs. White
  misc_feature: MA Experiment 20001450 PARAMETER Experiment Name: At_Far-red-induction_P Parameter: Organism Value: A. thaliana
  misc_feature: MA Experiment 20001450 PARAMETER Experiment Name: At_Far-red-induction_P Parameter: Plant Line Value: Columbia
  misc_feature: MA Experiment 20001450 PARAMETER Experiment Name: At_Far-red-induction_P Parameter: Timepoint (hr) Value: 8
  misc_feature: MA Experiment 20001450 PARAMETER Experiment Name: At_Far-red-induction_P Parameter: Tissue Value: Whole Plant
  misc_feature: MA Experiment ID: 20001911 Result: Up-regulated in Transcription
  misc_feature: MA Experiment 20001911 PARAMETER Experiment Name: At_Drought_Reproduction_P Parameter: Age (day) Value: 40
  misc_feature: MA Experiment 20001911 PARAMETER Experiment Name: At_Drought_Reproduction_P Parameter: Organism Value: A. thaliana
  misc_feature: MA Experiment 20001911 PARAMETER Experiment Name: At_Drought_Reproduction_P Parameter: Plant Line Value: WS
  misc_feature: MA Experiment 20001911 PARAMETER Experiment Name: At_Drought_Reproduction_P Parameter: Timepoint (day) Value: 10
  misc_feature: MA Experiment 20001911 PARAMETER Experiment Name: At_Drought_Reproduction_P Parameter: Tissue Value: Flowers
  misc_feature: MA Experiment 20001911 PARAMETER Experiment Name: At_Drought_Reproduction_P Parameter: Treatment Value: Drought vs. No Drought
aagggtcagagttcctaaacatgttggatccattttgttgcgaacatctttaagatccgataaaagacttgtttgagagatctcaaggaagaagaagaaggggggaagcagataacatgtctgcgattgtttgcgggaagagatctctgttcgaggacttagccgccgcttctcctcccgtctccaagaaactccgttgcttttcttcatcttcttcgtctcgtttttctcctccgattcctccttcttcctcacttcttctcgatcacctcgccgcgattttccccgatatggataagcagattcttgagagggcaatcgaggaatgtggagatgaccttgattcagccattagatgtttgaatcagcttcgtttagaatctgccaataagaattctgattctgctacaaaccaatctcctgttgtaatccaggaaccaaatgttgaacctcaacagcaaggatcagccaaggaggaaccaaatgtcttgaacttggatggtacagagtgggttgagctttttgttagggaaatgatgaatgcttctgacatgaaagacgccaaagcccgtgctgcaagagcattggaagctttggagaagtcaattaatgcacgtactggtactgacgcaatgcaaaatctccaacaggaaaacatgatgctgaagcagcaattagaagctattgtacaggaaaacagtttactgaaacgagcggtagtgacacagcagaagcggcaaagagaatcggaagaccaaagtcaggaattgcagcatctgaggcagctagtcactcaataccaggaacagttgagaactttagaggtgaataactatgctctgacgcttcatctgaaacaagctcagcaaaacagttccatcccggggcggtaccatccagacgtcttctaatactttgtgaggccctcgtatcattttgtttccagtgtatttttctctgttggtttgtgactatttatatatattcggggaatcaaaactgtgttcttttgttgttgttgttgttgttattgttgtatatattctctttcgagttcaatgatggattcc

SEQ ID NO: 86257 - protein, 264 aa, Arabidopsis thaliana; identical to SEQ ID NO: 50311
  peptide (1)..(264): Ceres Seq. ID no. 12688415
  misc_feature (1)..(264): Homolog of NCBI NO: 18421340 NR Description: putative protein; protein id: At5g32440.1, by cDNA: gi_13877754 [Arabidopsis thaliana]
  misc_feature (1)..(264): Homolog of NCBI NO: 13877755 NR Description: unknown protein [Arabidopsis thaliana]
  misc_feature (1)..(264): Homolog of NCBI NO: 18412607 NR Description: expressed protein; protein id: At1g80040.1, by cDNA: 35603., supported by cDNA: gi_18176073, supported by gi_20465298 [Arabidopsis thaliana] >gi|25406626|pir||H96831
  misc_feature (62)..(264): Homolog of NCBI NO: 34015166 NR Description: hypothetical protein OSJNBa0017M13.20 [Oryza
  misc_feature (127)..(264): Homolog of NCBI NO: 15241851 NR Description: putative protein; protein id: At5g02510.1
  misc_feature (205)..(264): Homolog of NCBI NO: 35215036 NR Description: hypothetical protein [Oryza sativa (japonica group)] >gi|35215263|dbj|BAC92612.1| hypothetical protein [Oryza
  misc_feature (1)..(97): Homolog of NCBI NO: 35215037 NR Description: hypothetical protein [Oryza sativa (japonica group)] >gi|35215264|dbj|BAC92613.1| hypothetical protein [Oryza
  misc_feature (128)..(223): Homolog of NCBI NO: 35215036 NR Description: hypothetical protein [Oryza sativa (japonica group)] >gi|35215263|dbj|BAC92612.1| hypothetical protein [Oryza

SEQ ID NO: 86258 - protein, 206 aa, Arabidopsis thaliana; identical to SEQ ID NO: 50312
  peptide (1)..(206): Ceres Seq. ID no. 12688416
  misc_feature (1)..(206): Homolog of NCBI NO: 18421340 NR Description: putative protein; protein id: At5g32440.1, by cDNA: gi_13877754 [Arabidopsis thaliana]
  misc_feature (1)..(206): Homolog of NCBI NO: 13877755 NR Description: unknown protein [Arabidopsis thaliana]
  misc_feature (1)..(206): Homolog of NCBI NO: 18412607 NR Description: expressed protein; protein id: At1g80040.1, by cDNA: 35603., supported by cDNA: gi_18176073, supported by gi_20465298 [Arabidopsis thaliana] >gi|25406626|pir||H96831
  misc_feature (4)..(206): Homolog of NCBI NO: 34015166 NR Description: hypothetical protein OSJNBa0017M13.20 [Oryza
  misc_feature (69)..(206): Homolog of NCBI NO: 15241851 NR Description: putative protein; protein id: At5g02510.1
  misc_feature (147)..(206): Homolog of NCBI NO: 35215036 NR Description: hypothetical protein [Oryza sativa (japonica group)] >gi|35215263|dbj|BAC92612.1| hypothetical protein [Oryza
  misc_feature (1)..(39): Homolog of NCBI NO: 35215037 NR Description: hypothetical protein [Oryza sativa (japonica group)] >gi|35215264|dbj|BAC92613.1| hypothetical protein [Oryza
  misc_feature (70)..(165): Homolog of NCBI NO: 35215036 NR Description: hypothetical protein [Oryza sativa (japonica group)] >gi|35215263|dbj|BAC92612.1| hypothetical protein [Oryza

SEQ ID NO: 86259 - DNA, 1643 bp, Arabidopsis thaliana
  misc_feature (1)..(1643): Ceres Seq. ID no. 12688434
  misc_feature: MA Experiment ID: 20000234 Result: Down-regulated in Transcription
  misc_feature: MA Experiment 20000234 PARAMETER Experiment Name: At_Siliques_P Parameter: Age (day) Value: 21
  misc_feature: MA Experiment 20000234 PARAMETER Experiment Name: At_Siliques_P Parameter: Organism Value: A. thaliana
  misc_feature: MA Experiment 20000234 PARAMETER Experiment Name: At_Siliques_P Parameter: Plant Line Value: WS
  misc_feature: MA Experiment 20000234 PARAMETER Experiment Name: At_Siliques_P Parameter: Tissue Value: Less Than 5mm Siliques vs. Whole Plant
  misc_feature: MA Experiment ID: 20000264 Result: Down-regulated in Transcription
  misc_feature: MA Experiment 20000264 PARAMETER Experiment Name: At_Open_Flower_P Parameter: Age (day) Value: 21
  misc_feature: MA Experiment 20000264 PARAMETER Experiment Name: At_Open_Flower_P Parameter: Plant Line Value: WS
  misc_feature: MA Experiment 20000264 PARAMETER Experiment Name: At_Open_Flower_P Parameter: Tissue Value: Open Flower vs. Whole Plant
  misc_feature: MA Experiment ID: 20000265 Result: Down-regulated in Transcription
  misc_feature: MA Experiment 20000265 PARAMETER Experiment Name: At_Open_Flower_P Parameter: Age (day) Value: 21
  misc_feature: MA Experiment 20000265 PARAMETER Experiment Name: At_Open_Flower_P Parameter: Plant Line Value: WS
  misc_feature: MA Experiment 20000265 PARAMETER Experiment Name: At_Open_Flower_P Parameter: Tissue Value: Closed Flower vs. Whole Plant
  misc_feature: MA Experiment ID: 20000286 Result: Down-regulated in Transcription
  misc_feature: MA Experiment 20000286 PARAMETER Experiment Name: At_Open_Flower_P Parameter: Age (day) Value: 21
  misc_feature: MA Experiment 20000286 PARAMETER Experiment Name: At_Open_Flower_P Parameter: Plant Line Value: WS
  misc_feature: MA Experiment 20000286 PARAMETER Experiment Name: At_Open_Flower_P Parameter: Tissue Value: Half Open vs. Whole Plant
  misc_feature: MA Experiment ID: 20001248 Result: Up-regulated in Transcription
  misc_feature: MA Experiment 20001248 PARAMETER Experiment Name: At_Far-red-induction_P Parameter: Age (day) Value: 7
  misc_feature: MA Experiment 20001248 PARAMETER Experiment Name: At_Far-red-induction_P Parameter: Light Value: Far-red vs. White
  misc_feature: MA Experiment 20001248 PARAMETER Experiment Name: At_Far-red-induction_P Parameter: Organism Value: A. thaliana
  misc_feature: MA Experiment 20001248 PARAMETER Experiment Name: At_Far-red-induction_P Parameter: Plant Line Value: Columbia
  misc_feature: MA Experiment 20001248 PARAMETER Experiment Name: At_Far-red-induction_P Parameter: Timepoint (hr) Value: 4
  misc_feature: MA Experiment 20001248 PARAMETER Experiment Name: At_Far-red-induction_P Parameter: Tissue Value: Whole Plant
atactctgttctgatcgcagcaaagccgacgttgaactttctcgccgccggagcgcgtgatctccactctctgtcatcgaatcactctaattgaagattctccgatggcgattgtctatgctgttgtagcgagaggtaccgtggtattagctgaattcagcgccgttacgggaaacacaggcgccgtggtgcgacggatcctcgagaagctttcaccggaaatctccgatgaaagactttgtttctctcaagatcgttatatcttccatattcttagatctgatggtcttacctttctctgtatggccaatgatacctttggaaggagggttccattttcgtatttggaagagattcatatgagattcatgaaaaactatggcaaagtggctcataatgctccagcttatgcaatgaatgatgaattctcaagggttttgcatcagcagatggagttcttctctagtaatcctagtgttgatactctcaatcgtgttagaggagaagtcagtgaggtataattgtttcttcgtatgatctctagatattactcagctatatccattgaaaaggttgaatttttatgagttattacgccttcttggctcacacaggcttctttaaatctgtcttgggtgaaagatgaagtttgttatctcattgttgtgttatcgtgtttacagattcgatcggtcatggtagagaacattgagaagataatggaaagaggtgataggattgagcttcttgttgataaaacagcaacaatgcaagatagctcgtttcacttcaggaagcaatctaagcgccttcgccgagctctttggatgaaaaatgctaagctcctgtaaggatctctctcacttctagattctcttcattccttttctttgctaactaagagatacgctcttctacattctaggtgtttcaactcgcctttgcagcatagtttattgatatgtttcttaaactagagatacagtagttctaagattcaacattattttcgattttgggaaattctcctcgacaaaatatctaatttttggctgataggaactacactgccttgattccacctctgcttaaagaaatttcattattgttttgttttgatgcttgagttccagatcacttttattaatcaacaaaactgcttttcttgtttgtgttcggcagggtcttgttgacatgcttgatagttttcttgctgtacataataatcgcatctttctgcggaggaatcactttaccatcatgcagatcttaaaatctggcggccttatctaaggtatactgaaacggaccactgtttttgtaaatcaactcagtcgcatcatttcgatttgaagccttggttttgtcatgaaaatgactgtgagtttgaagttacatgtcatggtcctccttgcttatgtaactcttgtaaatgtcaaaatcaaaatgatacagaggttcattgaactcttgccttgtcttttagatttagtcacgtgagtgagtttgttctctgtatttccaaaactttatccgctgtgtctttataatttttgcatttgcaatgtacatcacatattcgttatttttgttgttaaaattacttcagttttcatctttgtttaataacatttctgattcac

SEQ ID NO: 86260 - protein, 138 aa, Arabidopsis thaliana
  peptide (1)..(138): Ceres Seq. ID no. 12688435
  misc_feature (1)..(138): Homolog of NCBI NO: 15242224 NR Description: synaptobrevin-like protein; protein id:
  misc_feature (1)..(138): Homolog of NCBI NO: 37531190 NR Description: putative synaptobrevin-like protein [Oryza sativa
  misc_feature (1)..(138): Homolog of NCBI NO: 16323190 NR Description: AT5g22360/MWD9_16 [Arabidopsis thaliana]
  misc_feature (1)..(138): Homolog of NCBI NO: 15236687 NR Description: synaptobrevin-like protein; protein id: supported by cDNA: 41543., supported by cDNA: gi_16612291
  misc_feature (1)..(138): Homolog of NCBI NO: 15238971 NR Description: putative protein; protein id: At5g11150.1, by cDNA: gi_20259406 [Arabidopsis thaliana]
  misc_feature (1)..(138): Homolog of NCBI NO: 15224711 NR Description: putative synaptobrevin; protein id: At2g25340.1
  misc_feature (1)..(138): Homolog of NCBI NO: 34898442 NR Description: ESTs AU082579(S2069),D40238(S2069) correspond to
  misc_feature (1)..(138): Homolog of NCBI NO: 28828593 NR Description: similar to Arabidopsis thaliana (Mouse-ear cress).
  misc_feature (1)..(138): Homolog of NCBI NO: 33468929 NR Description: synaptobrevin like 1 [Mus musculus]
  misc_feature (1)..(138): Homolog of NCBI NO: 16758296 NR Description: synaptobrevin-like 1 [Rattus norvegicus]
MAIVYAVVARGTVVLAEFSAVTGNTGAVVRRILEKLSPEISDERLCFSQDRYIFHILRSDGLTFLCMANDTFGRRVPFSYLEEIHMRFMKNYGKVAHNAPAYAMNDEFSRVLHQQMEFFSSNPSVDTLNRVRGEVSEV

SEQ ID NO: 86261 - protein, 72 aa, Arabidopsis thaliana
  peptide (1)..(72): Ceres Seq. ID no. 12688436
  misc_feature (1)..(72): Homolog of NCBI NO: 15242224 NR Description: synaptobrevin-like protein; protein id:
  misc_feature (1)..(72): Homolog of NCBI NO: 37531190 NR Description: putative synaptobrevin-like protein [Oryza sativa
  misc_feature (1)..(72): Homolog of NCBI NO: 16323190 NR Description: AT5g22360/MWD9_16 [Arabidopsis thaliana]
  misc_feature (1)..(72): Homolog of NCBI NO: 15236687 NR Description: synaptobrevin-like protein; protein id: supported by cDNA: 41543., supported by cDNA: gi_16612291
  misc_feature (1)..(72): Homolog of NCBI NO: 15238971 NR Description: putative protein; protein id: At5g11150.1, by cDNA: gi_20259406 [Arabidopsis thaliana]
  misc_feature (1)..(72): Homolog of NCBI NO: 15224711 NR Description: putative synaptobrevin; protein id: At2g25340.1
  misc_feature (1)..(72): Homolog of NCBI NO: 34898442 NR Description: ESTs AU082579(S2069),D40238(S2069) correspond to
  misc_feature (1)..(72): Homolog of NCBI NO: 28828593 NR Description: similar to Arabidopsis thaliana (Mouse-ear cress).
  misc_feature (1)..(72): Homolog of NCBI NO: 33468929 NR Description: synaptobrevin like 1 [Mus musculus]
  misc_feature (1)..(72): Homolog of NCBI NO: 16758296 NR Description: synaptobrevin-like 1 [Rattus norvegicus]
MANDTFGRRVPFSYLEEIHMRFMKNYGKVAHNAPAYAMNDEFSRVLHQQMEFFSSNPSVDTLNRVRGEVSEV
